United States Patent Application Publication US 2014/0325702 A1 - sequence listing, part 22

SEQ ID NO: 27158 - DNA, 2251 bp, Heterodera glycines
agtctctaatgagttgagcagctccgccgtacgtttctttctttgctcttccacagcctctgatcgatcattgttttactgcgcgagcgcgagtcgttcacgtggatgcagcgtgagacgaactgcgcgaacatgtggcacgtgacaagcgctgttgaagaacgaacttatcagcagcagccgttgttattgtttcatgaaattagtgcaataaaaataaatgattacgaaaatgcggataatgagaaaaggcaacgaccgagggtaattagtagcaattaacggatttatatttaagcataaaaaagaagaagaaagaaagcaagactttagcagaaatgaataagaaaaattaaaattatttgcaacaaaaactaaattctaaaaaatttgatatttatatcgcaagtttaaaataattttaaacaaaatgatattgaaaaaggataattagttaaaatatttcattaaaaaataaacaacccaaattagcaaaaattaatttggtagttgaattgatgcaagattatctgtgtataaaaaaataaattaaatacaatccgggacaataaacgcaaacttaaaaaaaagtttaaattttccacctatttattattataaaatataattgaaattaaatgataatttaaatcgacaaatttggaaagttacacaaaaatattttggttgataaattacaataaaataataataattttttcataaatgatccgtcgcccaatgaactttcacactcaaatgcacacactgaattaatttgctcgccatttctgtcaattgatcattttcacctcgcgcacattctgtccccttttggtcgtcacacgcgccacggtcattcactccgtcgtcacattaaaaaataattacagaaaaagtcattaaacaaatgccgttcgccacaatgcgttaaggcggttggaggggttggttggctgatgcaccaaacaatcgcgcacattcgttccttcgataattgggcgcggatgattagcgctaattaatcgtaattgcatagattgatgcaaagaatgtagataaacacaggcatttattcaattaataatgtgatcatgttatgcgttgaacgaagaaagagtgaatggaaaggagattgtttgcatgcatattgtggtggaaataaaataaacataattgaataaaaaattattgaagttaaaacaatttaaaactattcaattcggtccccggctgtgtttatgacgtcatattttccaaattatcaaaattaaatttaaaaaaattgattacaagggagcggatgtttaggggtgaaaaattccaatttagtggtctaaataggggcaaaaaatggcgaaaaaggggcgcaaaacggtaaatatgtggcgaaaacttttaaaatctgtgctttttcaatgaaaataaatttaaaatcaatataaataacttatccatcagtaactttcatctttttttctttttggttaaaaaatcctgaaaaattttgttacttttcctaactttaaagaagtcggtccttatggatgcatttttatgtatttttgctaagaatttttcaaaaatgccgtaatagagggcgaaaataggggcgaaagccaaaatgtgcgggcgttaaagcgaagaattttcgttaaaatgttttttttgtgcgtttcttattgaattaaaaccgcaaaaaataataatttcgatttatttcacaaattcgtgaatatgcaacttttatatgtttttataatgttattcatattttcgaataattttttatttacaaattttaattttgaattttgaattttaatttattttaagtctttagccatttttatcttcacattgggatatcagaaaataaaacttatgccgggccttcgcgtctgtccctggcagaatagggtcggccaattctgcgcatctaccgtccgtcccggaatcaaaattttcaaaatttcttagaaattcaaataaaattgttgtaagctacttaacaaatctcatgaaaattttgaaaaactattaaaactccgactgcgacaaacgacatgattaattaccccgtttttaaagtcatttttgattggttcatttgttgttttgagccatatttggcattacagttatcacacatttttcatatgaataaaaaacggaaaaaacagaaaataacattcaacaaaaagcgcattattggtgaatcagcgtttcctttttttatttgtgaatggat

SEQ ID NO: 27159 - DNA, 1308 bp, Heterodera glycines
ttgcaaaattccctttatcaccgttttttgggacatatatgaaacctgaattgttaaaaatatttttgggggggttctaattgccgatcatttttagtagggttgagcggtaaccggtaattgtaaaaaaaccggtaccggtaattttcgggttgaaaaaccggtactttttggctgggaaaaccggtaaaaaaccggtactagtaccggtaccggtcaaaaccggtactaggttctcagttgtaccgtttttttcagtaccagtaccggtaccgctcaaccctaatttttagtccacattctgagccgtacggtgcaaagcatttgtacaacgggcactgttggcggcacatttgactatgaccagacatggatttgcgcgttgtaagtttttctcatatttgccaaaaatttcgaaaataaattttcaaaagaaattctgctcaagtggttggcacgaaaaaatttttgagttttattctgctagttcgtttttaaaattccttaagtgccccacgccaagagagtaagaaattgattataattaaaacaatttaattaattaattctatgacatcgaaaataaatattcttgaagtcaatcactcgacagttttagttcttaattaccctgtaaaatctcaaaagaatttgacaaattccaaaaaaaattgtgctaaataaaattcaacaaaatatttgacaaattttaatttttaaaattcgatttaaatttattttatttcttttttttaatattcaatttgcagatgcatgctgaacacggtgcagcatcgacatgtggccattgcgcgactgtcccatccgacaaatttgggccgtaccatgcaagacttgcgcttcatcattattgtgattgcaccgtccagagcggtaagtatacttattttaaattataaaattatttaaaaatactattaaattgaaatttttttttacagtaaactaaaactcatttaatatagcttataattatttatataataatttattcgatttagttaatccaaaattttttcttaaatttacatattcaaaaaccttaaatttattacatataaaattaattcaatatttctatgcatttcaaattattatcagaaaatccattacacatttttattatttaataaatttattaaattagtcgccattaaattttaatattaatttttaatccatttaaatacatttatttcactttttggactcacagaaattttttaaaaataaataaaatgcactcaaaaaaaagccaaaatttttggagttgatttttaaaaaatc

SEQ ID NO: 27160 - DNA, 1388 bp, Heterodera glycines
ctggtcatggacctgatttttattattaataatacatcttgtcgattatacaagaactaacataaatagtacgtaagacagtatttcttcctccttaaccataaaaaggggggggggaggggtcgaataaaaattattgtcggcacatttgtgtcttatataattcgtcatttttcagctgagttcgccttggtttcgcctgtttctctacgagttggcgggcaatgggccgccggcactgttcctgccgttgggcactcgcctgggccgtttgccaaaactgttttggcacagtcggcgattgatgctcacgcagggcacccatgagccgctgattttgcccgtcgaaaatgcattggtgccaaccgctgatgcactcgtgtcggcacccgtttttatacaggtacacccatgtttgatacttgacgagaaaattggcatttcttgttgggacaaattggagcaaatgggacgaaatttgatccccctttaattgcctaattagtgagtggggagacaacatcagtcagtttatatagaaccgaggccgaaaacgtggggcccgaaaaactggccaaataaaagtccaagacctctaacaataaatatctctatatttttaccggtttgataatgttcaattttacggtaggcatacagtgaattggcgtcggatgccgaggtggtcaatgtgccgttcccattccttgacgacgacgaacatgccaataacgacaactataccaagcaggatgctactgttcatgatcattgccatgaaagggttgctgctgatgcagcagatgatgctgttcttcttcaaaacggtgatgttgtacgacatcatgaccaccatcatcatcatggtgccaacacaaacaacgacggtactggcacagaccgacaggacgaaactgtacatggaacaatgccgccggcaccgtcggaattgccatcattcagtcgacatcccattgtgcgaaaactgcgtgaactgctccacctggaccacctctgcgggtctgaaatatgttagggtttcgagaaatcttttggctgctcacagtctcagccctcttggtcaattttcaattctcgctttccagtcaagaacactcctgtattagtaagtaacacttccgagagtttggtctcgacaaaagttggggtatttttttagtcgtggtcttgagttctcggcaaaatttccgttttgtacatcattactaaactcatccccctacactctctcgctctctctatctcttcacttcccttctctcttccttccttcactctctctctctctctcgctctctcgctctctctctctctctcgctctctctctctctctcgctctctctctctctcgctctctctctctctc

SEQ ID NO: 27161 - DNA, 1235 bp, Heterodera glycines
  unsure (1)..(1235): unsure at all n locations
tcgctacanatttcggagtcaatacaacgactttcgaccaaatcagcagcaccagtgacaaggcgttggtcagccaacaatgttgggcctcaaaattcaacggcattcccttggcaattggctgaccaaagtgtgccgtcctttggcaaagtgccgttcctcgacccaccccttttactgcggccttttcctcggcttactcttcgacttggccatcgtttggcttttcctcccctctttgtctcatgcgccgaccaaagaaaggcaatcgtcgatcagtgaaatggcaaaaactgtaaaattgccaaaacaactgatgggctacgaggcgtatttcaacaaaaacttcacttaccctttcgattgtgagttgcttttgttctaagcggattaattgtccgggaagtttgcccgatttgccattttttgcttaaaagaggaaatgaaaaataatttaattgtgttcagcccgagggaccgttgcgcaggaaattgcgaggaaagtgcgcgtgttctgttggattttcacctacgaaaatttccacgagagtcgcgcgcggcacgtgaaagcgacgtgggcacagcactgcaccaaattcatgttcttctcctccaaggaggacagcacacttccggcgattgacctgcaaattccgctcggaaggcaattcatttggcggaggacgaagaaaattgccaaatatatttacaaggaatatttggtgatgggaaaatgaaataatttaaaattggcactctctgctcataattcattcattcgttgtcagaatgactacgattggtttttccgtgccgatgacgattcctacgtggtcatggagaaccttcgactgatgcttttgccatattcgccaaaagaacacgtctattttggctgcaagttgcgcacaacgctgtacaatgaccgcgtgtttccgcagggcggcagcggatatgtgatgagccgaagtgcgctcaaagtgcgttaaaagggcgaaaaattttaaaaatatttatggtgagccgacaggcaccagcgggaaattttaaatttttgcgtatttatcaagaaaattggcgcaaacgctcgcacactttgacgaatcgggtcgtttcaaaggatgcccttgggcaatttgaatttttttcccgttcccttaaaaagggaacccaatttcgatgaaaaactttttttcctttaatatattccaatgcctttctaattaatgtgttta

SEQ ID NO: 27162 - DNA, 1887 bp, Heterodera glycines
tggcacctttacgaaacattcccaagttggcacttttacgaaacgaccacagtggcacctttacgaaacattcccaaggtggcacttttacgaaacgcccatagtggcactttttacgaaacgacccagcacgcctccccctaaattaaaaaaaacaacatattttcagcttcctaaatttcttgggatttttaaaaatattcactttaaattgtttaattccatcgatcaaatattattattttgaatttttgttttagcccgttgctgtcttatgaagcctgtgaactgcttcaagtctatctgtttcccaaagagacggaggtgtggcatgccttaggtataaatctcatcaatggctgcttttagctcagggttcgatctcaaaattttgaaaatcctcatttgccactaaaataccccaaaaaaatcctcatttggaatgaaaaatcctcattttttaaaacataaaattgcgaacaaaatcagtcaactatcatatttttcgtttgaaacaatcacggcgcctatcagtgccgccggacctatttttcttaaaaaattggcccaagaatcgcaaaatttgtaatttttggtaaaaatttgtaacaatctcatttaaaaccaccaaacaaataaaaaattcgatttttattgttttaataaattgacaattctcttaaattttttgcttttaaattgcttttttttttgtgcgcggtttttccaaaaaaactttttgggaacgttggaggggggggggggcagtgccgataggcgctgccgaaaaaatctgagattttgagtgcgatttgttaacagattttgtccaaaaaaatgattttgactgaggatttttcgaaaaaatgtttaagatttgaagaaaaagttcgaacattttgccaaatatattttttgtcactttttttttcaaaagactacaaaaatccgcaaatcctcattttcccaaaaaaatcctctttgaccctctaaaagaccacaaaatgaggaaaaatcctcagatatcgaaaccctgttttagctcctcttttttttgcaattattttttctttttaggaagggcatggaacacgccgccgtaagttccttcttttgtttaaattttattttttcaaaattttaattttttgttctttccagtgaagattggcttggaactttgccgccgccttacaggtcaaaaaactgacttttcgggttttcgaaaacaaaaaaaaaattaaattttttctactttttttttgttgtgattttcgagtcataagtccaaaacagggctgcacgaaatttcgtgtcgttttcgtttcgtcctacattttcggcaatttttgggtttcgtttttgtgtttcgttttcgtccgttaaaatttttttgtttcgttttcggttttcaaaattttatttttcgtttcgtgtttcgttttcgtatcgaatgccttttttcgtttagttttcgtaccagtaaccagattaaatgacagaacccgggggggggcgaccagtaccatgggaaaatctttgtacagaatatttctgtcctatccaagcttaccatcgaaaagcccaaaatatgaaattaaaatttgctttttaaatatttttcttctaaaaatttgctttctctgctgtcaggcccgtgttcagcgatggttgggcaccgtatgggtactcggcacaaaacattgcgcaaccaccgccaacattaacggagccttctgtttcatcgtcaatccatcatcatcaaattgatcagcaccaccagcagcaacagcagcagggacagcaaaggcgagttcaacaacggtgttaagtcgaacctaaaagaacgtgtcaatggggcgaaccccgaaaaaagtgccaatgaat

SEQ ID NO: 27163 - DNA, 597 bp, Heterodera glycines
ttaattacataattaattttttgtagaccaaatgttattatcaaagccaacagcagaaggaataaggaacgacgataagaaaggaaaaaggatgccgataaagaaaaacggagagagcgaaggaaagggagggagagggggacgaagggaaagaaagagatagagagaaagagagggtgccaatgccaaagggggagagtgccaatgctaattaggctgtttgataccgctcggttcgagtcacgaagtgagactgagactgatcatcggacgctttatacagatcaagaagatacaaaaactggacgctttatacagatcaagaagatacaaaccgaagtttttatcaatttgaggttcggtgtcgagactctcaaacagccctatgccaattgctaatggaaatggcaaaacgttattctgtttaaccgccccctggcaaaatgtcataatcccgacaaacaaagacatttttgttaatcgcctgcttaatttgaagttcggtccaccccatttcatcactagcaaaggtttgttaggctgtgatttttgttaaagcaatcgcatgtagaaccctgagattaataccaacccaac

SEQ ID NO: 27164 - DNA, 939 bp, Heterodera glycines
gaagtctccgaatcctgaataaataaatgaaaactaaaaaaaaatttttctcttcgtacccaaataacaattctgtaaatgtccttgtcctccctctccttgatcggtctgatgtaacatcccctctccacatcatgacaaacattgcacagccggcaaaacatctccccacattcatgcagcttcttcgggttatgcagataggttttgctgcatataacacatcgcctccacagtttgcaagtttggtgtccctgatggtaatcgaagcattgccggttgtagaaaaagcggtggcaatggggacactcaatcttcactccaacatccttcacacacggcacgcccccaactcggttgcagtaataacaccgggccctacattcgtacgtatgtttggtttccgttgaataaaaacactcgcagtccacgcaaaacttcttccctcggttgaaaaagctcacataattcttcaatccgtcccaatgatttccctccaaaaatatcggcaccaccttctcccgggccatcggtcccttccacaacacacgaatcgacttcctcgggtccgcggacttttcaaacgccacaatcctgtacttttcagcgttcaactcatccttaaattgttgttattttgctgaacatttttccaaaaccaacccaatgcgtctgaaccatcaccaaatgctcaagtccatagccactttcattcctctgcactcccgaattttgcaaaagttcgaacgctgcctctctctgcctcgaaatgttgttcataaaacgacgaaaattatccttctgcatttctaaataatttttcgccgcgaccagtgcgtagaacaagcaaaatttgtcattgttctctatccttaattttttttattcatttaatttaatccacgatcactcaaacctactttaatcgctgctgctcct

SEQ ID NO: 27165 - DNA, 2248 bp, Heterodera glycines
  unsure (1)..(2248): unsure at all n locations
gatggacggcgtgggtcagcgacacgtacggccccatctgtcaatggcgccgggtgtgtcgtgcgtgtggacgtatcgcctacgtggccacacatcagtgcccacatgaccagccagccgacgatggaatctgtcggcgctgcaatgggccncacacccgtcgatgagccttgctacatccagcnccattgacgacggctcagttcgacaacgtgcatcgattgctgttgacaacgacgattctgacgacgacgacgacgatgaagaattgccgcttcgtctgtgcttctttgacgctgagacgtcacaggatacgccattacagctgaacaaccgcaccgtccagaagcacgtgccgctgctcatcgtcgccgaagtcatctgcgaacgttgtctgcaggctggtatcagcgtgagcgatggccttggaagacgggctcctggctgcgtctgcatgacaggaatggtgagaggtcaactgtttcgccagtggtcttcgccaccatttgccaatgcaccgggagacaacagcgcttcgccagttggagcaccagcgttcaaccagcgccgcttcttcttccattcgtttgacaacgacggcaacgacccagtggaccaatttttggattttttgctgcagcatggcccaaagaaggcacacacggtgtgcatcgcccacaacggtggaaagtacgatttccatctcgtacttgaggcactacaccgccgaaaccgtccacccaagcatctgtgcaccaccggattgaagatctactcgatgcgtctgtccgggcgtaaccaacgacgaatcacgttcaaggattccatcaactactttttttgtgccttggacgcgttggtgaagagcttccaagtgccggaccatctggcgacggtgaagcccttctttccgtatctctacatacgacgacaacatctgtcgcagcgcctcaacggtctaccggctcaagagttctacgcaccggacacgatgaaggcagagaaacgggcgcaatttctccgttggcacgccgacaacaacggcaatggattccagctacgcgagcagctcataatgtactgcgtcaacgacgtggccattttgagggagtcggtcatccgattccgccaactcatcgccgacaatactcaaggcctcgacccattcctccacgcgtcaacagctgctggtcttgcgctggcaacttttcgccgctgtttcctgcccgccaatcgtctggttcactcacccgagggcggctacttgcgcggacgccgtgcttcggcagaatcgcagcgctacatccgcttcttcgagctggagcacccggaggcgcaagtgcagtgcgccagctggtccgttggtgaagcgcacatcgaagacagtggctaccgcgtggacggactttggcgacgagaagcgcctctccgtcccctggccattgaatggcttggatgctattatcacggtaattaatttttttttcgtttccaaaatatcttaaaattgaggctgtcgtgtgtgctttcccgaccggcagcaacaattggcggcggggcgaacagcggaagatttgtacgaacggacggagcggcgcctctttgagctggagcacgaccacggctgcgatttgcacgtggtgtgggcctgtcagtgggcggagcggctccgccacgatccggacctgaagcgccgttacgatgctgtgttcgtcccttgcccgctggacccgcgcaacgacgcgttgaggggagggcgcactgaaccgttcaagctgcaccacgtgtgcagtgacgacgaggagataatgtgcatcgacattgtcagcctctacccatacgtcatggtaggtttttcttttaaacattcgcatattcatgatgaataccagaaagccaatcgcttccccgtgggcaacccacgggtcctgacgcgcgaggtgctgctgcgtccgccaacggtaccgctcccgtggaatgcaccggaaaacaacatcttccgggggctgctgctcgcccgggtgctcgctccacgcaacatccgggtgccgttgctcggctaccgcacaaaggacgggcgattcaccttccctttgtgcgcgtggtgtgccgaccgtcggcagcagcggccgtgccgacatgacgacgacaagcgctcgtgggtgaccgcctacacgcacgtcgagctcaacaaagcgctccagcttggctatgtggtcaccgaccctatttgaggtagtcactcatt

SEQ ID NO: 27166 - DNA, 1046 bp, Heterodera glycines
  unsure (1)..(1046): unsure at all n locations
aaaatacaanctgggcaaaaaattcattccctttgctggggagggtaaaaaaattgtggaatcaactcgataaagaattaataaaaacaaattcttttaatcaatttaaaataaaacttaaaagttcactagggtaatctgtaagaccgggaaagttagaatgtaccaaatttctaagtgatttgtatttcgacctcatttgactttgacctcaatttatttattatttattttcacatattttgtctttttttaattcctgtgatcatccatatattttgtcacttactctacgacatttatctgatagtcgtcagagtaagtggttctcgcccttctgatgacttttttatttttatgaataaataaacaaataaatttcctaaccctggacccaaatataaacataaaattgcaaaaaaaatcaaagctcctaaaaagagtgctgatcaaaattcgaacaagttttagggttcctatgccatccgaattctctatagacacaccctcagcttcacatattaaaaaaataattttattaaacattcaataaaattcattacgggacatggacaattgaatcatcaaaattctcgaaatccttcaattttcctgcatatccctcaatttgtaaaccgagcgccctcataagatcatggatgtcaccgttgttgttgtacgacgcgtccaccaaaattcgcataatgacagcatcctggaggatgtatcgtttgtgtctcttgtgaatgaaatgacgagcagatcgggcagcgtccacctgtcttcgatgctttcattaaccccacaaatgaagtccgagagggcggggtggtgacagaggcctttctaaatgtttcttttcaatttgcttttaaaaaattaaagaccataaaatgaagatgagttgcttccagtccgttatttgtacgagcgagggcagacgttgcctgtgagtgcatgttccacagcggaattggaaaatgtggcgtccgaacgatttcatcctcccacgctggaactgaattttttattaacattaaacggat

SEQ ID NO: 27167 - DNA, 758 bp, Heterodera glycines
tttgcattttaataattttttttcattttttctatttcattaaaggtgaagcaggctttcccggaattcctggcgcaaaaggtgaagctggcttcccgggtctgcatggcgccaagggcgaattgggattcgatggattgcctggccaacccggattgcaaggtgggtggccaatttacagacgtttcgataaaaaatttgaaaaaaaattcaggcccacctggactgccaggttttcctggcgaaaagggtgaggctggcacacccggctacggcgtgcccggcttgccgggcgagaaaggcattcccggaattccgggaaaatcgggcagatcaggaccacctggcgagcgtggcatggacggaccacacggattcactggcataaaaggagaaccagtaaaaataaaaaaataattatttaaatttcattaaaaattatataaagcaaaacttgtttctattaatttttctaattttaaagctttaaaaattttataataattaaaatttcgtataattggttaattctcataaaattatgtgtataaagaaaatttttattaattttaatatttaaaattaattctccagggttttcccggccaagacggactgcccggacaggatgggctgcccggactgccgggcccgaagggcgatgctggtctgcctggctttcccggcatacctggccaagaaggacagcccggtctcgtccgccctcctggacttcccggtgatcggggcccgtccgg

SEQ ID NO: 27168 - DNA, 881 bp, Heterodera glycines
aaatgtatgaagattgcaacaccgtttttgcacggtcccttgacgcgaagaaagcgcgtctcttcattactttcacgaacaacagggaatggcctgagttcaaagagaatttacacaaaaacggtcaagtatttactgaccgttttgacatgtggatgcgtgtctggagcagcaaaatcgctgagttccaagaagaactttatgacaaaaagttcttcggaacaatccttggttacggtgaatcaatggagttccaaggccgaggaggcccacatgcccacattgtggcgcaaacagacctggacgcagttccatatgtcattcaggaatacatatgggcgcacattccatctttgcctgataaagatgacgacacgcccattgcaaaaatgcatcgcgaaatccgcgaaacaatgcatatgcaactgcacagatgcagtgacagttggtgtggtcctagcgacccaatttacgggcggtgcaagaaggggttcccagccccttactcaaaatgtacgattttgcgcccggacaggcccgcgatgtatttccggccttcaccatctgatggtggtgcccaattagaggtaaacggcttaatatacgacaactcacatgtcgtgccgtataatccaggtccaggaaaaatccaggttgccgaaaaatggcctggacctggacctggatccaggaaaaatccaggcctggatccaggtccaggccgagctctaatcacatcattttcggtcacataatcgcatcaatcaatcaatcaatcgattaattaattaattcatctttcttctgctgatcactcggcccgggagaagcggcgtcaagaaggctgaaaaaacgatgattcaattgcaattataactcat

SEQ ID NO: 27169 - DNA, 884 bp, Heterodera glycines
aaaatattcatgtagcccaactgactcgaacttcatccctttgtacctttattatcttacaaaaccacttcaccacacatgcatttactttttgaactgggagcccaaaattgactcgttgtgttgatgagttaatatattggcagggcgagtccgggcacccgaaggaaattggatgaaaagaaatttaagcaaaaatggcctctagtcttgaaaataaaaaatggcaatttaatgttaattttaattattttgacatcttatgtaaaaatgactgattttacagtatgatcaaaatttattgtttttgtggtactcaatttagacaccctatggtgctctgctggtattagtcgtagaccaaccattcaaaaggcaattcggtagagaatttatatgctctttctgataggcttactcattttttcagtaaaattttccgaacaccttgttaatttttcgaaagttttcacgattttcagtgtatttcgggtgttccggtcgatcaaggttcggacaccgccccgcccccgcccctgggggcgggacaggttttttggcctcacccccgtccccgcgactcagacccccgcaacccccgcccccgcgcgaccttcgcccccgcgggggcacgggggtgaaaaacacacccctaagaatggcatattcgtggaattaaaggcaaaaatttatacaattttgaattttttaacaatcttttacaaatttttatgaaataaagtaaatttgcttatattttttaaaatatttgtggtttaatggttagtgcttcatcattaacaatactttttgttatgagttcaacaccggttgacgttttcttttgattttatttatttttccaaataatacagggtttttct

SEQ ID NO: 27170 - DNA, 752 bp, Heterodera glycines
caaactcatcaattgttagctcccgttgacaaaccgaagggtacattggggcaatggatgttgggctaccgtatcagttattaaaatttttgtttttcaaaaaggatactaaaactgggataaccccattcagagactagtcaaaaaaaataataataggcttggactaccatactaattagaaattttagaatgtgtctgttaaatgcaaaactgttgtgaaaaattgttataactccattcagagaagagatagaaaaaaaataaaaataggtttagagagcccgtgaacagctgcatcggatgcaagtgccgccgttgctgtacgcctaacagttggtgagcaatgacggaaaattgcttaaaaaagaaaccaaacaaactcatcaattgttagctcccgttgacaaaccgaagggtacattggggcaatggatgttgggctaccgtatcagttattaaaatttttgtttttcaaaaaggatactaaaactgggataaccccattcagagactagtcaaaaaaaataataataggcttggactaccatactaattagaaattttagaatgtgtctgttaaatgcaaaactgttgtgaaaaattgttataactccattcagagaagagatagaaaaaaaataaaaataggtttagagagcccgtgaacagctgcatcggatgcaagagccgccgttgcgtgtcccctaatagttggtgagcaatgaccgaaaattgctttaaaaagaaaa

SEQ ID NO: 27171 - DNA, 1767 bp, Heterodera glycines
  unsure (1)..(1767): unsure at all n locations
aaaaaaaattattaagtttttcaaacgttatgacaattgttccagttttttggctagaacttttgaaaaacttaataaaattttttgaaatttagcaagctaataaagcaatccaaatgatacaatttggttgtgtctgagaaaagttatgagttgatttagtcaaaaaatttgcactttttgtgaagtgaccctagcaccttctcactcaaatgctttaaataattatccgctgctctcttttaagaattttcttctttttttacggaacaaataccaaaaagaaagagaaggaaatgccggaaagaaaacacagagaacgaaaaacaggaaaggacaaaacgccaaaccgaaacggnggggggggtttattcggaatggtgccgcgggtgggcgggtggcaaaggtgcctcgtcggaaggtgtgtgcccgttgatgactttcacccgggcggatgaaccaaacccaactttcgctttgcgttatccctccgtttatctcgcgccaccctccgtccgtcccgcgtcagccgtgacccctctctctttcctctctcccctttcccctccctttccctcttttcccctctattcccctctttgccctctctttccctctcttccgcgcccattacccttttgatcaatcattgtccgctctttcttgcgccggttcattttcgtcattgacccccacggctaattaatttattttctccaaattcggcacttttaactttgttttaccttggcatatgtttgccgctttcatttcgctactgaattccaattggatttgcaggcgaaacaaatccaacgaagcccaaccgaactcactaaatgatcaattagtaaattaattaattcatttattcattcgttcgttcgttcattcctcgcctccatccatcggtcatttccctttcatcaaatttgataattggtagacaagttggtgtggttgtctgctgatttttctggtcactctctctctgtctagcgatcgttcgtcgcattttgctcaattgtcgcgtctccccaccccccccccccccggtgaagttgcctttcctttcctttcctttatatccaatattcggcagttgcggccaatctcttttgggttgtgatttttggacaacgcggagagagagagagagagatgagagatgagagagagagagattgaatggtatgatgagagaacagagagaaaaagcatagcgagaaaccaataaagagagagagagagaaaagggaaggtacggatattttacatgtgggagaggagggaagcccgggggcagaatattgcaatcgcgcgcgagaatttcacattggcttctcactgataacgaaaagggaaggagccaggggaagagaaagtgagcaacgggattagctaatcggagacgaaggagagatcggcgaaggggcgggtggaggagggggcgcaaaaaggaccataatgtgatatgtcaaagaatagtaatggatccgttgaagtcactggttgtaacggttgctttccggattgattcggacgtgtccataggtggtcaacagccaggaaagcatttcaacagcctgaaacagaataccccataaatttattcaatttttaatgggtcattccaacttatgagcgtgaagagtgccggcaatgatcggataaacgctttttgtatgggccatcgccaactttggacagataagtcaattcttgctcattgatgggcagggttaagcaaaaagaaaaaatcaaaaa

SEQ ID NO: 27172 - DNA, 922 bp, Heterodera glycines
tttcgatctgtgggtggacggaagtgctcaaatttgaagagttggcgcgagttgacgctgacgatcagctccttctctttgtcgtcattggtgaacacgtcgatacggaaggggcggtaattgagcaacactttgtaggagggcaacgacttgcgtttgtccccgacggcagtgacgaaagaggccgagtcggcacccaaatcagcggccaaaaagctaaaaattcaatcaaattgaatttgccattacagcttcgaatgcattcgtttttgtattgattcattcatcattgcaagtccatttcacctcctatgttttggctctccgtcaagtgcaattgccggatgaaatcgctgtctgattggttttatttcgtcgatcagtagcctcagctggtcgtcctcgagaagtgccaaaaccatgctcaatcggttcaccgaactctccaaaattgcctcaatggacgactcgttcgttttgaccgattccgctcgtacattgtaaatcgggttgtccttttttgctctgtggcgcctgcaaacaaataagaattaaaatctcaaattttcggcgaacttatatgtacttgcaaaatcctgactgatcacatgttttaaaattacttttgtccacggaaaaagcaaaagataataaaacaaaaaagaaaggcgcaaaagtcaataggttcgaacgcatttctaaagctgaaaacacgacaaatgcattgggagtggaaaaaatcaaaatattaatctacggagaagtactttcattcattaaatattacagcataatattagaaagaatattcgcgaacgaagtaaatgggaggaaaacaccacagaagcagcagcaagatgagggcggacctatctaatccaaataaatcctacccccactcttttcataaatccatcttctc

SEQ ID NO: 27173 - DNA, 1419 bp, Heterodera glycines
  unsure (1)..(1419): unsure at all n locations
tccgggctctagctaaatcgaccccctactcgttnttagtcactagcggggttacngcatgcggcgtccaaatctctttttaacattttctctaccttnttcttcctttttggtattttcttatggcacaatcattttcctcgtcttttttttgtactattttcttatgtcacttatctttttttttgctcttttcttatatgctccgtttaaaaattataaggtcaagaaatttttcgtcgctttacaaattttttcccgaaaatggccccgaattgggcgattcgtaattaattataaggtcaaaactttaaagccatgtagtaagcataacttttaacgctgatcaaaaaaagcaattgcaccaccgtgatcagatcactcctttagggtgttctgaaaaccttaaaactgcttgaaatcgtgaaattttcagaaaaaaattctttgagaggcttgaaaattttgtgaaatatgattatggtggacaggaagagcacaaaatttgctactagatgaaaaaatcgtaagtctcaaggacttctgtactcatcgcgaagcaataacttagaaaaacttctaacatgttaagctttcgaatgataccaaaatgttggatttggatgacaaaaattagtcatagttagggatgcaatttttaggctctaaaaactgcaaaaataggtaggctttaggctctaaaaaaccccaaaaataggcactaaaaatcctcaaatttaggggtgtaaaatgacaaaatgtattcaaaaaaataaaaaaattaggccaaatcagtattgagataaataatttttaaatcacaaattcttgtcaataaaataaataaataaattttggagatgaatttttgaaaaaaattttcatttcttagggatgtatttttgaaaattttcgggtcggttgttaggggatattttttgaaaaaaattttacgttgattcttaggggtgtatttttcgtttttattgcatttttattaacaaattttgggcaaaacgccaaaataggcaaaaataggctctttcaaaaatttttaggcgctaaaaataaaagcctagaaaataggcactaataactcgaaaagtagcttaacaacagccgaaaaaaacatgtttttcgtgcgtttcaagccacggggagctcaggaaaaaaataggcttttgcctaaaaattgcatccctagtcatagtaagttttgcaccaaaaattacggtaatactctagtttgtccccccccccattttcaaaaaatataaaaatttaaaaaagtgatataaaacattttcctagggttttcggggtcgctgatcacgatccgacatccatttcgaccaatttcgaaccccggacccaattcgaacaaaaagtcgaaaaaatatttttcaccaaaagtcacat

SEQ ID NO: 27174 - DNA, 1003 bp, Heterodera glycines
ctatgagttttgctttgtgattgctttctgctaatagccaatcgctgattaaaacatttccacttgctgattctcgtttcatgccccccccccgtctttcaataaattttgcaatttgaaactgatgactaatgcgttgcatgccgactgattgtgtgcgttgcgacagagttgagcgcgatgaagtgaccccggcccgggcgacggacaagaaacagtcgatttagacgagaggacgaaaactgagcgtttggagaatgaataatggggtatttccatcattgtttaggctatcgccaagcacattctcccaccatcattattataattattattcctttttttaacatattttattgaattatgtccgacaatagaacaatgctcaagaacgaaaaaattttcattaatactaactcatgaaaaattaaagaaatactgccaacattaatttcacaaaattctcaatgtgtgattaaaatataatgatcagaaagtcatttattgaaacaaataacaatacaaaatatgtgaaatgaaatggttgaacataaattaaataaatccagggctggggtatttaatttcaacaatttttcccattaaaaatttctaaaaattcttaattatttcctccctgagattgatcaatctatgtatttcggcttcaaagctttcgaagtccctttgcctcaagcagcggtaatactccggtcgccacccctcatcaagcgtgaccggcgcgcatcgcatcccgcggcgcaaaatcaagttcataaacagccgggcgatcgcccattgccgtcaaaaaatgggtggattcggacctaagaagcaaatactatagagcgtctaaaaaaataaataattaacggtattccgaaattttccgggattaggactgggaatccagtaaaaatcccgtccatttttgtagtccagacagggggcgtttaatgactaattttgaaggggaattatttttacgaaagaaaaaatgcat

SEQ ID NO: 27175 - DNA, 697 bp, Heterodera glycines
ttgtcagaatcaatataagcatcgtcgtctccatccgagtcgaaatcgaggaaagtgtcaattgagtcagtaccattttcagataaggaaagggtaagatcttcgaggccccggattatttggaccgtttcagggttatttttatgtcgttggatggttgaatttaattcatcaataagggcgtccattggaataggaggaggaagaaaatggccaaagaaatcggccggagagcagtaggaacgggggggggggaggggacccctcgcatacctaatttgcattttttttggtgtttctcacaattgtttcggtaccattcttccttttttaatagcattgaagactccgatttattttttaccaaaaaaattatttttattcttatttaattcaaaaattgttcgagttcgggtcaggcgttcggcattgggaaaactaaacgtcaaattcgcgattaccggccccaaaaaccgcaaaaataatctaaatacgactttacagggatgaggatttgaacccatagcccaaaaccccatttttaaccaactgagcaaatcgtttcccttcctttcgctcggccgagaatgtgccccaaggccaagaaaatccaatttttgaggggcctgaaactttttgaccaggcactatgcaacgcttaaattaaaatattcatcgtaaaaatacaccccgctct

SEQ ID NO: 27176 - DNA, 973 bp, Heterodera glycines
  unsure (1)..(973): unsure at all n locations
agcaattactgcgcgacacgctagtttatatatatatagagaaaaagggggactcgtcttaaaaaacaaaatctcccggccgaaggccgggagcgccctgaaagtagtggaagggtcttacaactttttgaggcgcatctgggaaaaatacgggtttttctctccggtggccaactgagtcccggcggctaatttctcacttttgcttgcgtttgatggcccgtaactttttttctaaaactctgatcaaaaaatgcccgctgcgagggcaccccgccaaagtgtcctctacatgctggtattttttatttttttaatagagccaccccctggcctgcagaaaatggcaactgaagcgtgctcaaaaagtacacttcagtaccaggcgaataccgcgtcggcgtttgatctgagggaaaggtgcccagcagacttattgtagagttttggaagctcgattttctgaaatttaaaaatttcgaaaattttcaaaatttttcgagctaggcctaaaaaacggtttttgggtttttgaattttaagaatttttaacgaattttcccagaaaaacgaagaccacttccaaaacatagtttttcgagctctatcgactggtatttttttcggaaaattttcgattttttcccggaaatagaaaatttttttggcctgagcgggacatttgagtcccgggcccataactcgtcaggagttggttttagccaaaaatggccttagggcaaaattgtagagcttttgaagctctatcgaacggtgtacttcatgttcggaaattttcaaaaattttcgagctaggccccctagaaattttcgaaaattttttttggggtgaanatgggggtgaaaaatatttttctggggtattttgaggtgctgagcacgaatatgatgtttgtttttcctttcatgattttggaattttttaaaaattctttattttttggcatttttt

SEQ ID NO: 27177 - DNA, 931 bp, Heterodera glycines
attttttgaatttttgaaatatatgtatatcaaaatgtagacaaatggtaaatttgggtgcaatagagatattaatgtctataataaggatgcccttgtattcaagtacaaatttaaaccctgcattgaaaagggaaccaattctgtcttttggcgcccatttttgtcgacttacctatttttaaaaaattagttcaaaaactccctaaatgagttcttgtaagtatttttggaaaatatttagctctttttagaagataattaaaaaaaaattcgcttacgaaccgcgcaatgaaatgatcaccgacccattgtttgggtcgtacacaatgacacgtgtgccaatggcggccaacagttgggtgccgtccggcttgaaggccaacgaataaatgcatgaactgcttgggaaaatttaaatattttttacacactttatcaaaattattttaatgcatttttgattttaattactaaaaaaatgggtaaaaaaatattaatttccatctgctaaaccattcgctaacccagcagcggcctcttcctgatcttcaaaagaatgcttatcgctcctgcaattttccgaacattgaaaaattgaatataaatttaaactaaccactccaatttggtgaacatttttttaattttttgaaaattcaaaagaggaaaaatatattttttggatttattttataatttttgttggtttgctacttttccatgttgtcatgacaacggtggaggccaaccaacataagtaaaattttaatgattaagtgaaaattatttatatttaatataaaatttggcaaaaaaatatatatacatatacatataagaaacaatacagtaatcaaaaggtggaacaataaaattcgtccttaaaaataaacaccgaagaaatgaacaatgaaaataacaaaaaata

SEQ ID NO: 27178 - DNA, 1071 bp, Heterodera glycines
cagtgttcgcagttgataaatggcaaaaacgcggtaagccaagaaaagaagtacagtgacaacgaaggataatagttgaatttcgagacttaatccccccccagtctcgagtcgatcattttattggttttgagattgagccgtgttttgttatgcttttcggtttcatcactccattccctaaatgccaaggtgttgcccctccgcttcgctcttcccacaacttggcactttccctcttcttccgctcccattacgcgccttttctgctcaacaaattcgtccaatcgctcgtcctttttctcttcggcttttacctggtcagccagcttctcttccgtctcttaattttcttcttcattgtgctcatttatcagttgatctccgcttatggctgcttgaacattgaaattggtttggaaccgttggatttgttaccggacaattcgaatggaaaaaaggctttactcgaggcggagcagtactttccgggtttgtcctcagctaaatttatgcaattgaaacttcaatgtaaatatatagaattttttattgaaaaaattgaaaattgatattcagaccacggcggccacctgcacgtgtggatgcacaatttgtctcgcgttaatttgggccatcgtcggctttggctcgttctggagaaggaaatcggttggtgatcaaaattggcagcaatgtttgaatttgagtgatctgatcaattcagaattgtacgagcacaccgaattcacaggggcagccgactcgtggcaagtgaatgtgcaggaaattcgcagatttagcccccttttaaaggcttcacgtgtttctgcaattttatcacgccaaaggacagttcaccagcaacgaaaattttgtgccaaggctaaagaattttctgaaaatgaaaatgcacagaaagtaccgaaggtggggtcagtaatttcaaagttaaaatggtaaatttatttcaattttgttatcttttcaacagtgatcagcataaaaggaagctgatcagtggcatgggtgggctgtgatactaagggaccacccatctgatgcttttgc

SEQ ID NO: 27179 - DNA, 985 bp, Heterodera glycines
tttttaagaaaaaataataaagttttttgactatatcgcataaggcaaaaatcgaaaaaccccgacccatttggtcaaccccgaccccgaccttgctgatcccgacaaccccgacttttccaaccccgacggtcggggttgaaaccctagtccaactctccaaattgtgtttctcatatatcccctaccaagttgaaagccactgaaatttttttaggtggcccactaatttaccaagatgtgagataaattgaaattgaattaacttattaaattttgcagttcatccattcgtttgactctaagccgcgtctccgcttatggacgctttgttaaattttaactaccaaaaaatgaccaatttcaagccatcttccttcatttttgagacattactttttaaccaaatgcctaacaaaggaggggtcggcaagtgaccgtgggatttccaaatgaaatttggtgggtggatagatgacgcccaggttctattgtgaaattttgactatttttgccaaatgagcatgagtgccgagatatgacgtgccaaacttttttaatgaacaaacaaattaaataattatttgcaaccattcgcattgtcaaatggtgtagaggtaatgcgttagtaacagtcgcaccaggttcgaatccgctatatgcaatttttttttttttaaatttttatttttgctttttatgaaaagtcaattctcaaaagattagttttataaaaagactttatttttaattttactttttattttggtacatatgataataaaaaatatttttaattttactttcattttgatatgtacataagataataaaatatttaaaaaaaacgacaggatatttattgcacctttatgtttaatgtagtaatttttgatttctaaggaaaaaaaataaaaataaaaatatgtttttaattaaaaatttttagatagattatttttgtatggaaattaaaaaaaaaaat

SEQ ID NO: 27180 - DNA, 747 bp, Heterodera glycines
aaggaaggaaggaaggaaggaaggaaggaaggaaggaaggaaggaaggaaggaaggaaggaaggaaggaaggaattgcatgcagataatattgtgatggaatagcatttttatttagtagaaataaatgcagtaataattataaacaaatttattcaaatccaataaaacttgtgacaagtatttaaacacaagtattaatgaatttgaataaaaagtttttttggagttttttcgctccagtccaatccgggaccaaaaaccaaagcacctgtaaaaggaaaagaatcaacggactaaaaaagtgagttgtttacaaaaaaatatttgttgtggctcatcaataattttgtagttaaaccaccacctgaaaattaattagagcatttaatgagaccagcgaaacttatttaacttacaataaaattgtttgtgctctttccgtcatccaatcatttggtggcaaaataataatgcctaaagattgtttggaacctttaatgagatcagaaaaactttgttcttacgaacaaaaattcagtgcggcggctttcatctaatgtatggcaagaaattacgcctgaaatcaagaatgaaagattgcatgagaacgtaaggcttcagttgcttactaaatttgtgatggaacaacgcacaatctcacgagctcagaatatttcagggcattcctggaaagaaataaattaagcttgtgtgattatttaattgttttaataaataaatttat

SEQ ID NO: 27181 - DNA, 934 bp, Heterodera glycines
cagtccatcgacattcaaaaaggacaaagagacgagcggagattccaaaatcgcattgccacccccaaaattggccataatcgttgaggccaccgaaacattggacatcaccatcaccaaatcattcctccaacagcttacccaactctctgaagtatgttctttgtgtttttttatttctttttttctgtttaggcctttgaaaatgcatccaaacatatcagtactccgcggcgtgagttgcccggcacttcctcccatttgttgcgcaatgacactgggcttggcgtcaatgtgagcagcaccgaatcggtgaaggtaaattatggccaacaaaaccaggaataaaaatgcctaaaatagcgcttttgatgaattttattaattctaagtataattccatatttcagatcattgcctcctccccctccgatggtcgccaatttgagtgttgcgccggccaatacgtcccgatggaatgcgtcgcttcgtcggcggaatcgattcgcgagatcaactggcgcatgaaggaggaccagcgccaaattcagctccaattggcattttccgacccggacacggaacgaacagtgaacatcgctcggacggagaaacagtgcgtccatttgccaagagaggcggattcgggtacgaatttgtacaaaattggaatattcattccgctcaaatcattaatttttatttcattacaggtaaaaaatggacatttgtcgtggaaaccgtgaaggaagatgctcgtcatgttgttacgctgaagtcattggttacggttggtaaacaatcaaaatacaaaacaaatcatttgtgaaccattgtaaaatctgtcaaatgcttttaattctctaaaggtgctgaaccatttggaaatgccaatcgaagtccaagcattgcacgactcgaacagtttgccctg

SEQ ID NO: 27182 - DNA, 1781 bp, Heterodera glycines
taaatgcgcgatccgcgacaatttgaatgcgcggtgcgcggccgcggttgttttttttttttttgcgcgccccacccctggctgccagaagagaaaaaacttgcaacattttatcaaaaaattaaaaaaatgccaatccttgaaattattacaggtgatacccttggccgtccacagcaaaggacaatatacagtacaccttggcttgaactcgaccttgacatgttcgaccgaattggtgagtaggtgattgcctcagtcagagccagggggttggctggcgatttacaataatttacaaaagctggggatttcaaagtattgtttattttaaattttacaattcaaaaaaataaaaatatgcttacaacggaacaaccagaatgtaactgctcaaatcactttaaagccacttttatcgtgtagagaatagacaatttttagtgcaaattttcgttgtttttttttgttacggctccaaaagtgatcagaaaaaatgacaaaagtttcgaaaaaacgtaaattaaatatctgcggagcggatccgagctttacagcataagttttaaagtgatttgggcagtaacagttcaggtggtttcattgttagcagatttgttgcaaattaaaaattcctctgcgggtccgtagtctatcgcccgccacatttatttttgaattaaatcgcctcaaatttggattttttaccaaactttgcaccaataaatagcattaattggccatcatttaattgaaattagcttatctgttaacttaatttatagaacaaccagcaaaaatctccatctcccaaacatttgtgtattttgttctgtttttatcgatttcgatatatatttttggttttttaggccaattgctggtcggggcaaaaaatgcgcgactgatcactccggaaaaaatcagccaaattcccggggcacagtcccttttgaacaaaatttgtgttggcacttaccgatcggaggactttttgcgcgccaacggattcaattattacaatatcattgaccaatggcgcatcaaattgtgctcgggtggacgatttgaggtgggttcaaatcatttcgttttttttccatttatttttgataattcaaaaatgattttaaattacaccgtacccattaagcaaaatctttggtccatttccgtcccatttttgaatgttataaaaaaattcggcatgcttaaataaaggatgttaacgcagaaaaaatgccatcgccaaaacacaagaattcaacacactaattcaaaaaaacaccgcaaaaaatttaaataagtaaacaaaaattcggcacgatctctaaaagcctttaaatgccgagttttctagacaaaatggcatcatataaacagacaaaatttacatatctctcaattccatagaaaaggataaaagagatttactcccaacatgtggaagttgagccgcattttaaaggctaaaaaactttctttccaattcgaccggtaaaattttgagctaccgtttccctcccctcctccgctgtttacagtattcagcatcgcctcggataacaccttggacaacaccatggattacgcctcacacaactccctggacaacgcccaacaccaccaattcacccacgccaatcacaaacacacccataacattttcaccaattacaaacacaccaatttcaagttcaccgattacaaattcgccgtcatcaccccgacgaaacacaaacagcagcagcatcagtttgtcgccccaaaattcgcctcaa

SEQ ID NO: 27183 - DNA, 1906 bp, Heterodera glycines
ggtttcattcgcgtacagaaatgtttttagggcacaaaaataattcagaaatcggaatttgtaattttttgaagaaaaagttattttttgaaaaaaaaaatcatttttttaatctaaaatgccaaggtctgtgccaaaaactgtcaagcccctaaattatgcttttgtgagaaaaagtccaaaatatgttttttatgccttaaaaactcgctcttatgaaaaaacagataaaaaaagctattttgatcaattgtatccattgtaaattattcacagaaaaatcgtgaattgaccccgttaattgcagggcttcgatctcaaaattttgaaaatcctcatttctgccacaaaaaatcttcatttgccactaaaatacctcaaaaaatcctcatttggcatgaaaaatcctcatttttaaaagcataaaaaaatgcaaacaaaatcaattaagagtcatatttttcgttttaaacaatcacggcgcctacatatcagcgccaccggacccaaaaattcgatttctattgttttataaattgacaatctcttattttttttacttttaaattgctttttttgtggcgcggttttccaaaaaactttttggaaactttgggaggagggggtccgaaaataatttggattttgagtgcgatttcaatgaaaatcatcattatttttggcccgcttaattactccattaaattcttttttgtaagaatgaagaaattttcgtttcgatgacatttattttttattaaaaattatctaaaggaaattagttaaatttattgcaaaatgaggatttttcgaaaaaatgtttatgatttgaagaaaaagttcgaacattttgccaaatatacctaatttttcaaaaaatcattcgtttttgtcacttttttatcaaaagaccacaaaaatgcgcaaatcctcattttccaaaaaaatcctctttgaccctctaaaagaccacaaaatgagtaaaaatcctcagatatcgaagctctggcatatccgtaatccataaaaagcatttattttttatatttttcaaaatttctttgatgccgaataaacgtcgtcagaaaatttagaattaattcgaaaagaaaaaaagccaggaaatttggaataagtttgattcttattgctaaggaaacagtagaaattcgttttttttaatcttgcaagaaacccagccctggtcctgacacaacccaatttcaaacagttttcgattactgtttttagcgattttccataattttagtcgtgtcgtatcattaattttgattctttttcgaaacgatttcttgaagggttctggataaaaatttgtcgtgactttttggttattataccaaattttatgaaaattttcaaacaaaaaatgcggtgaaaagataagcgaaaatgccaaaaaagaagatatctaaagacaaataagggtcgttaatttcgttcatttctcatgaaataaatccattgaaaaataaataaaaacctaagaatccgattctaataaagagtataatgtgcctttgatttattttttattcccgcaaatattcgtttacttccacttttgcataaattaattgagggataatagcaccaatgcttgcaagaaatcgtttcaaaaaataaaccaaaatttatttaaatgctctcttttaaatcttttaatcctgaaaaatatataattttcttgactttgtctcatatttttgacctgggttaaagcttttcggataaacatattttcatgatttttttttctttaggctttttcaacacttttatcattttcgttttgcgattttggtaaatccttattaaaaaaagaaaaagacacccctaaatatcaccttcccaattatcaaaatacttcacaaaactagctttt

SEQ ID NO: 27184 - DNA, 991 bp, Heterodera glycines
ctttctttctcctttttttgcttttgcattgtgccaatccctttataagtgaagcatttgaatgctttgcctttgaaaagggcagtgactgcggcatttgttcttttctgctgccgtcgagaagcatttccctggtgtgggcgataagtcgggagcggagaagggtttgtttccagcacagatcggacgactgaggctgttatttggcactgattgtcctctgactctctttctctcggctcatttgtctcccctctctttccttccctccccgtcattctttctcccactcttttcatttcctctcttcctttatttctctctcactctcttccttttctcttaacttctttccttttttcccttccatccccgtctttctctctctctctctttctctctctttctctctcttccttttaccttaacttttccctcaattttttctcttccctccctatctttctttctctctcttttagatccttctcttcctttatttctctctcactctcttccttttccctttaattttccctccctttttctcttcactttctcacctcagtcactttgccctccaacatttttcgaccatctctcagatagcacagcatttttcgagcggattttgagttgttccgctgctgttcaaagcgttcacaaattgacgaggacggcgcattgtcccaaacgaaatgcggacgagcggagaaaacgtcgacgccgaacagaggcgaaccgggcggaatattgcaaaggccgatcatttgaaattgataatttgttgatggacaattaaaagaatttaacgctaatgaatgccttttgcgaattgtgtgttttaaatgcttttcatgtgcgtgagattagtaacagtgacataagtcgagcaatgaatgctgctctcatttgagtggcaccagcagcacaggtgctttttgtctccttttttgtttttgtacgcctcccctcccccctcttcccctcc

SEQ ID NO: 27185 - DNA, 1830 bp, Heterodera glycines
  unsure (1)..(1830): unsure at all n locations
catccaaaatcctggtcaccccctatggtccggatcccaaaatcactttatttttgtaccattcgtaagaaagtgataaaatgccaaataaaatttatataatagcgcaaaaaattgcggatttttgtagtattttattttccagaatgcttttcaganccgaggtataaatttttttttgaaaatttgaaaatttccagaatttctggaattacttttttttaaatcatgatagaaaatccaattaaatcccataaaattctccttatttttctctatttttattgctttattgtattaaaatcgtccaacatagaagtgagttacgaattttcaaattttaacccaaatttccaagggccaaaaaatttcctaaaaataaagaatttttaaaaaatttaaaaaattatgaaacttaatacaaacatcataatcgtgatcagcaccataatttacccaagaaaaataattttcactccccttttcgaccttaaaaaattttttgaaaatttctagggggcctagctcgaaaatttctgaaaatttccgaacatacagcacaccgttcgatagagtttcaaaagctctacaattttgttctaaggcattttttggctaaaaccgaaccttaaagagttacgggcccgggactcaaatgtcccgcttaggccaaaaaatttttctatttccgggaaaaaatcgaaatttttctaaaaatcccaccaatcgatagggctcgaaaaacgatgttttgaatgtgttctccgtttccctcggaaaaatctgtaaaaaatcataaaattcaaaaaccaaaaaaccgaattttaggcctaactcgaaaatttctgaaaattttctaaattttaaaatttcaaaaaatcgagctttttgaactctacaataagtctgctggcaaccctccgctcagatcaaacgctgatgcagtattggcctggtactgaagtgtacatttctgacctcaaaaagttgtagaaacgtacagaccagggggttagaggtaggggttaggggttgctggcaataatgtcaggcatagtccaacttagtttcctacctgcaagcgtttttcgatctgagctaaaggaaaaattttcgtaacactgagactgccagcaaagtcagttttagcgccggtgggactcagttggacttcggaccaaaaaacctatagttttcccggatgcgccgtctcgagctaccccttggtgcagggtgtcaatgcggtgtacttagtgggtataagaatttattcaagcattcagcatagggctattaaatgtagggattaggttctattgggaacgtttgcggggatagttagaggttagtgcatcacagcaagattgaagtgatgccggtgctaagaaaaaatattgtagaagaaaacactgcaagggataacgcgtaataagtcatagggtttcagtagttcactctaaatattattctatggtagcattggatagtcctcatagagttgtatcagcaatacgatctcttctcaggatttcttacttaagatagaaagagttattgtctcataaattgcaaaaaatcttaagtcagcattttttgttctgatattgggtgagcgtcaatgagattttttaaaagtgtaaatataaatagagaattggtagggctattgaatatataaattacttttggttcagtttcatttgaaagactgtaaaattttaaatgtttattattatatatccgttattcgtagcaaatacacatagcgcatgttcaaagtgcgtttataaattgtttgatagaggagttacaaagattggaagaggatct

SEQ ID NO: 27186 - DNA, 992 bp, Heterodera glycines
  unsure (1)..(992): unsure at all n locations
ttgttctcctttccaatgttaatgagtggtccttgccatggtcatgctgttctcctgaatcggcgaaatgtacccgcccttctccacaagtttgaccacctccattatgttcttcgtttccacaatgttttccccaatcgccgctctcagtgacatttcgtacgaactgttggccatgagaatttcttcgaaatacctacaacggtcagtcagccaattcattgtttatcaattacctttttactcttgctaattttcctcatttttccctttgtcattcactaattgcggtttcaacccaaaaacacaccacacaaaacgtcaccaccccaaaagtttaccaatccaaaacgaacgtcaccaattccaaatgtaacaaacagcccagcagaacgtcgtttggtgggatgagttttaaaatatattttttttaatattcgtgaagacatgtttcctatggttttcggggtcaatgaacacgaatcggcaccccgcttttttgcgaattctgtccatatttctggctaattaattttaatcttaaaaatggtatttcttacaattagttagatttattgtttttttaattttgtgacgtttttgattgatgaaattttgagtttgtggcattttggctggggaatggtgacgtttgagttggtggcattttggctggtgaccttttggaatggtgacgtttgagttggtggcattttggctggtgaccttttgggtaggacccgccgattttctcgtccattgattaccaactgtgcttgtaattcgtcacgaattggtactgtttacgtgccaccaatttgatcatttcaccggcatttgtgaagggattattgngcgccggctgaagaagtgaggagagaagcagagtttggtacatatccatcagaagacggcactgcataattgtgaaacacagcagagagaaattgcctaattggggaaaaagcgatcagataaagtaaaaatgatca

SEQ ID NO: 27187 - DNA, 1180 bp, Heterodera glycines
  unsure (1)..(1180): unsure at all n locations
aaaagataaattgggaaatgataacacgctcgccacctcttactcgccaaagagcgcttaacctgcgtatgttcggaaatgtcgaaaatcggccggtcgctgctgcaacgcaaaaaaatcaagaagaaaacagagacaatacgaattctgctaataacctgatctccccaaacataactcataatttggaggaacataaccaaaataaaagtcattttagtgaagacgaaattatgggcgacgacgaaattcgaaacgcattactgcgtgtgtcgatcgagccaagtcatgcacgccaacaaaatgtgctcggtaccgaacagcagcaaaaaggcaatgtcgcatgtattgcggaatttcgaaatattgggatagtcatcaacagaaataacgagagagggcgtgaccccggcaatttgggacccaaaatgtcgcagtgaaccgacaagttgcgcaatttgattcgatggtggttttagcacaaaatattcctcataataacctccgcacgtcgacaccattacctgataatggtcttcctacaatatccagcgttcttcagtcggtgtttttgaccaatacaatatgggtaaccgacagttacaccaaaatcaccacttaagtcaccaccctttggctccatttgtaccaattgaacagaataacgcacgcattagaaacgtagaagaaagagtgcaaaatcggcacgcgattccaattcaacagttacgtcaacagattccagtaaacgcagaatcttactggaaaagagggaatggataaagttcgaaaatttttaaaaagtttgatgtatacaccgaaggatggcccgaaaaaacccgtatttcggcacttcaaagcaaagtatatgaaaaagctgagagagccttagaagctgctttgtcaacacaaccatttcgttatgaatgcattagaagagaaatgcttcaacaaatggaagaaacagattcgagaaatctgaatgcgttcgacgaattgatgatgggagtatgcagaaagcccaacgaagggatcgatgacttagccaacagaatttcaacattagtcagaagtgcatacccgggattgaccagtaatttgtctgatgaatacttaattaaatttctcattcgtgcaatggataatcccngagctagccttgaattggagctggttagaa

SEQ ID NO: 27188 - DNA, 1480 bp, Heterodera glycines
ggagggtaattagagaccaacagagcaattaatggagggaatttcaaattgtattttagtcccgcttatcattcggcacttgccgacggcgtcaaaggctacccgggcataaaggcgcggatgaatccccgcacttttcaatacctttcggacattgccctcggagttctcagttagttaactaaaaattgtcaaaaataattttatatttgcaatttcagactaccaaataaagcgagctcgtctccccaacataaatcagtgccttccgcaggtaaaaaagataattttaatttaatcaatggcaattccaactttggcttaatgttcaatatttccaatgcttcatctccccctcccttcagttgaacggttgtgtccaggtgtacaatttgtatgtgtcccgctaccgatgcccccaaagtgagcatttcgccacgattgttttggtcaatgcctttctttcctcccccatccctttgtaaggggtcaccgtttacccggctcccccgaatctcattgtgttggatgtgcaaaatttggacattgggtgagttggggttcctctggcactattttcctcgactgagttcatccgtgcctcgcccccccccccttaagagtcacgggaaatctcggcgggcaaattgtcattttgttgccgttggcattgtttggcattatccaagtgaacgcgtatcaggtgaatggtttagctaatgcttcatttaacagtccgtttttaatgtgttaactaacagctgaatattcgcgtcggcatttacctcgtccgtggtcccaccggatgtccgcagattcgcgtggccagctgtcagtttgggagctattttatcattttaaaaatattttaacaaaattttccatttgggtaaggtgccgccagtgttggttatgtcgatgtttacattcaaaacggcggtcttttgggtgacattgccaacagtcaatttcgagtgaatttgtttcttttttttttgctcattttacccatttaaatttcaaagggtaaaatcagcgaaatggtccgccaacaaattccgggacaggtgccatttgccattattattgccaattaattagtgataacatgataatttttgcagatttgccaacgtttaccgtccatgttggatgaacaggcgaaccccaaactttgctcaaagatccctcagtttatccctgtccggaaaatgctcgaagtggcgatcagtgccaccgggttgggcaatatgttgggtgggacggcacaggtccgaccgatcggcgtttgaaaccctgaaaatgtttttttgcctttagtgtcctgcttcttgcaatttcgtcaaaagaaaagtggtcgcccaggcggcgccaaaagtgaacgcaactttggcattgcctccggcattaaatggcaaaaacgaaaagacaaagttggacagcatagcacagacaacgccagtgaatactaccagtgctc

SEQ ID NO: 27189 - DNA, 992 bp, Heterodera glycines
gtccaaaaaccccgcaatttccgtaatttccgtaatccgcaatccgcaattaaaaaaaaaattttttttaataattttacattttattttaaaaaatcctataaatcttttaaagcaatttaaaagcatattaaaaagcaaatttataaaagcaaaatcattcaattgaaaatccggttagaagcaagttatggtgaatttaagtttgacatttttaaattgctaaagaaataagaatttaaacaaatgtaaaaatttttttgttttcaaaagtcatgaaaacatgcttccaatgcttttcagggtcgctgctcacgaaccaggcatccatttcgaccaattcggaacccggagccgaaattcgaacaaaaaatcgaaaataaaaaatttcaaaattctctttttgtttctaaaatagattaaaacaaccaaaacgttttggcgccgacgttttgacgccatgtaggggggtagaaatgatgaaatcgttataatttttctgacgaagtctatcaaagagccggatttaattcttcatttactctttttcgctttgctcacaattaccacataaacccaaattttcatattattttagaatttctccgtggaatttcgcgcaattatcatatgaacccataaattgtttccatttcttcattttgttaaatttattatatttaacgaaaaatttcattttttataatttttacaatttcttcctgccttttttttcatttttggcttggcgccaaaacgtcggcgccaaaacgacccctggcgccaaaacggcggtgccaaaacgacctggtcccaaaaaattcattttataagaaataatcttacaagaaatcgtctcgaaaaataatccaatagtcaaattacggatcaaaattgcggataaatcccaaaaatccgcaacccgcaatccgcaattacgggggtccgaaaagcccgcaatttccgcaatccgcaattgcgtccagccctgg

SEQ ID NO: 27190 - DNA, 715 bp, Heterodera glycines
accatttcggggggcggggggtcgtcagcgaaagggcaaaagaggaaaaattattgaaattttgaagagattttcttaacaaaaatttttcatgtcggcgcctattggcgcagccgtcccataaaatgccccttacgatttgaaaagttgacctaaaatttgccatgcaaaaattggcctttttggtgaaaaggcaccgccgaactcccccgcgacaatacccggacggataccgcgtcattaaattcgggatcccgacctcgggacccgttcatttttccaaaaacccggattgggaaaaactctttgttcggcttcgaaacttcagttttttaggattcgaacttcgcctttgagcaattattaggcttcgctcggcttcgagtgttaagccgagctccgcccagcctagtaacagatccctcacacttataaaattgccacaacaatttaagatgaatgccatcaatctctgctgttttggctacgatatcgagtggaagtattaaaatggtcaaagccgagtgtttttaccaccctggcatcaatcgttgagacatttgcggtccggacatttgcggcctgctgaaaatcggacatttgcggcacgataaatgcggttggacatttgcgcatcggacatttacggtccatttctcaagggccattttcggacatttgcggcccgacattgcgccttgctggaaatcggact

SEQ ID NO: 27191 - DNA, 895 bp, Heterodera glycines
aaaatttatctcaaaaagaggagccacttttctcccctaatcttgaaatttaaaaattctcggaacaataaaatggccattgctctccgcccctctgctcatgctgcagagcatttgttcgatgcaaaatttctctcaaaaaagaggagccacttttctggcctaatcttgaaatttaaaaattctcggaacaataaaatggccattgctctccgcccctctactcatgctgcagagcatttgttcgatgcaaaatttctctcaaaaaagaggagccacttttctggcctaatcttgaaatttaaaaattctcggaacaataaaatggccattgctctccgcccctctactcatgctgcagagcatttgttcgataaaaatttctctcaaaaaagaggagccacttttctggcctaatcttgaaatttaaaaattctcggaacaataaaatggccattgctctccgcccctctgctcatgctgcagagcatttgttcgatgcaaaatttctctcaaaaaagaggagccacttttctggcctaatcgtgaaatttaaaaattctcggaacaataaaatggccattgctctccgcccctctactcatgctgcagagcatttgttcgataaaaatttctctcaaaaaagaggagccacttttctggcctaatcttgaaatttaaaaattctcggaacaataaaatggccattgctctccgcccctctactcatgctgcagagcatttgttcgataaaaatttctctcaaaaaagaggagccacttttctggcctaatcttgaaatttaaaaattctcggaacaataaaatggccattgctctccgcccctctgctcatgctgcagaatatttgttccatgaaaaatttctctcaaaaa

SEQ ID NO: 27192 - DNA, 1254 bp, Heterodera glycines
aaaaataaataaaaccaataaaacaaaaattaaattacctgtaatgtaaataaaatctaaattttaattgtttgaatattaaaatattatattttgcgctataattttataatgcttccttttagattgttttttttcaaaaatatttataaattttataatattgcacagagtcttggcttcggatcattattaaaaggtcatggagtaaaaattatacataaatttttaagataatgaatcaaatcaaattttttttttttctagcggcgcttttggcaccgacaaactcttttttttaaagcttggaggagctcggggttttgttaggaagcaaaatcgcacaaggttatcatgagatgaataattaattaattacaccgtaacaatccataaacaaaaaacaatttaatataagaaataataaatacaattatttaattaatcaaaaattgaaaaagcacaaaacaccgctgattttaattaaagttattaattagcgcatatttaataaattgaaaaaacaataataacaaaataaacatagaaatactaatctaaaaatttaaaaaaaaaacatttttatgcgataaggaaagtgatttaaatttttatatttactgtaaaaattaatattaaatataatttaatttaacaaagaaaaaataaacagaaaaatagaaaattactcaatacttattcaatgaaataaaccacatagataaagccttcaaatgaaatttgacacatattttgtcaattaaataataatattaataataatagaaggatttcaaaattattaataaaaaataaaaggctagaatgattattatagaaaaatataattaattttttcaaaattgaaaacgtaaatgaaaattattagaactattattaatttcaaaacatagtttgattgaaaggaataaaaatgaatttaaataatattcaaaagagcaattaatataaaatatataaatgctaattaataaattatttgattattatttatctctttttcaaaaatttaatttaatattcatcactccaaacagtgagtggagtcagtgaccgtgttgggtggaaggacaaaaagtgcaaatttggcgaaggacaaaaagtgcaaaatttgcgaagtttttgactaaatccactcataacttttctcaggcaaccaaattgcacaatcttggtatcttacgatagccctaagagttctctattagcctgccaaatttcaaaaaattttat

SEQ ID NO: 27193 - DNA, 980 bp, Heterodera glycines
ttcaagatgtcgcagtcgaactgcaaattctcattctttctaaaatttaagataaagaatttggtatttttctcactttatacctgaacgaattctcattaaaactagtcagttgaaccgttgttgccaccgagcctcccttttgatgttccttgccagatgctgtggaaaattctttgcaaatgaattcgatggattgtccgctggggtcgatgatcaacgggaaacggttgaactgcctgagcataatggcattctccgtgcataattcgtccttcggcattccattattgttccattgtaagcgctcgtccgcagttgacagatactcaatgcgagcaagctcatgacggaacataatttgtgaagaatcacatattcccatccatttttgaaaattgtgtcgcgcagcagttgatcatagtagccagagtaagaaagaaaggcggcagaaagaagaacatcgcccaccaatgtctcattttgctgagcaaatcgttctctgccggcctcccaacgatcgcattccacccgcaaagatttcaacagatggatgctcctgttgactttttcctgcacaacttgcaggtcctgtttgatgtgttccgcttctccgatgagttgtgcgtattcatcctgcaattaagaaaatattttgtacctgtaattcagttggcagttaccttcagttcctgaattcggttctcgagcgcttctattttgtgcttcaattcttcgcctttcactgttttttcttccgcatctttctccagacgcttcaattcattgttcaacggttcgattttgttcagcatttttgcgtaggaaagttgagcccttgcccatttaaccattggtccacaagcgacagatgcccgattgaccttgaattgttggatttcttattttattaatatttgtaataacggaccttctcaattcccagtcagggttgccttcatctgcttatttttctccgt

SEQ ID NO: 27194 - DNA, 1353 bp, Heterodera glycines
  unsure (1)..(1353): unsure at all n locations
gacagatagatgatgattgcttaaagcatatgattatttaaaataaataatangataaaattaaaaaaagcatttttaaggtctctgatgtggatgattggaattcgttctgtacggcatgacaaactccttttactatacaaccgaagaattgttcatcaatttttggtgattttttttttaatataatttttgtgacatttcaataattgaaaatatatatttttttattaaatattaaagtttaacaaatttaggtggacacctgagcgtggccaattgtcttggtcaccagacccgcgtaccacggagacaccactccatgatttacgtggacgcatttggaccgatcgtaaattggaattggagccagaaaaatggtcaaatattttcgcaaattggcaattaaattgaattttttgaatattttttaatttaaatttaaaatcttcttaatcctttaaatcatcataatcttccagggaaattgtcaacattttaaaatttctgtcatttaaaccccttattttttggacttatttataaatttgcatgtccatgcttaaatttcaaattttcataagttacatattccagggaatattcaaattttgaaagtttctttcatttaaatcttaattttttattatttttttttatttaataattttttcaagtccatgttttaatttaatttctttaattacttttctaatttacaaaaaatacatcttaatttttttttgtctttttaggtaccctttcccctattactaccgtccctttcggccctaccgtatcacccgcgatttgaccataatgcccggtgccacactgaccattgagaagaatgtggaagtgcatgtgtggccaaatgtgcgcattttggtgtacggaaatttaattgccgatggcacactttggcaggtgccgtggagtggaaatgaataaaattaaatgaaaaatatttttaaattaaattaaaagagaaatatatatagatttaaaaaaaaaattaatttatttaaaataaaaattggtgattttcattttttaatttaatttttcataaaaaaaattgaaaacctaatcaaaattattggtaaatttaaatatgtaaaagaaatttttacaatttaaaaataacacgaataatttcacaaatttttctaaatttacgaggaattttttttcagacaatgaaaaatgaaaattacctaaatagtgtgttagaaaaaataataaaaaatnnatttttcatatataaacattattagatattcagcttccaaaaaaatctaaaaaatcatttttatatattttttttttctgaaaaataacccaatttttttg

SEQ ID NO: 27195 - DNA, 1476 bp, Heterodera glycines
  unsure (1)..(1476): unsure at all n locations
aaataaaataaacaaacattaagtctcaaatgagttttccctcactagtgaagattaattttaataaataaaatttattaaatggattatatattagtcagaatattatattaaaatttttaaaatgtgaaagaatttttcgaaaattgctttttttatgcacaatgcttcaccttttctcacngatacaatttgcggatgcaagcncagcaaatgagacagacaaaaatagtagtaaattaatataaaatgtgaaaaaaataaattaaaactaattaattatgaaatttaaaaatgaaatttccattgcctgaagaacaatccatcgctgttgtggacctcaacttggaaactttaattgatgatgccatccactgggctcatatcaatggaatggtcacaagaacgaaggaaaaccgactcaagtataattaaataatctaatataaaatgaaacaatttagtttttctcgaatttttattgttcgagtcggtacttttcggtttcggggcctagaatttgatttaaaaaagcaacggtacttttcggttttgttcctacacctcaaaatttaaaattaaatattaaaaatttcataaaatttttttattaagattaaatgtattaattaataaatttggtactttgcagttttgttcttacatctgaaaattttaaaaagccaaaaagggcgtgtggaaagccatttttagctcacgccgctattttggaggcattgacaaaaaatttcaccaaaatattaagccatttaatgatgctgcatcaatttaattttgcttttttggaatgaggatataaaattgagtgccgttttcagtccaaaaataggataaatagaaaaatgaaaccgattttatgcgtgtcttttgttgctgttgttgttttatgcattttgaggtgtaggaacaaaaccgaaaagtaccaaaaacaacaaaagacgggcagaattgcaaaaatattaaattaacgaaagggcatttgcttcccacttcactattctaattgaaaataaactctgtaatttggcattttgatttcatttttttctttttgctttagtcctgacattgccgcttttaagccattttcactgttcctaacgccttttccacgcgtaatttttgaacaagcgcagccagttcatacggtaggaactgaaattagcaagtattttaaaggtggagatttctataattacttttctatgtatcattttgccggggatgcaaaattgaaacattaattagaaaagtaaaagacaataaactcactaattacaaaattggctacccactttttctcaatttaaaatttttctaatgtttgaatattttccacgttttctttccaatttaattttattttatttatttttcaaaatttatattaatttttttaagtaaatttttgggttatattgaaaacaaaaatatttttgtcccaattttgttgtt

SEQ ID NO: 27196 - DNA, 1023 bp, Heterodera glycines
cttttcctgctccaccacctcctcctgcgcaatttgaacatggagaggcaactcgagttgaaaaaatgagggcacagctacgcgaacttgctgagaaaatgacggacaaagatcctaaggtgggaattcggcttcaataattgtctttttattatgccatttagcgtctgtcaccgagtggacccgacccacatcatcattagggccatggatggatctaacggaggaagaaagaatggatgcttagttttcagcttttattctatcctcttttatttattagtttttcaaaacaaatttcttccacaactttttaaactatttgttgttttgaatctttttagataaatctaaacccctaaataaattataattttattataaaataatgagggaaaaatattaaattttgcaattaattctaatgcaatgatttatgaaaatattttttatttatcttatggtattcgagagtctcagtgtcatctctcggtcttgagattcgcgaatttccgataccgaaaagcacttaataaattgaaacttaatgagcacttaataaattgaaacttcatgagaaatttcataaaacaattatgggtactgaagattgaaactccatttttggaaaaagttttaaagaaacaattttcatttgcttctcattcaatacaaaaagtaacttacctaacaaccaccaaagaaaacaacttgtttttcgtgcgttttaggtcactgggaaatcaggaaaaatgagctaaaacctaaaagccggagcaaatgaaaaaatgtatgagtgatcagtaagacatccaaaaatatggaaatccattttttcctgtaccatatttccatatttgtccatacctattttggttttaagtccgtgttttatgtccatattttggcatgtctccaaaaaaccctattagaacggcccccatcacctaaattgtccgttttgacatcaacgaccggaaaattttccaaaaaatggaaaattttgtttttggtcggttttct

SEQ ID NO: 27197 - DNA, 1363 bp, Heterodera glycines
  unsure (1)..(1363): unsure at all n locations
gcaatgatgccaccatcgacctcagcggcaacgacggccagcctaaacggcgccgatattgtgaatggggccaccgggtttggcatcggcacagcgttcggcacatcggcatttatgccatcggcagcagagctgacattggcacaacacctaagcggcgtggcaacgggagacgctgggcttggcactcagtttggtgagcattaaaattgccttcggagacctttggctgggttaaaatgccggaaatggttctttatacggtaggagtgagtgcacattactgtaaaatcctgtaatggccaagtttgcttaagaatgtttctaatttcaatcgctttttgtcaggttacgtcgcccccgcgccctttcattacgccgcgttaggctgccccgcggcgccgtccgcgctcggcatggacccgtccgcttttgcgcactttccgcccgcttattttcccggcaccgccccgtccgaccattcgctgggcaccaaattggacccgtccatggcctacgccccttacgacggttatgcggcggctgccgcgttcgccggcggtggcggcgcgtattcgcacttttacggaggccaattcaccagccaatgacaacaaaacgaagcggaaaaaacgacgacaaagagggaaaaatgagcgaaaagggaaaagcgacgaacgattcgacggagagaccaccgaacttcggcggactgatcaacttctgctcctgcacctctgttggccaaactgtgttcactcactctttcccctccccacctcacaattttactttttgtgccgcccgcgggtctccggcaatccctcccaatggcaggccaaaatgtctccccctgttgatcagagtaggtaggaatttcgagcccaaaaatgtttcgaatttccataatttttccagggtcgaaatcgcttttcataatttcactgttctcccagcaaattaatgtccacaaatgccgatgagtttcgttttggcctgccttccctccctttcccctccccatttgtccattttcatcccttcttcttcttctatctcacaaaccacagaattctgctcctaatgctaacgtgattttttgattgtttttctttttttcattttccttttgtccgatcaaaacatttaaatcacaaaaatataatctaattgagaatagaaacaagcaaataaagaacatttctgtgaagtaaatgcgtaaagactgctaattcttatacacaacatgctaatttaattaattggtcggattattaattattaatggcttaattcgagtgatcgtttgttggccanagtgattggtccgtctgtctgatcagtccttctgatcactcctcta

SEQ ID NO: 27198 - DNA, 921 bp, Heterodera glycines
tgaaaaatttcttgtatgttttcttataaacagtttaaatttttctaactttctgacacaggcgccggcacggccctagtcctagtaatagtatatttgttcatcagtttggatgcaatttttgaataaaatttgttaaaagtaaaatattttaagaaagggataaatttttatctttttttagcgaggccaacataatgaaacagtgttcacacaacaaccttgtccgcttgtttgccgtttgcactaacgaggaaccgttcctgatcatcacggagttcatgccgaacggaagtctgcaaagttatttgcgcgcacaagagacggacgagaagggcgtgaacattggtcgacccaaaaatttgctcagcatgcaagcgatgatcgacatttgtgcgcaggttattccgacaagaaaaattaaaaaatatcttcggtcgtttcataaaaaccaaaaaaaaactcttgttcagtttgtgcgtacaatagacttatttttagttggccaaagcctacatttttgtcataaatggaaagcttaaagtctcagaaatttataaatgcaagaacatagcaaataatggtattaagaaaaaattacattgaccaaatcaaaccatggaacttgaatttttcttttaagcttttttttattaaattttattttgttaggcatttcaagtttgttaagctgaccaactcaattcatttcaacaactctaccatagattatttttttatgacgattgggaaaggattaattgttcattaaaattggatgaccaaaccctttgattgatacaatacattaatttttcaaaagattttttttcaggttgctaacggaatgaaatacttggaggagcgtaaattggttcatcgcgatttggccgctcgtaatgttttggtgggcgacaaaat

SEQ ID NO: 27199 - DNA, 990 bp, Heterodera glycines
aatttgattcaattcgaccactgcgaccaattgacacggacaaccattgcgccggacaatcgggaaacattggacaaattgacgccgacaattggacaaagacaaatcgcgcaaatcggacattggacgcgcagaccaaattgcaaattggacgcattggcaaatcggaaattggacgcacagaccaaattgcaaattggacgcattggcaaattggaaattggacgcgcagaccaaattacaaattggacgcactgacaattgagaattggacgaactgacaattgcgaattggacgcattggcaaattggaaattggacgcacagaccaaattgcaaattggacgcattggcaaattggaaattggacgcgcagaccaaattacaaattggacgcactgacaattgggaattggacgaactgacaattgcgaattggacgcactgacaattgggaattggacgagcggaacaaatcgcgaaacttttattccatcacccgacggaaggtgctacaaaaatatcccagtcaatgtatcgattggggaattaacatgggcattaggattcttagatccattgcataaggtaatcgaagaagcttcagagttcgtctcatgcgaacaaaatcagttcctgacaattgaattggaaggagaagtacgagaagtaaaccaattaacaggaacatgggagataattaagaatatagagcatttagagatctctgataattttggaaaaatcaagaggcctgaatttccaattcaaacgttccaacaattaattttgggtaatgtgagtaatgcccaaatagaaatcttacaaaccattcggtctctcaggaccagcagattaatggagagcgtagtccaaaatcccaaaaaccgttacatggaaaataattggattacaaatttaaatattctcggagccatagactgggaaaaaaccgtaataagattagtcatactgtgcacaatcctctta

SEQ ID NO: 27200 - DNA, 654 bp, Heterodera glycines
cggatccacgtagtggggcgagacggaggtcgaagtgtgcggcggttttttagcgcaatactggatattcaaggctaaacgattttctgcattatataagaagaaaactttttttcgtactgaagtgtccattttcactgggactcagttgacccagtgcctagatggcatcggtttgaatttgtactttgttttttagtcttagctgatccagagcttgggattgatacttaatttgtctgaatttgtctgttttaaagggtcaggggctccctttttctgtcaatttttcaagttttaagccggttcaaaagccggttttttggcatttccgcaactgtagatcctttattagcctgcaaaatttcaaaaagttgcttttctaaacatttttggccatgtcccgacttgctctggggtcgggccaaatgaattcacggtgcggggttcaggggcaggcagggacgagacacggaattaataaaaaatttattccgggaaatgacctcaaacttgggtaattaaacaaaaattttgaaatggtgaacaaaatatcacaaaattgatcacagataaaatgccatcaccgggggattaatcacaaatgaattggaaaggcgggatgggacaggaaaattttcagaaaggaagcat

SEQ ID NO: 27201 - DNA, 1915 bp, Heterodera glycines
gaatgaccttcattttccattaatttcgcgttgaaattggtctttttgcctcgtcaaaattttatggcgcataaatttggggcggacaatgttccataaaaatggaccaccatcatttggtcattccgagctagtttcaaattttgtttaagaaaatgcagtacattttttaataaataagttttaaaatccatgaatttttgactaatattaaattttctcaattttttgggaatttttaagcaaattctttaaattatttagcctttaataaggagcactctttagaaataagcaactatttgtatgactaataggcattccattagaactttaataaatgatttatcttattcatttttgccaaatttataaaaaggcttactaattaaacttttaagaatttattatttttttaaatgtttatttttccttttttaaaaaattaaaattaaataaatcctttaatttctaaaaattaaattgttatattttcaattataaataaattatttaaaatcatttgatgaaataaattctatcgccgttttgttttcccatggctatcaatttataaaattgtcgccgcctcagtcaaagccggtttaaaataaatgaatcctttctttccgcatatccgtaattaattgtttttaaattaaagcaaccatagcaaccatattagtttttgtgaatgttttattaaatggaaattatataataattatcgccaaatgatgaaaatcaaatttttcttttttaattaagaaaatcgcataaataaataagactataaataattctatatttatatttttttaatataatatatcaaacatagatataaatttattttcataaattttataattctatggtttattaaacagaaataaatattactttaaaaatacaacgaaattcaatttcttttttttaattattaagaaaaaaatataaataattaattataatatttttaattataaatatattttattaaataaattatataaataaataagactataaataattatatattaatattttttgtaagatataaatattacattttcataattttttatattatatttaacatatataaatattattttaaaaatgcaaatatttaaatataaataatattaataaaataaactaaataattcaattattaattaattttgattattattgttacaatatgtacaagatttgtgcgtacaaattattaatgtgtatgtttatttgttctctctccattcttgaagagtcgtcgattcttatcgttttgtcgtccattcaaatcgtcgccaattttatgagtttgattgagcgtctgttattcacaccaccacacaaatccatttggaaaataatttaaaaacaaatttttaacatttaatttaatttaaaataatttttgttttaatttttaaattttaatagaaatttgaatttttaacttttaatgaactttcccttttcatatcataaaaaattcttttaaatttttttatttttgctcttatttaattattaattaattttaattccgtttttaatgtttgttctttttcaagcattttcgtaaatatgtctattgaatcattttcatctgattttcaacaacagaagaaggtggtggaccaaaatgtgccaaaattggaacgaccattaaaggcattgttaatttttaaaactaattaaatttaaaataatattataattatagtttcagcatattgttaatttttgattaatccaaatgaattaaaatttaaaaaaatattaataatcaaaaattttagcatattctatcgcatgaatttggcaaagggtcgctgtgcaatcggtgtgattgtcccgggttcggacatgcacttttggcggttggaaaaacaatttt

SEQ ID NO: 27202 - DNA, 1935 bp, Heterodera glycines
  unsure (1)..(1935): unsure at all n locations
ttttatgtgtaatgctacctaaaaagtgttaacaaaaaattttatttgcctatttgagggtttttgtgcctatttgcgatttttttctgcctttttaggtgcctatttcgcgattttttgtgcctaaaaatggagtccataatcattaattatcggttttgtgaaattttaacaaggttaattttaaaatgatcgggaatttcagttcccaatgagtcatttttaattctttcactttttttcctgctgctgtcatcttttaccgtaccaaaactgtccccattaccgtataactaccggttcccttttcacagacccttctcggctttgccatcggcacccgacgtgccgcctcgttgctcgactgtttggagctgtgcctggcacacaacaatttcaacagtaatcaccaccaccatcgccaatcgccggcaccgtcctcctcgtcaagttcaagcagtacaacatcaatgacgataatttggtgccgttccgtcgttttcttttacgaggaaagtgccatttccgccgtggtcggtggtgccggtgatgccgacgatggttcttcgtcttcggttggcacgggcggcggcgatggccaaaattgtgtgctgaactccgagagtggggacagtgcgccacaattttttgtggacgaaaccgaggcattggtggactacgcgtcgtttgacgactgttaccaattgggcgacgctgctgacgctgacgccgacgacgccagcggcgttcaaggcacagtcgctgctgcggccgcgacggcgactgctggcgagaagcgatcaatggcggcgagtgggacggacaaaatgggcatggacagcgacgccggcgggagggcggcgagcaatagcagagcggacgtcgcagagtcgcgcagcaggccgcaaaaggcgattgcactcgacaggaaggtacggtatgccgaaaggaactatacggtaaattgctgagaataggtgccatttagtaccggaaaagaaaattctcaatgtttgctgtaactgttaccgtaaaaggtcaatcccaatgtttaccgtaaccattaccctactaaaattgcaatttgtccagctctaatatatatttgcagaagagcgcttccaaaattgcacaaattgcgtctattccggaggagcggcaacaacaacaacttcaccaacaacgattgttgcttggccacgatcacgacgaggctgtgggcctgaaaaacattggactgaaatggccgcgacgaatgggcggccaaaaaattgtgtttccatcggacaaaaatgtgcagcaacagcagcagcagaggaagccaattggtgctggtgatggccaatttggcacaaacaccgctaatggccgtgggcaggcgccattagcagcagcaacagtagcatcaattagtggcaaacagccaccgccgagggcagcagcaatacaattaacggcccctgtggcggagtcggcgacggcggcggcaaaacatcaaatgggcaaggcgatggcggtacaacatcaaaggggtaaaggcggtgaaggggggcaacaacaacaaattgtggccgagctgagcgccgtctattcagtagaggaggaggaaggggcgagaaaaattaataatgataatgataataatgatggtgtaagcgggagagtagcggcagtaacaaagggtggtgaaggaggagaaagacaacggcatcagcagaggcagcagcagacgatgagagtggaagggcagacaaaaatggcacaacgccaacggcacaggtcagagaaagaaatgcctgcggcggggatactaggagagcatatttatccttgattgagtagtagtcttaaatcaaattttatgggataaaatgattgcaggatttaaaactcgcaacttttaaggccgtcccgaattcgccganattaattttc

SEQ ID NO: 27203 - DNA, 1011 bp, Heterodera glycines
  unsure (1)..(1011): unsure at all n locations
cccgcccgggccacaaaaatcggaccgcaatctcggggcgccatttggcaggcatgcaactccaatttgtggacaaaagtgcgtttaactccaatgtttcccaagaaatgtttgagatcgtaccaaataattgagttttttgtcgatttttttgtcattttgatcactgtatgttaataatgtgaatattttgtgtttgcaattttccattattcggcagtagcgcgcttctttatttgttgacacattcattcaagttgagctcaacaccaccgcagttggatcctggttgattccttctcggggagatttatattgtgactttagcaaataaaataaaatattggaggctcagcaagctagacttaaaaaacacttagtcattaaaaaatattgaaaaaaaatgatgataaattggctttatccatgtgatcaagtgccataaagttgcattttttcttctcctacacattattagggatgcaatttatagttttttcactattttttcctgagctccccgtggcctgaaatgcacgaaaaaatgtttttttcgataaactactttttgagcgtgctggtgcatttcataaaaaccgccaaatgggtattttgttaaaaaacgccacccatgtgcttttcgtaaaaccgccagcgcgtttcgtaaatccgccaatgggttcgaaacaaaaattgtaataaaaaaattcataacttggcccaagttcaaccaaattaatattttatggtatttttgatagctttaagtgttctctatcagaatataattttataaatttttaacttaagtataaaaaaagttataaatcattgaacattttatgttttttgcaatggtcaagcatatataattataaacaactattaagtctataaaatgcaattgagccaaattaatttatatattcgatagctctaagaattctctatttacctttaaaatgcagaanattcattgagattcaaaaaagttctgtacacaaattctga

SEQ ID NO: 27204 - DNA, 1669 bp, Heterodera glycines
taaaaataatttgctttttgcaatgtgcacttggatttcataaaaaaaataaattcaattaaagggaaaaaattatggggcaatctgggaattgaacccaggacctctcgcacccaaagcgagaatcataccactagaccaattgcccttgtgtgcgcaagtgctaaatattttataagaaataaatattaaagcatttgtttggcagaaaattcttttaaaaaataatataagaagaaaatttaataaaaaattcttataaattcatggaaattttaaaaattcattatatttttacttttttttctcattcttggcttcatttatttatttttagttaatattcggtcacacttaatgtataaataaagtaataatggctgcattaatatgcgtaactaattggccacaccattttgactaattaattaattaactagccacacccatcgttttgtttttctctcttcaaataataaatgaattaataagtaatgtttgcaatcaaataagtgtcaattcttttgcttttttattcattttccttttgtaacattttcttctgcctaattattcattcaatgatcgccgtcggcactttctttttgcttttgttgttttgcgggaatgccaaggaaaatcaacgagttcattaatttatttcataatttatttttattttttttgttttcttcagcaaattgtccttcccgtcagtgcgcggctgaaaatttccgctccgtcagctgacaatttcaacggaacttttataaaaagttcaaaaggagaagaaatggaagcgccgaagtcgaaggaggaggagggacagcaaatggaagtgatacggcagggaatcgcagttgaaatgccaattaatagcaacagcggcagaggatgaagattttaatgatatgatgataatgatgggtaattacaatagtaaaacaataagagaaaaagaaaacaattatgcagagattggacaataacaaagaaaagactattaaatgttaattgaaatgaaaaaaaataaagaaaaagtaaagcaacaattttgaaatggcagataataaaacattagcggaacagactcttcaaattcaggtcaaaaaagagcacactgattgatttgattattgagcataaatcaacaaatcccttaaaataaaagaatgcgttttgcgcgaatgattgcttaaaattaaaacagtgcgcatttccaccatcgcttttattgtattaatttgagataaactcaattaaacaaaacttttacatttttcattaatctattaaattcgaaaattgattgtccaactttggtcaaaggctgatcaagtggaagaaaatgatcaagcggcttaaaacctgttcacaaaacggcaattcaaacattggttatgctcttgtctcataagtgatgatggtgatttggtgatgctcatttgtcagaagatgaagacggccctttctttctctcttctttactttcctttctttctttggttggcttttccttttggtggcatttgacactgacattttgcgttgcttcgatcatcggcggcagcgatcacttcagcagctgaccccccccccccccccgaactccattttttatttgttagcgcattccccgagctgaatttcccttcggcaaaaagcggaa

SEQ ID NO: 27205 - DNA, 714 bp, Heterodera glycines
  unsure (1)..(714): unsure at all n locations
tatttncggggtttattcagatttggatttaattttaggcataatcaaatttttttcctaagggatattcaaatcgaaaaatatttgacgaaaaatggcaaaatatgcaaaaaatcagaaaatatgtaatcaaaatttgtcttgacaaaaaagcaacaagttttatgcaacaggatccaataaaagtgaatcatcggttcatcaaaatcactaatcaccacatcattttacatcctcctcattcatcatcttcctcgctctcctcatcatcttcctcttcccactcatcattcatgtcttcatcgtgtccttgtccttcaccatgctgttctccctgctgaggttggtgttcctgattctgttgttgcagttgttcctgacggaggcgttccgcttccttttccttacgcttctgttcttcctttctctcacgctcctcttcctcctctcgttcctttgcatggcgtgcctcacgttcctcgtccgattcttcccactggttctccttctcaactcgtgcccattccggatgtcccggtgggtacggctctttgacgccgaatgccttgcgaatttcctgcggcgttttgccattgatccatttgacttttacgatttcgtacacattgtcaatgtaatcatcgttgatcaaacgattgatgttataaaagtcggccgccttaacattcatacaaataaagtttattttaatgc

SEQ ID NO: 27206 - DNA, 1248 bp, Heterodera glycines
  unsure (1)..(1248): unsure at all n locations
taccgtccatctgcaaacagcagaagggaggacaaagttcaatcagcaatcacgtgtcttctgaagttatacaacgtgtgaagagacgagctgatttttgctccgaccacaaggcactgaaccgttttgtgtccaatcgggaccggctgagaattgcggtccaagagctgatgcgtgcagcagagattgcaccggatcaagatgcttatggaatggaacatcttattctaattcaacaactatgggtacaaataatttaaaaaaaaaaaaaaacaagaaattttttaatgtaaattcacaaaaaggaccgcatctatactggaatgtaccgcattgtactcttcacggaccagcctgaggagcttccaagaccaatttggaagggtccgatgggacgccgcttctgtgtgtcgctgtttctgtcggatgggcactatcacggcatcaaaaaaattcactgcttcttcaaacttgggataaaatattgcgttgattgcgagtgtttctatggtagagacgctaaacatacgatgtcctgtaagagccgttgtcaccaatgtggaaaaggttactaatttaatccaacaattaatttgatatttcctacagttggaccgcaatatccttgcataagagtgcaaggtgtctgtctacactgtcaacaatgcaaacgatttttcttctctcaaagctgctttgatggtcatcgtccgcagatgtgcaacttgattaaacgttgcgatgaatgtaacagaacttttcaagtggatagaaaaaatccccacaaatgttacagcaactattgtgcgcgatgcaaggtattttttctctatttatttattaataactcctccaaaaaacacaggtataccatgagaaggaaggcgcgtgcttcatcaaacccattgtggtgcctgacgagaaacccaaataccgaatggtatgctgggacacagagactcgattggaacagctgcaacaggcgggacaacagcgacacaaggtcaactacctgtcagcacgaattacctgtacggagtgctgtgattctgaaaatggcctgcgactcaattgntaaatttgtttgacaacatacggagcgatggaacgaacgaaggattggagcgaatcngaaggacatgagccaatttcnngcattgtcgagtggattttgaaggcttgnngacacaatatcaaacattatttgggtgagtttgtgatcttttttaacatcattgttatgcaaaa

SEQ ID NO: 27207 - DNA, 1222 bp, Heterodera glycines
  unsure (1)..(1222): unsure at all n locations
ttntgttttaattaagaaaaaaatntttgtaaaattaaattcttaaagagaaaattaaagctattgaatgatacaatgaaatattaatttggttgaatctgagccaaatcaatgaatttatataaagaaatttgaaaaaagatttaatataatctgtgactgaccgttataaatgatggcatttaatctatcactggtctattcacatgtattgtacttatcgttggtgctaattgtaagaagttactcaaaaaaccatcaaatggaaaatttttgaccgaaaattattcataactttgcccaaaattaaccaaatttttttatcatcgaaatgaattttgtaaaaaaaatttatggaaatgccaaaatcaatttgatcaaagccggaaccaatcagcagagtttaacaaattcatccacaaagtcggacggacaaaacaccccaatattctttgctgataacaggcagaaactgttcatagtttgtcttgaaaaaggcacggaatttattgacatccaaattcaaaaaataattctaaaattgggaaataaattaaaatttgtttaaattttaaatttaattttttttaaattagggttgagcgggaccgggaccaaaacacggacaactgagtaccaagtctcggttttttcccggtcctggttttcgatccgaaaaggtcccggttttgcccaaaattcccggtcacgctcaactctattttaaataataatcactttcaaattgtcgagtccgtagcgctcaatcagaaggaaacggtcgatcagcggaatttccacgcaattgatcagatgcgtttcgcagcgcgacttcaacgcggtcacctcaaagcgaagcgacacttttttataagcaaactaattagcgaatttggggtcatttatggccattaatgttctctattagcctccaaattttaaagaatttttaattaggttacaaaaaaattagaaaaaaacacaaatttttttaatagttttggtcataaaaattttacaggctgatagagaaaatttaaacattaaatgaggttttgataagtgatcagaggaactcgcctggaaatagttggcaaatttgagcagcataagtacatttgtggctaaaatttggaatcaatttaaaaaaaaattaaaaattacattttcaacccctcaggggttatagtagtaataaatacagtatcaatgaattacggtt

SEQ ID NO: 27208 - DNA, 1801 bp, Heterodera glycines
ttttacagctccaaccgatgtgttatcaaaggacgaagttaacgccatttatcagttccattcccttccaaattgtcgtgagatttacaatgacggacttttcccaatgcaatttccttcttatgcacggatttctgactggaaaaagggtacacttttgatggacattgaaaaagtgtcggaatttgcacgagaggaggttgagagcagtcggcacagccagaaagtgtacataaatggaatgccatggaaaatattggcacaaataaaaacgaaaacgggatacactgacaatgagaaaagtttgggcatttacctttcgtgtgccgttcccaaagaaggtggatggaaattaattcttaattaaataataattaatataaatcgattgcattgagcagaaaattggagctgcaaatgttctgcaaccattcgaattgtttcacaaaagtgcggtgtggcggatttaaggagaaaatttgatggaacatttataagcaatcaaaatattgactgtggattctattatttgatttcctttgcggtgagtgccaattaaactttcggtgtaaactttcccctaatattggcccaattatgaacaattaaggaattgctggacccgagcgaaggcttttacagcagaagcaaggacaaagtgaaattggccatcaattttattatgcaagaagcaaaaagggaggaaaaaacaagcaaaggcttttacgacaaaagcgaggataaagtgacattggctgttgatgtcattgtggaagaagcaaaaactgaggacaaatgataatcaatttggcatattatctatttgaaatctccattaatgtcacttatcataagggccgcgatttttagtgaaaaaatatcgaaatagttaaactaaaatagtataattctcatccgaaatcggataaaatagttttaaaatttttgtcaattttggaaatgaattttttaagaaatttttcatttctttggagtgtatttttctgaaatttggggggggggccgattcttaggagtgcgattttattttttattacatttttgttgagaaattttgagtaaaaaatagtaattttcactaaaaatcgcggctttgatccaatcaattgacaatacctgctttctatacatcgtattcgaacaaacccaatctttttggtattatccgaaagcacaaagtctaaataatgtaataatacaagaagccaagagaattttaacatttaaagaaagttacaaacgaaaatcatcaacaattactaaatcaaatccgaaaatatgtattcttcggttttctgggtcgctaatcacgaacatatctgagaaactgatatatctgaaatattctgactttgggatagtgaccaaattttgttctgatttcttaaatatagcgtcaaggttacactcttcatcatgggcaaaagaacattaaaaattggggccaaatacaaaaatggtagaaataaacacacaaaaaagatttatacaaatcaaaaatcacccaattacaacaataataaatacctaattaccaaatcaaacacacatttaatacataataaatggaatggaatcatttgcggaaaatcgcactgaaaagcacagagtcatcgcgaatcagaaaggcacagaacggatggtcagcgacaaaacgcaagttttgtcgcggtgcttggctcgcttggtaagcaattcggacgtttgtggctgccgcggcgacagtgccctcctcattgacctacataaatcgaattaaatagacaatttatgcctaaaa

SEQ ID NO: 27209 - DNA, 1211 bp, Heterodera glycines
cccccccccccccccataaaaaaaaaaaaaaaaaaaaaaaaagaaaaagggggagcaccccccccacccaaaaaaaaaaatagatggttttttttttccttttttttttttgtggggggaggggggggggggggggtaaaaaaaattttattatattttttttttttttttggtggggggggggggggggggggggtttttttttttttttttttttttttttttttttttttttttttgggggggggggggggggggcgcgccccccccccccagggtggggtgtgtggggggttttcttttttttttgggggggagagggaggggggcgctctttttttgttttttttttttttttttctctctttgtggggcgcgcgcgcggggggggtttttttctttttttttggggggggttttttttgtttttttttgtttttttgtgtttttcccacaaaggtttttggggaagacaaccaaaaaaattttaaaaaaaatttttttgtggaaagaaaaaattggggggcaaaaaaacacaaaaaaaaaaattttgtattttcccccccaaaaagttccacccccggggaaaaaaaggaaaattcttttttttttttttggggcccccaaaacttttttttcttttattggggtttttttcaacaacaaagtgccaaatgggccgaaaatttcccctttttatttttcattttttgttgcccttttttttcagtgggaaatttgaatttaaaaaggcgggaaatggagagaaatttcattctcgtcacatttctaatttttatcttctcaactattacatctgattgctgctgctcaccgactccatcgacaacgacacgcgatggaagaactcgtggcgctctcccctgaatccgcgtcggccgctggacgatcacaaagaagctgggcgccggagcattcggagccgtctacctgtgcgtgaacgaccaaggagagcaggccgcgctgaagacggagccggtcaacacgccacatccgctgctcgtcatggaggtaggcgggggaggaggggcggaaaattggcaattcaatttaaatttttttttcaccacccaggctcacgtgatgaccaagctggacgcccttcgagacggagacgggaagcacttctgccgctgcttggacctcgggcgcgatgagcaaagggaccaacaatcgggacaaatgaagaa

SEQ ID NO: 27210 - DNA, 968 bp, Heterodera glycines
actttatttggccatttggtgcagttcacggacactccgttccattcaaaggcgatcaagccaatgcttgagaaaaatgtgccgaatttgttggcatttgtaaagcgcatgaagcaacgcttttggcccgattgggacacaattttggacagtttggcactcaatccgccggtgtacgaagaaaagcaaacaaaatgataataattctaattctcgctaattaaaaagtgagcataatacataaaattgtctgtccttttataaatgcttttttcaattttatttttttctattttggtgtaaaatgttttaatgcaatacaaattcaaattaaattaaaagctttttgaatccaggtgaaccattgcatcgattatattatcatagttaggcattgtatgaaataaacaaaattttctagtaaattaaatttttagaaattttattagaaattcattgaatgatcaattggaaaagtagaaaataaatatatattttaaagatagtatttgcgtttacgtgcaaatagcgcagcggtctaagtgcgccacccacactcattcagccttgcgagttcactcccgcctgcacgcaagcttttttttcaaaaaaatttgaccaaatttctctcctcttcaattgttttttttttttaatattttaagatccaatctaaaaatattttattcttttgctttggtcttgcatctgttcttttggcttttgaacatgtcgtcaaatatttcggagttttttctgtttttttaattcgtttcaatgcaaaattaaaatttttaaatttatttcttatttatgtttttgccctctatttaagaattatattttcaaaaagtaaattgaatttttaaaaattattggattaaaaatcattgactcaaaaaattttgaaaataaataaatcaaaacaattacagaaaatataacatataaaaaatttttaagttgaa

SEQ ID NO: 27211 - DNA, 920 bp, Heterodera glycines
  unsure (1)..(920): unsure at all n locations
ctttgcccccttaatttgttgccaagtgattccaatcttgttttgtttttttcttccttatttccccctacgcttgtgatcggtgccaacggactcggcttgtacagaatggcatttccgcaagcgatggccggcgcaattttccacgacgcggtctgaaaaggggggacggagagtgctaattgtaaacaaatctgtgtacttttcggttttgttcctacacaaaaaattttcaatttattatgccattttcacgtaggaatattgatagatccattttgttttgtcgcccaaccaatttgtgctatggtaattaggcaaaatttgtgatttccgtgcgcccttttgtcctttttttttgttgaaaattatgaagtgtaggaacaaaaccgaaaagtactcaaatctgcgcccgtttagccccattttggcgttgttttccgtttgcctgtattgggtaattccacgctccgattgcccccaccacaccgaatggttcgcgtcgcgtgtacgcaaaacgccccgacagttcgcctccgtacggaatgtgttcgccggacaaattgacaccagcataaaacctgcaattgaatgattaatggaaacattcgccacaaaaccaaccaatcgaagcgactcactcaaaagtgtcggcacacgaaagcacatcggctttagcctcactgatcggtttgccgttgtcgcgcacttcccattcagcaatttcgttggcgtgtcttctgaaggcaaaaaaaaagtgtaaaaagaaatagacacagctttcttaaattatcaccgataaaatccgatttcacaccanagaaccccacccaacgggggaaagagatcattcgccaatgcctaatttattgtcccgatcatccgatggtctgtctgtcccaaatacgagcgattgtttt

SEQ ID NO: 27212 - DNA, 1788 bp, Heterodera glycines
ataaatatatgaatttggctgagtttcctaatgcattcattaatgacaatcgtccaattatgccattacaaaagcaactcttatttaaaccaaaaacatttgttaaaaatttaaatttttaattaatttattacaaaataatattgaagtacgaccaaaatgtaataattcatgatttacaaaaaaaacttataatattatttattaaattttcatttgtattatttttaaaattttttatatttttataattatttttcaattattaaagtgactctgaggttgtagacattacatcgctttcattctatcatttttagtttattgtttaaattttttgttttaaaaaagaaaatacatatgttggtcatgaaaaagacttaattttttatcttttttggattatatttttattaaactttttatcattaaatgattaacatagtgtaataataataataatattaattaaatcattgcttactaattctgtgtgaatttcaatattttatatatttataattgttgtgaatttcttataaaatttaaatttttttaattaaattattacaaaataattgcgaacataaaatttattttattttcaaaaattaaatacggcctttattccttgatgaattgaaacaaaaaggcgcgaactgagaaaaaaagcatatttctattctatcattacatgaaatgtaattttaataagagcaaaaaaattcaaatgagttttacattattgattgataatttaatacatgcaaaaataaaaaaccgtaatcagttattaaaaattaattaaaaagtggtaaccatattacttagtacaacatatttgaaggaacgagcgaatcgcacggacacacaccacaaactactatttgaaataaaaataaatgtttaataagaaatttatacaaaaataaaaaaatattttgcaaattgttgtttgaatatgtttaaaaatgtaaataaaaattaatatgattttgcctaaatttatgtaagaaaaactgacttattcaaaatgtcagagagctcactaaaatcctttattttaaactatctattcaataattcaaaaaaaaaaatcggcttacatacattacctcaaaaatattactacgttaaggcatgtcaaaaattaatacaaataaatataaaaaattattaacttgtgaagaattttataataaaatttctaaatattcttattttaaaattgaacattccaaattgaaaattatatcatgaaaaatcattctcataaatatttgcttatatattgacttttcaataatccattaatagactacttctatacatgaggaatgattaaaagacataatatgataaaaataataaaataataatacaatttacagatgaacaaaagcataattaaaggtataaatattataacactttcagtgatcgcgctgtttgtttccgcatgcattttgctgcttcgttggcttaagaagcgtttatccaatcggtcgtccgccttttttctctgtttctgtgttggctcgatgtccggctcagccagcttccatcttaattaaaatatttttttataattaaacaaataataacaaattaaaaacaacattcacattataccaagaaatacaatcaacaataaattataataaatgaaaaactaaaaggcttatatcaatctacaaaataaaagataaagtcgagaatttttaaaacactattccgaagcatcaaaaatagaatattaaaaaacgcaaaatgaagtttaactcagag

SEQ ID NO: 27213 - DNA, 1241 bp, Heterodera glycines
gggggggggggtaaatgacaaaattttttacaaagcacaacaaaataaagccaaatcagtattgaaatatataatttttaaaatcaaaaaattcttgtcaaaaataattaaataaatatttttgaatgcatttttgagaagtttttgctattttaggagttgtttttgctgaaattgttgaatttttagggcgggggggggggttcgtttccattaaatttttattaataaattgtgcataacgccaaaaatatgcaaaaatagagatttttcaaattttatttggtttaaggctcaaattaaaagcctagaaaataggccctaataactcgaaaagtagcttaaacaaccaaaaacaaattgttttttcatgctaagaccgagaaataatgatgttctttacatctgtcagttgtgaatgtttaaaaaccgataaaaaagagaaatcattcgaaaatttgaagtaattaaagaaaaattgaagaaaagtggaaatttcaatgggaaagtcaaacaaaaattgagaggaaaatgaaagaattcattgaacgatttgatgaatttaaaaggttgtataaaggcaaacaaaaaggatttgcgaaggaattgggcatttctaaagaacattacgaagatggaaaaaagaattgatgccaaaatatcataaaagtgagagaatttgttttttaattagtttatctttatttttaagtacaagttaaacattcaaatgaggacaaattaaaaaagatgaaaaaatattttaaaatcaaagaaagaaacctaaaaattagcgatgcaaaaattgcaaacataataaaaaaaaggttgactcaaggatgggaggaatgaaaatattaatgaaaattaatttataaggccaaatagctatgcttacagagttggacctggacctggatttcctggacaaaaatctaggaaaatccaggtccggaaaaatccaggctcctcgggacctggatccaggcctggacctggattttttaaaaatttgttttaaaaaacaaacaaatgcttgaaaaatcaattaattgcttgggaacgtctaaaaaaaaataagaatgtattttaaaaccaattaagcatttttttggaaaacttgaaaaaacaccgggcagtttgaaataataagatttaactccaacaaaaaaaattattttaatatgtaccttgaaaaaaaaaaagttggaaaaaattttaaaacggattttcaatttttt

SEQ ID NO: 27214 - DNA, 1434 bp, Heterodera glycines
  unsure (1)..(1434): unsure at all n locations
cggcctcaggacggccgctttgcgcccgtttttaatttttcgggggatattcggccgcttcgcggcctcaggacgggcgcttcgcgcccgtttttaattttgttgggaacattcggccgcttcgcggcctcaggacgggcgctttgcgcccgtttttttaaatttttggggaacattcggcagcttcgcggcctcaggacgggcgcttcgcgcccgttttttaattttttgggagacgttcggccgcttcgcggcctcaggacgggcgcttcgcaccctttttatatttttaattcggccgcttcgcggactcagcacgggcgcttcgcgcccgttttttaattttttgggagacgttcggccgcttcgcggcctcaggacggtctgaggtcttgaaaagtaaaatctgatcacgtattcgtgatcagcggcccaaataacccctaaagacatgtttttggaagatttttggtgaaaaaatttttccactcaaaaatactggtcaccccctttggtccagaatcccaaaatcacttttatctttatagcaatttgtaagaaggtgataaaaatatgaattacaatttatcttatagagcaaaaaattgcggatttttgtagtatttttaaatcctccgtttattaattgaaaataacgttgaaaattaacaattgaatatttaataaatttaagatgaaatttacaaattcaaaaaataaataattaaattctttaatgtaaaaatttttttaaataatctacaacaaatcttcagattaattaaaagcattgaaaaataactcaaaaataaatagaaaaataatgttacaccgtccggatccgaacctgccccctcccccctcaaaatgatgcctcagaatccccaatcacacagggattctgaggtcttgactatgtcaaaagtaaaatctgatcacgtattcgtgatcagcggcccaaataacccctaaagacatgtttttggaagatttttggtgaaaaaaattttccactcaaaaatcctggtcaccaccctttagtccggaatcacaaaatcacttttatttttgtaacatctctcaaaaaagagataaaattgccaaataaaatttatattgtagagaaaaatattgcggttttttgtagtaatttacttttccagaatatcttttcagaaccgagttatgaatttttttctgaaaattcgaatttttccagaaattctggaataacttttttcttttttgtgataaaaaactcaaataaatcccataaaattctccttatttttctctatttttaaagctttattatagttaaatcgatgaaaccatcaccgagttatgaattttcaaatatttggccaaaatcccgagggccaaaaaattgcaaaaaaataaagaatttttanaaaattccaaaaatcatgaaac

SEQ ID NO: 27215 - DNA, 1668 bp, Heterodera glycines
  unsure (1)..(1668): unsure at all n locations
tacaatatttagcatttttagttttttttttttaaatttgctggctaattgagagcaattaaggcagggtgacgaagttttttttcaaattaaggataaagaacactaaaattcaggtttagaccccaaaattcaggacaatttgtttttcagataggtacccaccaattcaggatctgaaaaatcaggacatttggtcaccctgaattaaggttatctcgaatggtaaaaagaactgtacctccacttaaaattcttgccatccacggcaatgatttgtcatccacaattgtttttcctttgaatatctattgtatttgttaaaataatttattttaattactagttatttttacatgatttgtgccaatttccacttttggtgcaatgggaaattcgggttcaaagtcggaaatgccgcattcggaaaattctgaaatatgctcagacaacgaaaatgatttgtatccgatggtaaccaaaataattgtcaagcaaagtttaagcataattctaaaactaattttaattttattcaaaattattatgattttaaaaataataaatgcattaattgtattagaaaaaccaataaatanaaatgtatttataagcaattccccaaagggcattttaattaatttcatttgtctaataaatgctttaattaagaattagaacaaatggtgaaatatttttttagcttcaacaccttttacagtcgtaattagtaattactcactaattgcttttcgattaaagaaaaataaaagcaatgttaaaaataatttatggtaaaagattgataaaacctttcaactaaaaccgcgggtcaagaaaagtgtcgagtcgcgattcgggtcgggggatacgttcaaagaaattcggcgtacggttcgggtttcgggactccgggttcgagtgcgggacaacccaaaagctcaccaaatttatctcaaaatggatctggtgaaattattatttccttaaaatttttaagtcgaaatttagcagaatattttcgggttttctgtggagatgatgtaaatgcttcaaaccctgttcagccggttaaaattcatcatagcatcaatttcgaaatttacttgctcattactattttcgttggttcggcaatactcaacaattatgccaaaagaactcatctccaaaaccacgtgatcggtcaatgcttaaaactcatttttctgttaaaaacatttattttactcaaaaatgtatgtgaccgttttgaattcaatgctttctaattaatttatttttattaatatagatttttctagtttctatttttaggctcaacaaattgaattggccaaacttagtagcagagtcaaatttatgcccaataataagaataaaaaaataataactaaacagtttaaaaaggacattttttgttggttgatcagagaatttccaatcaaattttttagcgaattttaatcgctaatgagtttttgctaatttgcttaattgctggcggtgtcttctttttctttctgctgttgggattccnactntttgttctcatgttcttttttcgttttggcaaantttgttgagtcatattgtttctggtggctacgttctaagtgatcccaaagatgggaggntgaacttctatttggaattttacattcttta

SEQ ID NO: 27216 - DNA, 1931 bp, Heterodera glycines
  unsure (1)..(1931): unsure at all n locations
aatgagtgaaaatggaagaaactttcggcatttgcttatcgcgacaaaattttgggcaaaaagtaaattaattatntaaaaaaacatttattttttgaaattattcttaagacaattacatttactcaaacaaaatgggctttttgaacggaatatctttggccataatggttgccaaaattgggctgctctttccaaattcgtcactccaatttcttctggaaaatttttttctcatttatttgacacggtaattttaaatttttgatttattcttatttattctttggcttccaaatttcactggtttttgaaagtctgattgatgttgatatttttgtttttgataatcgactcataccgaaatttttaaaattaaaacattttagaaaatatttttataggaaaacaacgtgaaaaattttgaaatttcccgattatcttgcattaccaaaattagatattttcataaaaatctttttttacccccttaatttttacgttttgttggaaaccaaaatttggaagtcataatttattatccaaatgttttttcggtttgcctttaggcctcaacaaattccgattcaattaacaaaaattgacgcacacaatttcaatttgtttgttgcaatgaatgaaaaagaattggaaatgcccgtcctcacgcccgaattacaatttcacccgctgcaaaacgccacgcgatttgtcacacattcaaatgccaaagtgattcgacgtgaaatggcacaaggcgaattttcatattttcttgcgaatttatcattttttaatttaataaatacgattttttagcgctccaaaaagtaaattcattgaaaaatgacaaattcaatttgggagcatttctgagtgagcccattccattcacagagaaggtaaaatcgaccaaatgaacttgaattgttatgataaagcaatttttgagcaacgaaattttaattaattttttttaaaagaactaaataataataattgtttgttgaatatcaaaaataattatttaatttaacatttaatttaaatttttctttttcagttccaaaatttcctcgtcattcattgcatctccgagcagaaagaattggccgattccttctgcgattttgtcgagtggagaatgcgtctgcaaatcatttttagcatcgacaaaaaagacgccggtggccaatcggtggcgacgcatttaaagccgaacattcaccgggaaaagtgcaatttgacaacagcaaaactgctgggcatctcatttcggtaaaaaaagtccaattaggtctcattttcaaatgcacgaaaagaaatcaaattaactaaaattaacaaaaaatactctttaatggggtcaagacaatccgtcagttatggacattccgtcagtgacaattcgtcagcaaatttttttttttttgagaaatatttaataaaaaagtttaatgggttttacaatattttaggttttctcattctaaagaaatgatcttaaatttttttaaaattgcttaatcattacttttataaaataaacttcaaaattatttttcaatttaaactcattttcacattattttatataaaatcttgcattttaataaaaaaaaaaaaaaaattctgacggaatgtctactgaaggattttatccactgacggattgtccgggagcctttaatatatcctttctgtttgagattctgaaagtgctcaatattttaggcccaatttctgcaaagtttggctgctgggcataattagccacccgatcaaaaaccgcgacgaaatcatttcaatgccaaaacattttgattcgaccatcaaaagtcacttccatcaaagacaaaacagagaaaattcggcaatttattggcttgaagtggccgcaaaactggagctcaaaacgatgctaatgagca

SEQ ID NO: 27217 - DNA, 875 bp, Heterodera glycines
gctgtgtcgaagtgcaaaaagtccgaatgtgggcgaagtgcaaaaagtccgaatgtgggcgaagtgcaaaaagtccgaatgtgggcgaagtgcaaaaagtccgaatgtgggcgaagtgcaaaaagtccgaatgtgggcgaagtgcaaaaagtccgaatgtgggcgaagtgcaaaaagtccgaatgtgggcgaagtgcaaaaagtccgaatgtgggcgaagtgcaaaaagtccgaatgtgggcgaagtgcaaaaagtccgaatgtgggcgaagtgcaaaaagtccgaatgtgggcgaagtgcaaaaagtccgaatgtgggcgaagtgcaaaaagtccgaatgtgggcgaagtgcaaaaagtccgaatgtgggcgaagtgcaaaaagtccgaatgtgggcgaagtgcaaaaagtccgaatgtgggcgaagtgcaaaaagtccgaatgtgggcgaagtgcaaaaagtccgaatgtgggcgaagtgcaaaaagtccgaatgtgggcgaagtgcaaaaagtccgaatgtgggcgaagtgcaaaaagtccgaatgtgggcgaagtgcaaaaagtcaaatgtgggcgaagtgcaaaaagtcagaatgtgggtgaagtgcaaaaagtccgaatgtagccggaccattcgcccatttggacacttcgtctcacttcttctcactgcttgtactcagcatttactaatcgccccttctcttcatttaatcacatatttatttgtgactaataaaggaattgaaaatgaagggagaaaaatttgagagaaagctcttcttgcataaaaatacaaaggaaaggccaaagcctcctcctttgtccaacaaatccatttatgtttcacaggcgaacgttgaaagggatc

SEQ ID NO: 27218 - DNA, 806 bp, Heterodera glycines
aattgggggtttctacagaaaattctttttttcagtttttcgttagattgtattcttaatcattttttcatatctttgatgaacctattcaatgttaagattttaatggttaaaaaattgaatgtcaatctttgtgactagtaattttttcgaattttcaataagttatttttgtcgatggcttatagttttagtaaaacttattgataatagtggaatttttatgaatataatattttttacagcgcggcgcaaaagtccatttttgctgggcggcgcaaatgtcgcggcgcaaatggagcggcgcaaatggcacggcgcaagtgtcgactttgctgagcggcgcaagtgtctcatcacgtaatcaaatcactcttgtacctataacaccaagatgatgaggtaatattccattttaaatattaaattcatataatttcaaaaatttaaatgattcgttgtaatgtttcattatgtgtatctttagcgattatggagctatattggaatattgtttgatcttttcttttatatccttaatatgtattaaaaattttatacaaatattgaataaatgagaattttttaatttttaccattattttggtttaaaataaacaaaaaaaaaattattattttttgttttgctggataattataattgacttataatagccctatttaatttttaataaattttactattaattaaatgttcactttttaaaatattttaaaatgaataatcatcagctgttaacggtaaaaaaggtttgtcaatgtgcgtgaatgtcaatttgtttttt

SEQ ID NO: 27219 - DNA, 1288 bp, Heterodera glycines
caagaaaagtgcatttgtttcttttttttggaaaattacattttatataaatatttgtttttttcccaacgctaattttaatggactgatccatccagattaatccaaaaaatcactcgcaataatggatgatcttagactgaaaaataaattccaaaatttccattggtgtatcctttttagggatcaaatcgctatacctaaatctttttagcaaatctttaattaattttctggaattaaagattatgaaagatttttactctttttcccctattttcctttgagctattttcgactttttggaaatttattttcgtcgtttgcgctcggaaattttagatttcaatgaaaagtttctttttttttgaagaaatttcatttcattaaaaaatggtcggaataaataaagtatatcaaagaattttttgtcaaaaattttaattggttccttttatccatttatttttatgaaaatttttttgttggaaaaacaaaatatttatgtttcaaatcacgttttagatcagccttcaccttccggtcatcgacaaatttgagaacaatttgatgatcaatgaccatgtcatgcaggtaaatttggtggtactttacttaattataatttatttaattattaattattgaaaataatatttacttgttttattgcctcaatttttaatttaaaattattatggaaggcactcgaccggtcctaatttgtcttctggtttttaacagattgccaaaataaagcagctaattttctcatagatgtttaaaattgtctttaattaatttttttttgcattttccgtaaaatttctcctttcactatttattcaaaatttattaatttttaggatgggggaaggtataaatttggtatttctcattttcccaaattttcagggtggatgggaggggatgaatatgggatttcccattttcatgaacatacaatttcattttttattgattcaacaaactaacaacttctaaacctacgggcctgattttttagtattttcctgaattatcacgttgattcctattcttaactggtttttcttagaattttcaaagcttttcttaaaaaattggcgctccacaaggaaaaaaaaagctaatttttgtatctttttccatagattcgcaatgtccgtttgaacttggacaatctgcaacacgaaacagaattggacctaaccgacacaagccatatcaaatcaggagtcggtcaatacatctcggccaaatttgtcgggactaagaaagggtagcc

SEQ ID NO: 27220 - DNA, 1071 bp, Heterodera glycines
catgccgctctcgaccctaactcagcaacgggtgggcgtacagcagcggcaactgcagcattcatgcagctcttcaaaagctgtccgaacatattttctttcttttctaacgcatctccaagcggagttacacccatttttggacccgtattttttgtaccctgatcacattctgaaaaaaataattgatgcgctaaccctaagtctccccagttattctgcgcattgctttctccaacgcgagggcaaagcagcgaatttgtttcattttcctcctttttgtcttttttcatgccgctctcgaccctaactcagcaacgggtgggcgtacagcagcggcaactgcagcattcaatgcagctcttcaaaagctgtccgaacatatttttctttcttttctaacgcatctccaagcggagttacacccatttatggacccgtattttttgtaccccgatcacattctgaaaaaaataattgatgcgctaaccctaagtctccccagttattctgcgcattgctttctccaacgcgagggcaaagccgcgaatttgtttcattttcctcctttttgtcttttttcatgccgctctcgaccctaactcagcaacgggtgggcgtacagcagcggcaactgcagcattcaatgcagctcttcaaaagctgtccgaacatatttttctttcttttctaacgcatctccaagcggagttacacccatttatggacccgtattttttgtaccccgatcacattctgaaaaaaataattgatgcgctaaccctaagtctccccagttattctgcgcattgctttctccaacgcgagggcaaagccgcgaatttgtttcattttcctcctttttgtcttttttcatgccgctctcgaccctaactcagcaacgggtgggcgtacagcagcggcaactgcagcattcaatgcagctcttcaaaagctgtccgaacatatttttctttcttttctaacgcatctccaagcgattacacccattttggacccgtatttttgtaccccgatcacatctgaaaaaatattgatgcgctaccccta

SEQ ID NO: 27221 - DNA, 1346 bp, Heterodera glycines
  unsure (1)..(1346): unsure at all n locations
tttcatctgtaattaatatatatttttaatttgtccctttcttggtttctgncaaacccgcggcgggaggnccccgagctgccaaaatgtccacttctgtgtccgcggatccgttggccgctcctccgcccgcgccttcttcgcttggggacgattgcggttgctctgtcgtccgctccatctgttttgccgtttcagttccgcttgtcgttgtcgtcgatgccaatgtcggcgttgtggtggtcgcagccgactgagtcccctctccttgacctgtgttttcggcatttccatttgactttggcattttctcgccttcgttggccttctgttcctcttctccctcctccgtttggtgtcctccgttctcttctcgcgttatcacttcgaatccttcgcttccgtcgttttcctccgccgtcggacttctgaactgaccaatttcgagttcgtgctgatgctttggttgttgttcagcagtgtcggagttggaattcgcctaattaatttatgatttttaattttctattttcatttttgaatttggcactttttctttctctggcattttgtccccctctcggctcatgtgagtgatctgtgcccgttccggctgcggcattttctcctcctctccttcgttggcattgccaatgttaggctaaattaaattgtaattaatcttggaaaagtgccaaaaatgccttttctggagtggctggcgttgtgccattttctgcgttttctgttgggaaaacaatggctttttcttccccttctccgttcgacccttggctttttttttcactttcgcctactaaattatagtaaattacatcacaattaaaaagctcttctgctgatcattttaccattggcactttgcttctcgtctttactttgtgttgccatttgtcccgtcaaagtctaaaaaattatattttaaatgattgactaattagttaattaattgttaattggtcccacttcgtttctctccccactcggcttttcctccccctcctcccgttggatttgttcgttttggctatcgttcagttcgtctaatgctgcgattccatgatggtcatggtgattagggttgtgttctgctaacgatccaaatttgctgattattgctaattgtttctcacttaccattttctcccattggcttcgtcgcgttttcctctgccttctcttctccctccactttgaatgggctgtcgtcttctttctcttcttccgcctcctctgtctttctctgctcctcctctgtcctttctttcttttctccttcctttttcccactctctccttcctcctccttctcattcgtcgtgtgt

SEQ ID NO: 27222 - DNA, 1035 bp, Heterodera glycines
acaaaataatccttttctgccgccatttcctccggttgctttcccatactttgcattacttaaatttgtctaattacatatttaaacaattaaaatttaattttatttaagtacatgaaattgcttcgtcatttttttgaagtagttttgccacgtggctcattactggagcacccaaaaaggcatcaagtgccgaactcattgagcactcctcaatgaatttggctaccagttcaagtgcctcagtgtcttcagttaggacccagcatgaatgtgtttcgttatctaattttgaaaattttaaatttttggcactatttttatgaatcgttttgtacaaaaaaatggctttatttatggtttttttattcgagcacaattttgagaaataaattcaattgtaagccctgatttaaaatcaacatttaatgaattttcatttcatattgaaaagttaaatataaaattattttttaaatttatgtatttaaattgattatggttcaaggtatataccgtatttttctaattatccacccctttctgaggagattgaaaaataatcccccatggtggataattagagcaaatacggtatgttatattcttatttaaagattgatttttttttcatcaatgtataatctaatccaagtatttagagaatttcaaattaattagcataaaaaatttaacttctaaaaaattgttttctcaaaattttaaataaatcaagtataccttctttccattcaacaaaatatattctttgcagattgtttttcttctgataaacatacattgccaaaattttggagattgggtattttgggttgtaacggatctttttgactgctccgtttatgtttgcatcggcagaatttttatttgaatcagatttagtctaaatcagtttatttaaatttcaaattcaataatttcattgaatatttctatagaattagttcattttcaaaatatatattatgttattattagggatgcgaatttatataagaaatttgaaaataataa

SEQ ID NO: 27223 - DNA, 1686 bp, Heterodera glycines
  unsure (1)..(1686): unsure at all n locations
aattaaaaaaaggtttttttttgacaatgatatttcaacttccagaaatcttttttgatttttattttattacaagaaatatctatttttcagcgacttaacatcaatattcatttgatattaaatgctatatttgttcttaatttattatattaaaaattatagaaatttttaaaaaatagttggattatataaataaattaacttatttttaaattttataattaaaattttaaaataaaatttttttgcgagtttcatttttcttttttgtctttaaaaggtttttcaatattttcaagagaattaaaatttaatttgtgtaaagatttgacttattttcataaataattttgcaatactctttcatcatagtgtttgataaaacggaaacgaaaaatgatgagcatgaataaattanagcaataactgatgaataaaataaaaataaaaattcttcaaaaagttgaatcaaaaaattaaaatttattaggattcataaaattcgagtggactcacaaactatgattgaactcattaaataatcgattggacttataatgtgcaatagagccgtgatttttatcaaattaatgcttttaagttgtgttttcataacttccgaataatcaaactattatttatttttaaaaatttatacattatattgtaaaataactattaaaaaacgattctaaatttttaattttaattccgagtccatgtagctgacccgggccagacccggatactcggctttttctagacccggtccatgggaccttgaccgacttttaagaatcgaaaagccgataaccgacccgattggaaacggtccaattgaatctataaattaaatttattttttttaaattaaataattttgtaatttagcttaaatttacaaaattaatttaattgattaaattttaatattattttatttagataagacaagaatttcaaaacctttttcagttatttaattaatttaaactatatgcggaatctccaaattaaaatctttacattatttaatctttattgaaagcaaaaaatgttttttaatttatcaataaataaataaaattaccaatgattgctacagctttttaaagaaaaggacggactaacacattcgacaagagtttcaataaatggaaaaacaaatacttaggaaaatatataattaataacactccctatctaaagatttgaattaattgatctaaaattgtcgaattttaattaaagtaaactagtttaaaaataaaatcaaaatcaaaatttaaaaaaaaaattttaccgtttaatcttgcagctttattaaccgaaattaaaattaaaataaataaaatcccaaaattataaaaactaattgaaataaatgcaaagaatatttaaataaaatgcttttattcattgagaagtaatttatatattaaaattaaaaaattttaattctatttcgcactttaagcttttcttaattttatgctcgacatataaatctttatttacataatcagtggccaatcatatcaaaattacgaatgacgaaagacaaattttagggggaggggatttcaacgccgcccttaaaactgtcgtctcagaaacgtcccagaaaattaaccattttcatccacanaattttatttcatttttaattccatgtgacctgca

SEQ ID NO: 27224 - DNA, 2227 bp, Heterodera glycines
ctcaacttttggctggcctatcttcaagttccctcctcattttcaatatcgtctaagttgttggttgtagtggacattttttgtactgggatgtgttcgctcgaccctggcacggtctaaatcatgtcgaacagcatccagatttaggtcacccgtgttggacatggaggtgagaccacgataaatttcttgcgggacaagtaaaaatttatttgccatctctgttaaatgaataatggaattcacaaaattcaacaatgatgagaggtatttatgcgtttttgttcacaaaggattttgccacttccattagaacgggtgtcaatagggcagcgaacaatccgccaaatcctgcgcctttctggacaagcactcgcttggcaccccgttcacttctcgctctgctgattcggcgtacagtatccacataaggcattagtcgcttcttctgtctggttgtcagttggaagcgcgaagcgacgagattcaaacaaatttcgaccagcgatagtagttgttcagtgtttgcttttcgtataagtttcctgcatttttttccggatttcgtcttggccaaagcacacaaccagtcgcgattctgttttatcagctctccaatctctacttgttgctgcttatgccgctccatttttgggaatgaatacaactgttccttcgtcttcgccctcctgctcatccttaaatatgttggttcgcagccgtaatgacggatctgatgcagcgtgcatatcaattagcaaatagccatagggacgggcggtcgctttgcgataagcatcaaggaaaaagtcgagctgacgcggaaagagttggacgccaatgttgcgaatggacaacagggaattaggggcccgcatcagcaccaggtactgagcggacaggcgggccactttgattttacgttcgaacaaattttgagtgacgaacaccaccgcaaattggtggtgatgtgactttttagtgaacaaatcggacaaatatttctcgtcgatggacagcattaggtcatcgagaatgagcaagaggggctttgggaggcgtttgagcaattcttcgggtgggactcccgaatacacatcgactcccgccttttgaagcggcggcactgccgaattcatttcaccaaaacaatagagcattgagacgggctttggtgtgattaattgatccgcttcagcaataaattttaacaaaaattcagtttttccagatgaggaggggcccgaaatgattagaccaaacggcaatttaaaacaaatatctttattggtaaagggttgtgtattaagcattttggggacaaaatgatttacatgtttgaggtcgaagctttaatactatcaaaaaactcgtcgagcgttttgtcaatgtcgccaaggtcctccttgtttttctcttcgtcttttctgggctcttcctggacataattctgttcctccacgggactgtttgtcactttgttgtccaacgattccgctaaaagtagattcccgagtacactgattgcggttttggccttcttccaacgcacgccgtcctgcatggcatcgggccattagcccggcttccactaaatcaagtgctaccttagctttgcgcttcaggtcctgctgctgcatatcggtttccgttccttgcgttgtagtggtggtggtggtgggagtaggagtggtgcacgtgtcggagggcaggtcaccgtagggtacgttgaacaccctggccttgtttttcacacggaagaagcagtggcccggcagatcataaacggcatcaaatgggacgaattgggacttgctgacccggctgcaccacaaggtgatcccctctttggtcaccattgtgtccacctcaacctctgtagctttacatgcgcggcaacggccgcattcatcgaacggaatgaaccgtggtgtggacagacgtggcccactcacggttatgccgcttgttgtcactgtaatgtccgcttgcccgaggatttgattcacaagcgctttcttgtcgcaaatattaattgccatttttattttggagaaaatttttgagaatgaaatggaggacggcagattgaccatctgcttatatacagccagccgtctgtgaaaccccgtccattttaagtttcaaattgcgcaaacggaatttttaaaaggatgagcactcttaacagagccccgtgtgagtgcgtcgttgattgggcactcag

SEQ ID NO: 27225 - DNA, 1273 bp, Heterodera glycines
aaaatatttattgaaaatgccaaaatgacgacgaaaactcaaatttttcgtgttttgtggggtgtaatttttaaaaatttccaaaaagttgatctttaggggtgtattttttgtttttttttcatttttcttgtgaaaatttccaaaaaatggccaaaaatatggactaaaaacccaaaaatggcgaaatatggatttattcccgaaaacccccaaaatatggatttatatggactaaaaaccttcaccaaatcaaaaaattttaacgcagaaatgctatttttaagcccctttcttcatagcatatgcgcagaaaaaatatgttaatccatataatttacaaccctattaataatgctaaatgtaataaaaataaataataaaatttcattaaaaaaaagtgaaaaaatttttcaaaaggcgcggcgagttgggcggttccctttaccagtgtatttttgatttagcgcgcaaaaaattacgccaattacgctatttggcatttcgagcaattttgtcaaacactgggcctgacccatagtggagccatcatcccaaaggcaattcggtagagaattttgtcctctatctgataggcctacttaaattttccagaaaaattttcccgatttcaagccattttatggcttttcagatcaccatgaaggagcgatctgatcatgttggtccaaaagacttatttgatcagcatcaaaagatagcctagcaggaatttttcagaattttaagtcaacataaaaatgacttttggtcgattaaaaattttgaggcaggactttttccgtcgttttttgagcgaagtgtgatcacgtgactcattctcgggaatgaatgagtcgatcaaaaatgtttttggtgcatgaaaagcgcatatattggagtaattaaaaacacataaactaaaaataatcagttcaatttttaagtctaaattttaatttctgcaaattttatcacgttgaggcaagactttttttcatcagtgtaataaaaatttgcatttctttttttctccttttggccaattttttttgtttattttgatacagaatgatgaacagtaagcattaacagcacaattatggcgaataaaagtatattcatgattttatttaaaaaaattttgcgaaacaaaagggtacccctttggttttttgataatattcaaaatctttcactttttttgttggttttttttgtcattcgtaccatctggtaaaaaagcaaattttgtaacaataaacaaaaaaaa

SEQ ID NO: 27226 - DNA, 543 bp, Heterodera glycines
tcgcgggaattgagtcattctcggtggtcttattaacgcattttcgggcacaagaaaggcacatgaaatgaaaagtttgcctgcagaacggccttgcgccttggcatcatcatcgccgtcgtctgttgctgcagctgcgcgtgttcagcgctgctgcacgcgaccgatgcggcggcggcgccggcggatgatgcaaaatgcagcacactgttccggcgatggtgagtcccagggacggtcccaggattttggcttggggggggcacctccccccgtgcgacgacctttttttttttttttgcttttcacacccgttttttatgtggcgcggtttttccaaaaaaaatttttgggggacagggggtccggcggtgccgataggcgccgccgggaaaatttttgcggttttaaatgcggtttgttaacagattttgtccaaaaaatgaccaaattttgtgattttgagccatttttagcagattttcattaaaaattttgcggattttttgaaaaatctagcgaacatttcttggaaaggggggg

SEQ ID NO: 27227 - DNA, 1329 bp, Heterodera glycines
atgtcctgatcgggccaatttttccttgtataacaaaaaaagacgttctgtggtgtagtaacattatttggtgctctcattttttggcgccgggatcttataaagtatctttgcataatgcacaatgcttaagtcctgatcaggccaattgttccttgtattaccaaacgaagacgttctgtggtgtagtaacattatttggtgctctcattttttggcgccggatcttataaagtatctttgcataatgcacaatgcttaagtcctgatcaggccaattgttccttgtattaccaaacgacgacgttctgtggtgtagtaacattatttggtgctctcattttttggcgccggatcttataaagtatctttgcataatgcacaatgcttaagtcctgatcaggccaattgttccttgtattaccaaacgaagacgttctgtggtgtagtaacattatttggtgctctcattttttggcgccggatcttataaagtatctttgcataatgcacaatgcttaagtcctgatcaggccaattgttccttgtattaccaaacgaagacgttctgtggtgtagtaacattatttggtgctctcattttttggcgccggatcttataaagtatctttgcataatgcacaatggttatgtcctgatcaggccaattgttccttgtattaccaaacgaagacgttctgtggtgtagtaacattatttggtgctctcattttttggcgccggatcttataaagtatctttgcataatgcacaatggttatgtcctaatcaggccaattgttccttgtattaccaaaacaagacgttctgtggtgtagtaacattatttggtgctctcattttttggcgccggatcttataaagtatctttgcataatgctcaatggttatgtcttgatcagcccaattcttcgaagtattatcaaaactaatcgttctgtggtttactagcactttgattatcatcaatatgtcgtttgttatgtcatatagtgttttttcgtcatacactatgcataatatctgatcattttttaatgtattttgtggagggaggtgtagcaaatcaaggaagtacccccagtgttaagcattttgttaagcgaatgtttaaagatttggtcgctggcagcacattgtatccgattaatataatgtaacggtcaacgggattatgtgaaaagaccttaagaaagttcatttatattcacctcatcaatttgtatcatctctttgctggattcaaaatcctgcgggacaagataccattgaaaatttattcaaaaaatctaattttcgagcgcccat

SEQ ID NO: 27228 - DNA, 178 bp, Heterodera glycines
atggcaattgtaaagaattgtggtccctaatttaacttttttattctggactcagattcagtttcctgtggttttcgagggtgctgattacgaatctgaactcggatttgcccaatttcgaaccccggacccgaattgaacaaaaagtagaaaaatttttttccaaaaaataagttaa

SEQ ID NO: 27229 - DNA, 1026 bp, Heterodera glycines
ggcttcaagatttgaaattaaaattttcgtcggatttaatttttttttttttttgatcgggagtgagaaagtttttattttaatttatttttttaaataattgtctagttaaaatttattatttttcgtgaccgaattaaattgtataattaaatttaaatatttttattgacattgagactattttcggttcgcccctactgagacattttcggttcgcccacactgagactattttcggttcgtctcaccacgtgaaccgattgtatttaaattagagcgaagcgggaccgggaattcattaaataaaacatatcactatttaaattattaataagaagaattcattgacttgtgatatgcgactctctcaaactaatgaagagagctttctttcccctaaagttgggattgaaaggagtgcaaagggcgccctgtgtagctcagtggttagagcattccacggaaaggaagggacgtgggttcgaatcccaccgcaggctgatcttttgcacttacgccatccgccaataataccacatggcgctcctgggtggattatcgcgtctgtgttcgcaaaatgaaaactaaaggcctaaattaactggcatgcgacactccccactcttacgtgccggcgtacgacggcatataaaagagaccggggaccggtcttctcaagggccggagatgtgatatgcgactctctcaaactaatgaagagagctttctttccccaaaagttgggattgaaagaaagtgcaaagggcgccctgtgtagctcagtggttagagcattccacggaaaaggaaagggactgtgggtttcgaattccccccgccgaggctgattcttttgccacttacgccgtcctgccgatgaataccccgtggccgcacctgggtggattatcgcgtctgtgtttcgcgtgaaatggaaaactgaaaggcctgaaattaactggcgtgcgaccctctcccctcttacgtgccggcgtacgacgggtgagaaaagagaccggggac

SEQ ID NO: 27230 - DNA, 1121 bp, Heterodera glycines
  unsure (1)..(1121): unsure at all n locations
aaataatttttaaaaaaaaatttatgtttaactataaaattntcattngatcaattaaaaataactacgtgccatttccggcgcctgacaccaatgctctaatgacaggccaaatttgccaaaattttattattaatattaatttatttttattagaaaataaaaaacctaattaaaaagatttataagaaagacatttaaaaaaatgtttcctcaattttctatacccttatcactgtgagcattgattgataaatgtttaaagtttgtacgacacatttgcgcctcggacatttgcgcccaaggcggaaatatacggaaattgaacatttttgttgcccgacttttgcgccaaactgtcccaaaaaagaattcaaaagtttttcgctataaatctctcaagaactttttcttgcgcttatgggtccgaatttcacttagggcttaacatattcctgatattcttatgacaaggaggaaatgtatcaaacaaaaatccaatttttgggcgttctgtcgcgatttgcgaaataatttgtatttcctccctccgcctagagaatggcaaatcaacctttttattagtttttgcggggtatcaatttaaatgttgatatttaattaaatcaactaacattatgccatcaacgcaaatatcaacgtaatttttaaaatttgcgaaaattttttaaaatttatatgagcggtttataattttagtgcgagagataacgcaaaaatgagagagtgctggatctcagtcccagtcatacaaaacatttttgatgaaggaggtagagaaaacaatttcaatagagagcgcaatgggaagggagttcatgtctcttcttcgctgattcttttggtaagagacgcagattcctcgctatgttctctattctctctctgtcttaaatctctttccataacactctctttttaattaatttttctttattctctttaccaaaaatgcttttgtatgactggggctgaatataacaccctctcacttttgcgttatctctctccccatcttattttccaccaaaaatcatttttgaaaaattgctttaaattttaaaaaattatccccaattttaaaaatagcgttgatatta

SEQ ID NO: 27231 - DNA, 1431 bp, Heterodera glycines
  unsure (1)..(1431): unsure at all n locations
tcgttctgcgtctttggtgcgatgctgtcgcagtaccgcttgcactccgcttcgcccaatttgccaatcaatagttggacttttgagtggtcgctgagtgcttgtccatcctgggcgatggtctgcccatagcgcttgagccaaacgtcgtatgtatgccctaactcagggtcatactcaaatgtcgaaaggcgcgcatcgattgatgtcgccagtgccgcagaatttttgacttgtccctccgatgccttcaaaacagcctccaaaatcagtttaagctgattggggtccatcaaatttgtttagccaaccggcttttgtcgaatttgtcaagccgactcggcttttgttgaattttgtcgagccgacctggcttttgaagaatgagcagttcatttgtctgctttttgacgaaatcgacgagccaacccggcttttaatgaattcgttgagccgactcggcttttgttgaattttgtcgagccgacccggctttttacgaacaagagcagtttattttgactgcttcttgaagaatggccgacccggctttaaaacatttcacagccactcccggcttttcggtggatttgttttgccgtctcggcttttagtcctgaaaacaaaattggaaacctttatctcacccgaagatgtagagcaggttctttgtttgtgactgtgccaaattgttgtgtatttactacaacaataaaaatgttggtttttaaccaaaacaaatgttgtcaaataataaataaattatttatttacaaataaatatgggaggaggacagcagagatgtgcgattaatattctaaaatattttgttatttttttaaaatcttattattggtcaattgatttttgcttgcgtcatcaatgcttttacaataatcttcatttgaaataagaaattaatgtccattaaaagaaaataaaaatttatgtgaagagaattgtataattattccctcctaaatgtacaattcaaaaatgttggcatttttatttgccatctccgctttattatttgtgcatactgtccgtacagcagccagcaaaaaatgtgatggtattcccatctcagagatgattatgttcaagtacaaatcggatttatcaaacaagaacatcgagataagaatggggtttaaaccagttttgcgaaacgaaacggaaaaggtaataagcttcaggggacatgcaaggtaatttgccggactcctctgctggtcgtggcacaaggtttatgtgctggtgcagtttggatggggaataaaatntacaaaaaaaaattttaaataaaatatttattaaatctctccgatgaaatttgcatttttaggaggggtaatttgtatattttttcgtgcttccgctccgcggtgaaaggtttttgcacctttttatatgaatatctatcttag

SEQ ID NO: 27232 - DNA, 1579 bp, Heterodera glycines
  unsure (1)..(1579): unsure at all n locations
gattggggggaaaaaggaataagccaaaattccgggccctggataaatggcctccccaaattagtaatccctggggcgcncactagatcgaatacgcgtacggggatgggcgagaaggagtaaaatatatgataaatattggccaatcacataaaataataattccgccgcgctttgctctcggctctcgctcgccaattaactgcccactcaactggctccttatcgagagaatgctcccgattaaatagtaggacttatggaacgaaaaatggaatggaagagagcggggatatgtgcttgggaaagagatattggattaaattcccataaaatttttcaaaattttacctataaattggctaattttcagtgaaaaactgtttataaatgatcaaaatttccaattttttccccggcggcgcctatcggcaccgccgcgcccccaaaactcctattttttcttagaaaatggcccaaaatcgcaaaatttggtaatttgatgaaaaactgttctcagcggcgcgccaaaactcttatttctcattagaaaaatgataaaaatcacaaaatttgatcattttttagtgaaaatctgtcaacaaattttaatcaaattttcaaaaattttcccggcgccgcctgccccctcttcccaaaaagttttgtttggaaaaagcgcgcctcaaaaaagcgttttattgatttttaaatttggaataaaattttaaaaaatgatttttgctttatgattttaactattaaaaagttgtagaaaaaatttcgcttttcgcatttcgcttttcgcattttcgcatattttggctattcgcatttcgctttttttttcatttcgcatttttcagtttcgcaaatttcgcttttcgcatttcgctttttatttttcaatttggcccatccctgatgtgtagttggggatttgcatggtcgaaaagaggcggagaacagggccaacacgaagatgatgccgatgaatactgtggcgagaaaaattcaaatttatttcgacacatccttgatgtgtatggccccagccctgaggagtgtgatgaaaaatgaaaaaagaaatttaatagaaaatatttgaattaaattttttcataattttttgttttatgtataaaaaagtttttatcaatttttggcccttaggtcctgtaccaaaagaacaagtttaaaatacagaaattcaatttgtgccctcttatgggcctccttttagttaacaaacatttgtttattttgctaaaaatttgtgccaaacccctcagagcattcttttggccttgccaatttgtcctcgctctttggcttaaaattttatgtgcataatgatttataataattttcaattaaaatttatttagaaagaaataaatttatacaacaacaaaaaaaatataataaaaattatttcacttaatttttagttcaaaaatatgttaggaccttaaagtggatgattaacggtcctaatgcttcaaaaaaacaaagtctttggacgcgagaagagacccaaggaaaatgaaatagaattgggaaattataaacacttcca

SEQ ID NO: 27233 - DNA, 905 bp, Heterodera glycines
taattttttataaattccaaatctcttcacaacacgatagcttatctaggtagcgaatctcaagaagcgcgaagcgctttatcccagtcccagatccgacggtccacgcacccgctagtttccttattattttagttaactatttcaaggttttccgacttatttggtttaaataatttttttctaaaatagtctctgtaaaatccgaaatctttgtatttccatctgtccaactgaataaattggcatgttgtaaatgttaataattttgtttaaattttgaactttatttaattgctaacatcattttataattttattttgcaattttagaatttattttgattttaatgatattataaaataactgaaatagttcttgcattaagtctataataatttcaatatgaacttctaattaaaaattaatttaatatgaagtgtttgaaaatgttttgcaaaatttgcttatttctcttattttctcacgagtaaatccgtgatttcgtctgattcatcaatattgttcataaaccacatagtaaggcatgttattatttttttcaattttatttttatatttaattattaaatttaaacctttgtattaattcaattaaaaaatttacagtaagaattatttattaatttttttttgaatattctttattatgtagtactttatttttattaaatgaatgcaaatttttaatttctataaaaatagcaaactgattatattatgttattaaatatattatatccgcaatatatgttattttaatattgtacattaatcaattaaatgaactataattagcactatttatatcaactttttaattattttttctttgaaaattttttattgtttaataaagaaagttaaattatttaaaatcaaa

SEQ ID NO: 27234 - DNA, 1559 bp, Heterodera glycines
aaagggaaaagggaataattcagggcccaaagtgcgcctgaatcgataattagctttgcaccatcgaatattacatataaattagccctatcaaatttcccttagggcctcagataatgactatctctttttcgaccacaatagtaccgatcaaagcgaaaatgagttaattcaggcagcaatgagcgcctgaatctctaaatatcttggcactttggaatgttgcatacaaattagccctcttaaattttccttcgggccccagaaaaaggctatctctttgtcggccacatcatgttccgatcgaagagaaaatggctcaatcgaggtgtcaaagaatgatctaatttccacaatcggggcgcaaatgttcagtcacctctcggggaagcttctttcttcttcttctctatctcactagggttgtctattttttatgagttattttttttaatattttcatataacaaattaaccaatcattcgccacatttttacaagcaaaatcaaaattgtaatgtgcgtgtaaattgatgcaacagcagcaggaaacggaaatgagtttggttgtccacgctttttgtcatttgaacatttatataaaaatgctgcaaagtgatgatgatttgtttattatatttattttttaattaaataaaatgaatttccaaatttgcttgcttctttctgtgcttctttcttatgcaatttgtggaaaaaatggcaatattttaatttaaaaattgtttattattcttttaaagcaaataaatttagacaaaaagaaggcaacagtcaacaatgataacaataaatctgtcccaacaatgacaaaggctttgcgaatattaacaaaaattttagccgcggtaattagtttcgtttaaaattaattttcatttttatttttattatagcaaagtgtcattggcttggctaacggttcctctaatcatccttgtcaatctacaaatgtagcagataaaaaagcgtgtcacaatgctttaaacctaattccgagtcaatgtaaattttgcataaaaaatttgcttaaattgagaattacatattcagacaaaaaaaaaattgctgaatgaaatcattatagatggaaaaagacaattttttagaaaaattatttttgtggtttttttgacaaaatttacctaatttatgagaaatatgtttttgatattatgagaattttttttagaaacttttctgtctttatgggtccaaggagctgctttaatagaagggccgttttaaaagagatttttttttaaatttacaattctgcagataaaatgtgcgcgaaatgtctaatatctacaaatatgcaaacaatgcatataaaaatccaacccaagcaaaaaaaattttttcgtgccttttaaactgtatccaatgcagaaaaattgcatgagtaattccaaaacctacaattactctttatatatatatatatatatatataaaaaaatatttttaagctaactttcgaacaatttattctattcactatgaataaaaaaatgccaaaattgatgaattttttt

SEQ ID NO: 27235 - DNA, 658 bp, Heterodera glycines
  unsure (1)..(658): unsure at all n locations
aattttggtacgattttattgcttattgaagagctagagcccgaagaaaattttttaattcaagcctaaactttttggcatgtttaaaaagcaaattaaaaattttattcatctccctttttgatagtaaaagcatcagagagccttatttaacttgtaaataacttggttgcgtttaagagcactttctgaaaaaatatttatgaattaattttgcaaaaaataataaacagtgaaaaactcagaatttctaaaaaaatttaaaaccaattacaattgtcattttttcaggttaagttagtcctgtaccggggagtatgcctataaaatttggtacgattttattgcttattgaaagagctagagccgaagaaaatttttttaacttaagcctaaactttttggcatgtttaaaaagcaaattaaaaatttattcatctccctttttgatagtaaaagcatcagagagccttatttaacttgtaaataactttggtgcgtttcagagcactttctgtaaaaatatttatgaattaatttttcaaaaaataaataaacagttaaaaactcagaatttctaaaaaaatttaaaatcaattacaattgtaattttttcaggttaagntagtcctgtaccggggagtatgcctataaaatt

SEQ ID NO: 27236 - DNA, 1313 bp, Heterodera glycines
gaaaactaaaaataaggtttgactccgctttagatgtcaatgaccgggtcccattcatttttgggcttttttcagtttagcgtcaagtcaatcactcactatgcactacgccagtcaccaattttaggtattagaatggaaaaagcaaatgagactaatgaataggaggaggagaaaactatgacattaattaaagtgagtaattaaacataattagtgaccataaattaactaatgaggaggacgaaatttgagcccggacttttgaaaaattatgagtcacaggatcaggattaatgaattagagccagaaaagatgtttctggataaaaaatcctgttttcgagactgactcctgatccgggtcaaattttcaaatatatccgaattagtattaggagtcctcaaaaccctgacaggaagaaatggccctgatcagtggtatatagtcgaatattcactttaatatttaaattttattttcttttaattctttcacaaccgaagaacgctttcccaaaaccttcgttttaacgcccctatccgaccctagaaatccctattttggatgttcgcccctaaaaatccctattttgagtgttcgcctctaaaataagtttttatccctattttggcgtttcacccctattttcgcccttatttcgcgatttttgggaaatttatttagtgagcgaggcttttggaaggacgaaatgcgaaaagtatgcaggtgaaaacagccctcggcaaagcattgcttttgcggccgaatttggacatgttgggcctcgtggttgaacacattgactaaagggagagagggcgaatagacggacggaaagcattcatttgatcactgatcagaggctaatgaatgctaatgagttttgagtcatgttcaaaactcgtacagaatagccgagacgtctcctcaaagattggtggattgaatcgggcctgttcaaaaagtcaaataaatttagaaaattcataattaattatttataatttaagcaaataaagcttagaattggactcggatcctatcagaattttcacaggattctacttcttactcagctttttttgaaaagtgcaccaagattaggtagggtccagaaaaaaaattcgagaaaggcaaccgaagagctttttttgcatctccagtgttattgttttattttttcagcccaggggcgaaaaagcaggattttgtaggggtcaaattttcaaaaaattattgtttcaataggttttggcgggtgccgacatgaagcgtcgggaaaaatttttttgaattttaattgaatatg

SEQ ID NO: 27237 - DNA, 1153 bp, Heterodera glycines
  unsure (1)..(1153): unsure at all n locations
gagttcgctgctgagaggacgccccgnagggtggtttaccacctccagtagaaagacagagaaagcgaaacgagagaaagaaaagggtctttctttctctggctaaactctttcacttttttgtttctttgtcctccctctttatttgtgcacaaaccaaaggcagagaaggagagaaagaaggaagaaagaagagataaatggcaacaaaaagtggcaaaaaaatatatagaaaagaagaaggagtggagagagaaagggaaaaagatggaaagaaagaaagaaaaaaagaaaggaggaagagagagagaagagcagaaagagaaggcgaggaaagtcaaaagaagatggggaggggggcatttcacaatgggaagggagggggaagagcttaggcagctattttctgtgggaaatggccgccattcgcttgagttaattaggcccgggtgggtccttttccaaaatggctaaaaagggagctaatcatcggaattcctttaggaagaccaaaaatactttggccaaattttgttaatttcatttttcattcaaaaatgatttgtggtcttttaatagaaaaagatgataaaatgcatacagtcaattttggagtgcattaagtgcgatgcgttgtgatcatttcgcattttgtttcgacactccccccccccctttttttgccccttttgtgcaatttctttcgctgctttttttatattggcctttctttggagtgttaaggccaaaaagtaaaatggtgcaatgaaagcaaaagaagaagaagaagaaagggtttttggggagtttttttgggccatgggagagcaaagaatgaaaaaattgggtggtagggagggagaaatgatcagtttgagtcccgagggatcattaatcactttagatagacagcccgaggcaacgacgacgcttaatggccccgggggacactgatgaagttttattgggacgaaacaaaaacctgtccatttttatcatttaagttatctcttatgtttaaaaataaataaaaaaagaagaaaaaaagggggagatcgaaatgngctattgngaggacagagaaataggcaacaaaaaaatgaaagaattgaaaatggacggggagatgggtataaatgagaagaaaaaatgc

SEQ ID NO: 27238 - DNA, 1360 bp, Heterodera glycines
aaacctggttagaaaaaagggtcactcccaagccaaaatctcgggaccgtccctgttcaacataataaaaaactaattttctgacccgtgtaaagcactgccattgcgttgtctccattcaattcactcaaatcatccgcataaatgaagttgagcatcactttgaacacatgcgcatcgatgtcagtgacttctacgggacccttcgcttcaaattaaatttttttttttaaatataaaattttttgttgttttttcacaccttctccacccgctgattcattgtcagtcgcattttttgtggtgtcaaaacggaacatcgcttcaaaaacgtccgaagccgaattcagaatcgctctgtgcgcgggcacatgcttaaagaaaacaatattaaattaaaattattaaatttgtaacaatttccccttaaaactcgcctcctttccctctccttcccccaccaaaaagagaacgtccgcgtcatcgcccgagctcaacaaatgcttcatccgctccaccaaagtttcgggttttgacgacatttgacaaaaaacaaatttctgttaaatatgaattttagaaaaaaaggaatatattatccatttcatccatccgttcatttagtgaaggttaagggtgccgcggtagcagtacgcgaatcgcgcattaaaaaaagcataggaattttttatccaattttcacagattttagacgacgttagaggatttctgatctggtaatactgcagatggtccccacccctttttggaaaaaaaggttttgaaaacatgttattggagttttagggacgttgatctcgaaaatgccattcattttgaccaatttagaatgccagacaagaactcgaaagtagaaaattccaaattttgaaaattcacaacgttcgtaccaatgcatagagctctgaaattccattttaatgtattttcgcgtttgctgagaacaggagcttacacaattagtggctcgcaaatttggaagcaaaaagaaacaaaacaaaaataatagacagtaaaacataacgccacaatggatttaaaaaaaaacaaataagctgtcctgctgcgctcctgccctgtcctgaactgtaactgtgagaccgattatttaattccaagggctgtcaagtcaagtgtccttatttctctagcatttgtccttattttgttaatatttagtaaatgaaaatatctcaaattttcttaattggttttttaaagattaaattagccatttttttgctgcaaaatgaaagtggtcgcgctggtgtcgggcggcaaggacagctgcttcaacatgatgcgatgtgcggaggaagggcaggtggtctgtgtggcc

SEQ ID NO: 27239 - DNA, 1227 bp, Heterodera glycines
acagcgacaatgccatcggtcatatctgcagtggcggcggcggcggtggcatcatctgctgctgcttttgccgatgttcagccacaacaaccgttttctggtagtcggttttggcaatgggaattaattagttaatttattagactaattagcaagacggttaattaattagcgatggaaagtattactaaacttatgtagaaaaaaatctttccaatcacgtaataagccctttctccgatcagtttccggcaccaccccttcggtccctatcggcgctgcgattagcggcggcaccggcgccgcagtcgcttcgtccgcctccggtgccggcggcgcccttttgtcgtcgtcaaaaatgcttggctccgctggcggcgccgcgtcggcggtggcgtcgcgccaccgacgcatcaccacggagcggtcgctcttgccgctgtccacggacattgcaaagaaccgcgagttctaccgtacccacgacgtgcgccctccctacacatacgcctccctgatacggtaggtgattacggtgggagtcaaaaaggtttccgtaaattgcgtttggctctgatcaggatcagcagcagatttaatgaaacaatttgccgggttaaatcagaggcccctggtcgggttagacacaaagttcaactttttggaaaatgcgggatttgcgtgattttgcgggattggtccctgcgggatcccgtcccgcaataaatttgagttccaatcccgcagtgggacccgcaaaatttgaaatttcctggctctaactgtcagatcagacgaaaattcacccaaaattccccttttttaaatttttgtccataatattaaccgcttcaaccagccaattggatttccatcatttgtttgctttttgtttcaggcaggccatcaccgagtccaaagagtgtcagctgacgctcaacgaaatttaccaatggttcaccgacacttttgtgtactttcggcgcaacgcggccacgtggaaaaacgccgtacggcacaatctgtcgctgcacaaatgtaaacaaaaacgaatgaatgatgtgccatttttggggctctttgttctccccgagtgtttaatcattcccgaaattcgcttcccgaattataggaaactgtagaaattatttccccttactcgataaatttttgtcataattcttcacgcgttcattcccgacaattatgtagccccaaataaatcgt

SEQ ID NO: 27240 - DNA, 1444 bp, Heterodera glycines
gaagagagaaggtcgaaagaagggagggagaaaagggagtcggcggcaaaacaaaaagaagtaaagcggaagatcccccggggtcctgcaaaaggaaaacaaaaggaaagggaaagaccccctggggcccgtggggtctcttcggcaagtccccccccccccccgctgcttctgtccgtggtcattttcctcgttcataatttgctgattgtgagtcacctatttctttatttctcattctccgattctcgttcgtcccatcagagaatttcaaattcttcccaaattcgtttttcacttccacctaccctttcttccccctttttccatcacttcacttccgtccgtcgtttcttttccgatcaatacaaaaattcaaccgcaattgaagacaatgataatctccccaaaatccatttttaaatgtcgaatgtttgccttttggacaaatgaaaacagaaaaaacccactccaatgagaaagagacggaacgacggaagggaattgggaaaaagtaggaaaaatgggacggacaattcattcgctgattatcctttgcattttcgctggaggggaagcagaaaaataggaaaagaaaaagggacaaagagaaagggaagagaaatacagcagagaaagagacaaattatttattcaaaaggaaaaacaaacggagaaaaagtaagaaatttcataattaataaataatattaccattgatcaccagtgatcactcgtcgttctgtttcgatcattcgatatgtccccccatttcgttcgtcggtccatctcactaaatttttttttgtttgaaatgggggaggggataacattattaccaaaaaatctttggatcccaattttcgggccatgggttggcccagtcgttctcgtccaactcctcgccctgttcctccccctccgcttggggaggcggcggtggcggcgcgtgaatggctgcatagattttcattttttggaatatacaaacaaaactaactgttttgcaaatgttgaatgcgcgcatccatccaattttgaagaccccgctcaaatacgggctcatcagggaacggaggtccaattaagacaaaaaagaaaaggacgagcaacaaaacatcgattagtgagggcatttgtgcggaaaagttttgctgaattgggaggggggggggcaagataaattgacgaaattatgacaaaatgaagaaaaacggactttcaaaatgttcaaaaataaaaatgctgttttttacgattattcgttctactcgggggttgccggggccgctgatcacgaatatgacatcagaattgtcatatgacatcatctaatctatgatttttcgtcaagttttttttcattttttaaatttatagtcataaaattgttttatgaggttatcggggtcgttaatcattaatatgtcatccatttcgacca

SEQ ID NO: 27241 - DNA, 835 bp, Heterodera glycines
attagccaaaagggggggggggcacaatcaatcccgccataagaaaacaatcatttgactgcttgccgaatgatgaatgaccaataatggacaccctcccctcccctcctcctccaccccctttccttccctttttctgaccgcacctgtccaagtgcccagaatcattgctcctctttttgtgccaatggtcgtcccccgcccgggcacatccgccgcagctgtgcaacccaattagccacggggggggggtaacagaaggagtgattggacgaatgaatgattgtgctgtgttatgggtgtttggcagaatccgattacattgttagcagtgccattatccccgttaatccgttcgtcaaacattcgaattgaaaatgctttttatttattctttggcgctgggccgcccgaggcacaaataaataagcaaagccccgccctgggcattggccattcgttttgatttgcgcttttattctcatcgtctttttactattttctaattcatttatagcaaaatgcggcccatttttcggcatttcgcttcagttgcggcatttttattcgccatgcttaatcaggtgattatttaataaggcggaaaggaataattatgcctaaatgaattttattttttatgcgcttggatggttcaaatccaaatgatatttggccctttcttaaatattgccatttccgacaaaaaaccgtaacttttcttagaagaaataaattaaaacatttttggcattatttattagctaaattttttaaatgtgtttacaaattcaaaaaatgaaattatttccgctaattgcgtataatttaattt

SEQ ID NO: 27242 - DNA, 1613 bp, Heterodera glycines
tttatttattataagttaatttaacatttcaataatttaaaaaattattaatacaacaaacttattgataaaaaagcatatgaaaaagtcagattttttccctttttttttgtaagtcgcccaaattttcattttttgtgaatcgaccaaccacgaactgatctaatagctttaatagttggactttaaaaggggcggtgctagataggcaaatattcaaatatttgcaaatccctctcttgggctatttgaccccgttattggtttgtgccccttttaaatattcccttcttcgcttgctttgtccacttcctatttgtgcccctctattttctgctacgtaccagggatggcacggaattccgatttccgacatttttggggtcggaattccgatttccaaaaattttttgacccccggaattccgatttccgaaaatttttggggccccggcatgtcatccctgctacgtacctctgacaaataattgtttttatttccatttattttcgataattactattactgttcgacttatacattgtttgagcaccacaaccggctgaacatatgtatttaagagcacgttggatccaggaaaaatgtatttaaatgaaatttagatccctagtcattaaataatgcattttctgttgttgcattgatacatttcttggagtaggaaggatgtgagaaaggatccaagattaaacggcatttatatttttctattttcaaatccatttcaaaaatgaatggaaacagattaccgaagaggaaaaagatggttgctgcttcttttcccgttttggtggtacataaaatccgatcggtgtttgaccactactgttgccgatgtttgcggatgattgatccgccgataactgaatgtgaaggaaaagctaaaaactcggaattttgagtaaaaactcatgtttcggaagcaggtttttcagaaatttctattacgcgcactacctttgattttcctttcttttttcgcgcagttgtcgcactcgcttctggcgaatttatgctagaatcataaagattactttcacaatatataaatttaaagtaatttattttatttccattaaaattacatattaaattgttgctgtgtgttcaaaaattctacttgcagtgaatttccagaaaacaccttaaaacaaaaataaattaataatttaaacgcagggacggggaggctatttatgcaaaagactgagtggtcaaagaagggatggggcataacaaataaatgggacggaatgccaacataataaataaatcaaataatcaggcccatcccgaacacctcccccttaaaagagtgggttcttatcatccgggcgtatatcggtcaggcggacgccgatttcgcttggatctttcgtgctgaacaatcggctgaccggcgcgttcttcgatgatttcgtttggtggctgtggctgtcgaaccaaaagttggttcgcatggaatcgtccaattgatcccgtcctgaaaagtgacgtcgtacatcacacctttttttctgggtgatgtgcccgggtcgccatcctgcgacagtcgatgtcgggcgtagacatatcgtctaagtcgaacgat

SEQ ID NO: 27243 - DNA, 710 bp, Heterodera glycines
ttcataacaaatcgaagggttgatcaattttacaggaataaagccttaaaaatagagaaaaatcaggagaattttatgggatttatttgggttttctaacatcaatatgaaaaaagttattccagaaattctggaaattttagatttttcagaaaaaaattcctaattcccttctgaaaagtgattctggaaatgtttaatactacaaaaatccgcaattttttgctctattatataaattttatttggcatttttatcacttttttgagagatgttacaaaaataaaagtgattttgggattcgggaccaaaggggtgagcatacgatttttgagtgaaaaagttttttcgtcaaaaatcgtcaaaaaatatgtctttaggggttatttgggccgctgatcacgaatacgtgatcagatttcaattatgacatcgttaagccctcagaatccccgtgtgagtggggattctgaggcatcatttgaggggggaggagggggggggggggaaagttcgaatccgggcggtgtaacattatttttctctgcatttttacgttgcttctcctattcactttaagtacctgtattttactgttgtacctcttctgatcacttatggaccgcttttaatcacttttacacctcaactaatcacttgtacctctcctaagggcgaagggcccgtctatgccaacaaaatttaaaaa

SEQ ID NO: 27244 - DNA, 1483 bp, Heterodera glycines
  unsure (1)..(1483): unsure at all n locations
ctaccnntttttggaggcaaaaatttacattattttgacaaaaaagagcgcttttaatcgaaatgggttaagtgagtctgaaaattgttaaggacgggttaactaactgtgcaatttctgagttcatcagctgaagcattcactttcattttcttttctgtcgtttttttctaaatcattttccattttcggtttctcttttctgtcattttttattttctttattttccattatttataaaacatttgcaaaaattgattttgaattcttttccttgaaaagaaaaagctaattttatagcaacaacttgtaaagcaagactcgaatttgaatagtgttgtttctttcgcttgactacaacactttaaagaataaactttaataaataaaataagtccgcaagaaacgaataaaatataataaataaaaaatagatgacagagaataaatggaaacggaagaaaagaagcaaatgacatggtccgacaacgtaccaggtgttttcgacagtgattggtttcgacagtactttttaattaatttctacataaattattgtatacatgaattagtattaatatataatttgcatatacaaaatttataattgaaggaagtaataaaaaaagatttgtataggattttttgtcaaaatttatcgttttcactttttctatataaatatctcctgattgactgtagtcaaaaatacaaaaatttacttacaaatcatgtgcgaacatctgctaactaatgtcaggtttgagtgccaaaatttaataatacttataccattagaacatttaaaaaaataaactttactgtcgaaaccaacactgtcgaaaactaacagcaccactgacaaagtttgtgtgttcggtagggctgtgcgagagtctcgattcccgactcgggaaatttctcaggtttttcgcttctcggtcttgggtttttagtctcggaaacccagaaatttttacactgttaaggatggtcattgcggggaaggggtcgccagcgaagggagaaaagaggaaaaattattgaaattttggacaagtttcttaataaagttcattaaaatcgcaaaaaaatttcccgttggcgcctatcggcgccgccaggccacaaaattcccctaagtttcaaaatgtaaagtaaaaaactagaaaatagttgtgctaactcaaaaacaagcttagtttcccggctggattttgcacatcatttcccgcactttttcagcctgaaaaagggcaagcgcgcccctaattctattttttcaaacccattcaaacctttttacatcgattcagaccgtttttaagcatttttgagtttggggcctatgatcaatattctttattagcttgcaaaatttcaaaaaattatattaggttttaaaaaagatatggcgcgctgcgccaaaatggccaggaaaagtcaattttttgaggttttttggccaataacttttttgtt

SEQ ID NO: 27245 - DNA, 839 bp, Heterodera glycines
atatttgttacttttttggatttgatttttttgatttaatttttaaataaaaattttcaatgagtgtattttttaatgagacatagttgtaattagatataaaaaaaattgacatataaaataaaagacatgtttaaattatttttaatgtgcactatgcgaaataattaattaataattttaatccttcttccttataaataatacacgtattagtaaagttattttgcagctaattaatagtaattactaattagctaacaaaaaaatgtgtgggagagaaagagagaaaagccaatcggcggatggtgaacagaaaaagcgcagcaaacccaccaagacgtcggacgacaaccaaaactctgtgtgatactctcgaaaaagatgaagcatgaggaagacggacgcataagcgaagccattctcgaccgaccaaaccggttgctcacttttgcatttgcatcggtgaaaagcaaccccgaggggtcagccccagcagcaaagttggtggagcagtcgaaaagggatggcgaggaggacgagattagatttttgaacaaccgaactcattcagaatcagtcatggtgagggggctgctggggaatttaagaggattttagatttaaatttaaaaacaattaaaaattaatttgatagatggattgaaaaattaggattttatgaaaatgatcttgattaattttatgcttttttaaaaaaacccacaatttttttcattcgttttcagcatatcattaattattaggtgaaaattagaaaattattaatagcaaatttttatgtaagaaagtaattgggtccaaagtgtcaataagaa

SEQ ID NO: 27246 - DNA, 1273 bp, Heterodera glycines
  unsure (1)..(1273): unsure at all n locations
catactttcttggtattaaacaaaagctttaagtctcgagaatttgtaaatacaagaaaagagcaaatactggcattaagaaaaaaacttacaatgagaaaagacgaattttagtttttttgcattgagcccagatttaattaggtatgcgaaacttctatacttcaatagacttaaatcttaaatcttttgtttaataacaaaaaactttggcattgacgaagaaagaaaaaagttggacattgattggaagcatacactgcaattaacccatttttgtatctcaattaaatttgcatttggcatatggttgagttgcaagtgtattgttttatctttatttaaaaaaacacagttttagccatacttagtacataatattcatttcatttaaaatgaaacgttatcgtgcagtggatgttccgccaaaatttcgccgaacagcgaagggccgtaacacacgcctgggtgattccgtctacttcagcaggttttttatcagtaaatgatcaattcaaagtctcaacaagaatggcacaaaaatgtcggagcacagttttctctgtcaaatcttcaatttatcaacctttttgaccaacccgtattcttttcgctgacaagggaggggcgagaattgtaacaagaaaaacgcattgtgtcatatataaataccattgaatagagcacagagtcaatgggtagaaaacaccatcaaaaatgcatcacctaccaagaaaagtggtatcaaaaaatgggaggccttccaaagcaaagcaatacatcagctgctaatttaaaagctattctcgagttctttataatggcattttatgaatccaaccaaattaaacgtttacaaaataaaagtggtacaaaacacccacggatttggactcataaaatgtaatgcaacacaatttttggttggaaatgggcggaattaagcaacatagagtaactccatttttaacaacanatatttttcanattttttancncctacaacttattctacctnaaattctttttnatgtggntntnttccattncnctcnacttcctcatcnntttccnttttnaactnctttgccctntttnnctncttntccnccatctctacaaatcctttcntnttcacncnttttcctcctcncttcattattccntnantttatttatatgtccaatcaaagtcnacggttcaaaattcattaaacttttcggttcttagggaagcgaaaattcaaatttcgaaatttattttatgtttaaa

SEQ ID NO: 27247 - DNA, 966 bp, Heterodera glycines
agtgcatggcacacctggctgggcaccagtgtagaaagaatatggtggaaaatatgtatatcaatgagattataccatttactaatctctagaaaaattcaggcataactaaaaaagtcggggatttatttaatttcaaaattttcaatatttttaatcggtaaaaatctaaaattattcaacaaaaaattcattatcgactgtaaattttcaaattaataaaatttgattgtcatattctgcaaaaaattgtaaacataaaaaaatcttctataataaaaaaacttacaataatcaaactgaataagttattatggtattgcaaataatttaaaatgaccaaaaattattagtaaaaattgcataagatcttaataaataaaaatgagtttcaaaaataaaaaattttgcttacagaacaaagacagtgaggaaaatgttaaaaaaaaataaaattaatgcaaaatttgttttatcaacatgaactactcccggaaaaaaatgaattattaaacggtgcctaatggcacatcagtgcaacaaaaggctatttaaagtaatttttaaaaattttaaataaaaaaaaaacttagttttcctaatttttcattgaaaagatattgtgtgtattataaatttgccccactgagtgagttcatttcaaattattggcatcatcactttttaatgcctgctcatctctgctggtgatgaagaaaagaggtcatcccttttccaaaggcaaatcacaaagtctctatttaaaataatgaaaatcgtggaattaattatcattatgtataattatgggttaattatttcattatttacattaattatcattatacataattatgggttaattatttcattatttacaatctgtttttttacattattggatgtgatgatgtccatctgatttttcgtaatcagaattatttttcagactttagactattgaat

SEQ ID NO: 27248 - DNA, 1101 bp, Heterodera glycines
tttttcccacccagaaatggtctcggtttttcaacccgaaaattcccggtcccgctcagttctactttcaaaaattggattacgaaaccttatatatttataggcaaatagacatttgtttcaaaattattattaattgtgccgaagataccaatttttccttctaactactatcagttcttaaaaatttacaagattcttagcttttcatctttttttctcttagatataacaataaaaattttacaaaaaaaaaatatttttttttttgggaaaacgcaaattaccgcctttctcgttcgcatttagaacgacgataactgctagtggaggggggggggggctgccgaaaccaatttcatacaaatgtccaaattccctccgcgaaattttgaagaatttgttgtgacttgttaacagattttcatcaaaatagcccgtctccggtctctatcagaggtcatttttaattcagacttcctaggttttggaactcgacttttaactttttggggttttcgtatcccctaccttagacttccaaaacgttgtgcaaaaattcaggttccttttcgttaaaatgtgatttgtacatggcgctaaaaaccccgaattaattcagtctcggttgtactactctcagagttttgcgcagaccagattaaaataaaatgcatattgtagatgtcgaaacttgcctatcattttttttggtttttgaaccttatttattttcaatgaattcccacggaaaacgaaccaatttcaagccaaaacttttcaagctctattaattggtaatatttttagaaaaaattattgatttttccggaaattaaatttttggcctagatggacatttcaattccagcttttaactcgttagggcttgatttagcaaaaaatcgtatcttagttgggtcagctcggcgaaaacattgatggcaccgaatgataccaaactgttaattggtttgagaaaagttgatactagagtagagcgggaccgggaattttgggcaaaaccgggaccgggacttgccgggacctgagaagccgggaccgggacctcggtttttgtccgggactgggaaccgggac

SEQ ID NO: 27249 - DNA, 1847 bp, Heterodera glycines
aaaagaaaaaagcttacaacaccttcgattcccaggacgtctccgttccaagtactaagaaggcccaacgttgcttaacttgccagatcggacgggatggcgtgctttcaacgtggtatggtcgtaagcgaaagggatccaattgaaaacaattaaatagtccatttttaatgcattttttctctttggttaacttaatcaaaataaggattgttaaagaatttagaattcacttaaatgaggtaaaaataaaaaagaaaaattcgacagttttttcaaaataaaagagcaaaaatcggaattttgaattatttttttaactaatttcccaactgcaaatcggcagaggaattgaaaatgagttatataaattttgcgattcatcacaaattctcataaaagtcatatatataaagggatgtgctccgaaattaagacacttaatcggaatttgcattatccctgaaagaagaggcaaaagaactgcccgattccttaaaaaatgatccaatcaaaacttcttctaaactggtcgaagctttgatcttgctttaagagctcataagctaattgcaaatctgttgcaacaaaaaagccagagaaggggaggggacagacgcgattttggcaaatcaataaaaataatgaaatattattaaaaacatttttattaaaaagaataattattatattattacaaaaagacaacaaaaaggaaacaaaaagtgcttatagaaagaaagccattgaaaaccataaaaaagcattgacagttcaattaaacacaaagatacaaatacaattttactttggtttgttttcattaatttttccctccctttaaatttatatttttcgatcttttgtcatttcgctcatcttttcttcaaattgctcccgtaatgactttattcggctttcatttgttccaaaatgcccttccctttcttcaaattcgctttttcccttttctccatttgttttggtgcccttaattatttgcttaaaaccctcaggaatgttcatttggtcaacaatttcttcaattttttgcccaaatgttggcttctcattttccaattccttctcatttagcaatttcaattcaaacgaatttttgaataaattttccaatttattttcgtttttttcgccgtttttcgtgccgaaataaaaggcccaaatttggcacaaactgtccaaaacatcgacaattgttgcagcctttttcgagttggcaatttgaaaatttggccttaccgcggcaatttgttgcgccaattcggggtcagaaactttaatttttaaattttttaataattaaattatttttcaaatttcataccttcaatgtacacattgaacaaatgtttatacaaaattgtcaaatatttcttaaatcgttcacattctttctgccgtttttcctgctcaatttcgtcgcattgccatttatctctcatcattgacacagcgccaaaataagcgctgtatttttgtgccaaatattctacagtacctccaatatcgtacacaccattgcccctacgttgtgcgaccaattcaatgttttttagaagcttttgtgtctctaattttttacacaattgctcaaattccgttcgatctttcaaaaatgtgagaagcatgacgtcatcaagctgaattcggtcaaaaatttaaaaaaattatactaattagttcgtacataactgccaaataaaaaataatgccataaatttttgggcttttgagctttaactctcaattatttggttaacttgtaatgaaaatagacagttttttttacgataacggcagaagatattatataatatgactctaga

SEQ ID NO: 27250 - DNA, 1613 bp, Heterodera glycines
  unsure (1)..(1613): unsure at all n locations
ctgcannggtcatttggcnntcgggnncgttctgtcaaaanntcgcccgtgaaaatcacaaaatgaagtttttgattggattgcccaaaccttaaatccttaaccaatgaaaatacacaaattaaaaatcggaatattctattttaatgtgataatataaaataaatttaaaattcacaaccgcgcaaacttaaagtaactaaatatgatttgaaaaataagcttttgtgattaactttttctgcagtgcgttgattgccaaccacaaaacacgttctccgcctccgctcgcgtcacaaaacgggtgaaaaaaggcaaaactgccagagaccctaaaatagaattttagaaagccgaaaaaggtgtttttaggaaaaaatggccaaaccaaataatttaaataaattttaaaaatccaacaaaatcaaaatgattaaccagcccctcaaaataaagacaattagaaataggggtattttaaatttttagattggtcactccaaataagcacaaatcttacagagaataagtacatttgcgagtcccgatttgactggttttatacattaatgcgaaattcgtgaaatttggtttttcgatagttcaaattcagttccgggaaaacattttaaaagaaaagagaacggaccgccttcggttaaagtataatcgggaaacagcgacgacaatcagaaagggaaacagagggagaaggacaaaggacagaaggaccaatggcattgattcgaatgctgtaaaattaaattattttggtaaggccaggaaaactctattccaatttagtcgtccatcacttttagtttttttagggatgaatttttgagaatttttctattaggggtttttttccatttttattgctggacacacactgtgcaaaaaaccattgcttggaaaaaggtttcctcatcgtgatctttctaaaatccagtatgcaatttggttggcaaaaaccttcaaaaataattttcattttttaatttttgatttggacaaaaaaaatacattaatgtcgtggagcggactcgaacctccactgagcaatcatgaagaatgggggatttctattttgtttattttcgagttaaaaccagtttttgggcgatttctggttgtcgcaaaatgtaaaagtattgaaatcctagcgatcaacagttcctaattgtgatacagaaaaaattgacagacgaaacaaatgagctgtttctaaatttagaaaatgcatagcattatgttttttaatagattctttacacagcgtccgggaaatgagctgctgtaccagaaaagatttgcatgtgtggctcagtggtttttgtaagatagtaaagggacaaagggtggtggttcgagtccgatgtgcaacatgaatattttcatttatttttgtccaaaataataaaaaatcacgatatttgggaattatttttgaaggtttttgccaaccaaattggataatcttggtatctttcgaaagctcttgataatgagaagctttttctaagcaaatgctaagcgatttggtgtaccagagaaaagttatgaggctttaaattttgtttttcttataacttttgaaatagagcattaac

SEQ ID NO: 27251 - DNA, 1314 bp, Heterodera glycines
  unsure (1)..(1314): unsure at all n locations
aaaaaaaaaattttttgatttcgctgttttgncgctaatttcaanaatgatgaaaagtgctttttgtgttgtctgcttttntatcgccacatacagtatggacaanagtataataatagtaatcaaacagtatcacagatttttttttaatcgagataaggttattttaggggttacagggtcggagaatacgattcagatatccatttcgacncaattccgaacccctgacgaacaaaaatcgaaaattcaaattttcatattcgcatttttggtctaaaactggtttaaattttttattgaaacatagatgaataatttagtttgtttcctcacatttaaaccatttcagaccaaaaatgcgaaactctaaaaatttgaaatttcgactttttgttcgaaatcgggtccatggttaggatttgggtcgaaaggatatcagaatcggattcgccgatcctaaaaacccataaaatgactttaatctctagaaaacaatttctttttttcgaaagggggggggaaccattggcactattaccgggctctggctggttaaaagtatatacagtaatcaaattctgctagtctaattttggtcgaacacttctaaaatgaaaaatgtttttaaaatacctaaatgataattgtaagcaatttgacgcatatgaaaaaagggatacttacgtaaatttatttcagtggtataaaacaaagttggaaaatattgatcataggccccaaactcaaaaatgcttaaaaacggtcagaatcgatgtaaaaaggttcgaaatgggttggaaaaatagaattaggggcgcgcttgccctttttcaggctgaaaaagtgccggaattggagtgccaaactcagctgggactcaagtgaccgcactataaaaagcactcaaaagacattttaaataatctttctatggtaattttttttcgctgatcacgaatatgacctttattttgcaaaattccaaaccccgaacccaaattcgaacaaaaacttaaaatttttaaattaaacgaaaacatattatagggggttttgaggttgctgaacacggttatgacatccattttgaccaaattcgaaccccgaaccctaattatgagcatgttggtcctcaaaatcattaaaactattttaaactagcagtcagaaaatggtaaaagaacgtcaaatataaaagattgactttagcttattacgctaaaaaaccgccgcacactcgactacgcgcaagntaaaaggtgggnccgagactacgggcctacggaagaagtccgcgcgtgatccgcaggc

SEQ ID NO: 27252 - DNA, 1075 bp, Heterodera glycines
cattttgctcaattacacttcatgcatcgaagcaaaaatagcatattcgcttggttttatttatgaaatttatattaaattaaatattttttgctgtttcggccatttcgaattgtttagtgccaattttcttttatatttttagactgccgaaagccgttcctttggcattctgttttcccacaaaaaatattgccaaattcgactttggatggtcatcattttccttttcgttaccgttttccatccgtgccatgccccgtgggcaacaaaagtgccgaattaatttgtgtcgatggaggaaaatggcgagccatcggatgccaagaagaaggagatgagaatgaaaattatggtaaaaccgtaaaacattaataatcattaatttgttattacattagcaaaaattttaattttcgcacatttaaaaaataataatatttaaattaaaaaataattctaatcactttttttgacggaatgccttctcgcccgtgtgttgtgccccgcatcagaaatggcctcgtgctcgatttgaatcgtaagcttggcattttgcgcttccgttgcaatttcgggttggcatttcatatgttctttcttcttttagctaatttttttaaaatataatcatttttagttttgctccattggaagtacatcagtcaatttgcaaatcgacgtcaggcgaatggatcccgaagccaaaatgtgttggtaatgtgtataattgtcaatttaattccaataattatttttaattttagcgattcgttgtgccttccctccgcgcattgcgtcgccaaatttggccaatttccctccgtctgatcgtttcgtgtcggcaattctttctgcttcaatccccaataattcggacatttccttcggcactttggtggcatatgaatgtgccaatgggacggtgccgaggggaggacaaagtgtggcacaatgcgcagcgaatggccaatggacaaaggtggcaatggcatgccaaagtgagtgaatggaagaaaaaagaggcaacaacaaaaagaagaagaagaaggccaaaaacatgcctctgaacaaa

SEQ ID NO: 27253 - DNA, 1589 bp, Heterodera glycines
  unsure (1)..(1589): unsure at all n locations
aaagttttattattaaatttatttatttttatttactataaattcactatgttattgttaaataaaaatttatttttatctcattttatttgctttggcaaattaatttttccatttaaatttaacccttttttgattagtcaattattagctgttaaatttatttctattttgattataataaatttaattgtgttttttgaactttattaattatctttttgttaaattattaattttattattatttttcgttaaattatcatcttttaaattcttattttcttttccttttttcaattcacgacaacctagcagatctttatttaattgctgttaataggatgtctatcatataatatattctgcatatttaatcatttttttcattccttttaattaaactatgtgagtttatgaacagttttaacataatttttcaagaaaattaataatttctgaaagtatttatatattttccaaattattttaaacatttatcaatcgtttattttaaatgtcccattcattttttatagtcaaaattaatcaattatttttaggcttatttttagtttttatactctgaccacgaagatcgctaaagttgtcatttttagttaaaaaatttgctaaaaattgaaaattctataataaaaggataaaataggtgaaaggttagtgtttgaaaaaatgaataattgaattgtcgtttttattgttgatggggaggggtcgcattggtcgggtcaatcgccagcaaataaattgatgaatggcacggcaaaaaaggagggcataggaaggcgaaggggcaaacggggcgtaattagagacaaaagattcgaaacaatattcataattaaggaaaacaaacctaaatgtgtatataccaaatatgggtggcgggacaatttgttgattattgggcgaatttaattagagaaaaattatatataatatttaattgtttccaataagttttttttcgttaccccctaaaaaaatatttttttggctttttttaaaaagctttcgacaaatttattgatgaaaatcatagatacaaacatagatttttgcagtattgatcccagattcttgcttacaaattagtgcctaaaattacaacagaaaagtgctttcatttttgtcgggatcatcacatttttataggggtacgacataacggaacttttaccagtccttcttcgcaatcgccatgaaagaaatgcaaaaaaatcgcgaaatatgcagaataaactgtggaaaaaagtttgtgaaaaactctttcatagttcactttaacatctgaaaaaattcatgctaaaataacttttgctgcttaaaaacagatgattccttcacggtgatttcgggacacactgaaaaatattgtaaaaaccgagaaaagtttttgtttttctgtaagagtacaaactaaaaagttgtttttccggcacaaagggagtgcatgggaaaaggaggggagaaaaggaaagcaaacaatggcctaattagggagcgaaaggtggcaggaccattaaggcgcataataaangcatggaagtgtcacggaatggcacggc

SEQ ID NO: 27254 - DNA, 1515 bp, Heterodera glycines
  unsure (1)..(1515): unsure at all n locations
acatttgctttcgctgatgctcacttcggagcgtccttcagcagtgccctcaattgtgtgnacgtggacaatgtgcttgtgaaagtactcgtccattccctttcgtatacgaaacttcaaagctttcacgatccgccacttctttgagcaattgaattgggcttttagcagacgaagcaaggaaaaaatgcgttcttgggtcaagcgattcatttggatgcaatgtcaaaaggaactgatgagacaaacggacatttccctgcaattttagttaattgtaagttattttcttataaaagggaagataatttataaattaatagcaactgtccatctatacgtttgttttgacgctttgccttcggaacaggacaaaattttgccgctgaaatttcgcagagacgaagtttcaattgatgttggaaatttaaaaaaaaaattcggtggcgaaatttggggtgtacccccctttgcctttggggtttcattgctttaactttagttttttaaattctttccgggggagacgagttgctccccttttcctttggtggcctttcgtgagtgactcacctcctcaacgtcttccgtctgtccgttttctcccttccgttttttctttttcaatgccttctctccgtcggcgttttttctctttttggcccttttcacatccgcccagcccatcttcaccaacacttcacataacactgctgcacaactgatcttcgccctttgttttgaggttgcaattgcgccgtgatgaatttctccgtcgaataacgataaacaggcgtaatgtctaaacaaagtctgtaattttcttagagttgcttttatggtaacttacggtaggacatagggaagtgtgaagacatggaaatcgagttgtatttgcgatggcatctgttcattgttctgctccattgcttcggtggacttttttaattcctgcagcacaatgcatcgcttgacaaatgccattgggttgttgcccatccggcactgctccatcttcgcctttgtttcctcgctaagatcaaattggcaccaaaaagcgttctgagtgtgcagtctgaaggcggttgagcgcagtcgagcaaaaacttcactttcattagcggccgatgggagcggattaaggcgttcgaagtccttaaatgtttttttaattacctatttgccgaagttagaaatcagtgaaaacgtagaaagtttgcctttttttttttgaaagattgttcaccttccgaatggcatccaagtcgatgtcatcagagaatgacaagtgcatgttttcctgctgttgactttgttcgacattcgctgcttttgtcggaattggctttggcggaattttcctcactttccgtccggacaaattgacacattccagctaaaaacaaaacaaatgtacatttatttgttggcttaaggttggtcttcccgactcgttctttctgtcatccaaatgctcagaagtcgcaatgcgcaagcctttttgggctccttttt

SEQ ID NO: 27255 - DNA, 2087 bp, Heterodera glycines
  unsure (1)..(2087): unsure at all n locations
cagcaacaaaaaacatttatcttgggaaatataaatcatcttttcagctctttaataattantgccggaggaaataaatttatgaaaaattttctctttttttctttaattcattctgtttcttttcatttcgtggtatttctgtttattccctgtttcacagatccttccttggacagcttcgtgcccctttgtcgctttttgggccttccttccacgctccccgaacttttggctggtgtccaagtggaagatctttttcaaatgtttgtccatcttcattttgctttgttttgttttcttaaacattatttgcttgtccatcctcaggtggtcaatgcatctgccgcagcagcgctttaagcagtgccacggtgatcagctgatcggcctgcaacttccgctccgattgaatgtgctcatcgatctgccggacgattactcccaactgatcaaaatgacggtcaacttcaggtgaatgttttgggaaaataaaatgcccaattcttaattttttttaattgcccagaaatttcgacccctcgagtttttcccttcgtttttttgttatctttttgaataatattgattttatcagatgccccgagatcaaagagttgactaacacagtcgcgacactttgtcttaattgcggacaaatgctttgtgagtttatctctttgattttaatttacttaatttatatttttttaggctcacaaggctactgttgccaaaaagtggtcagtccacacgaacactaatttaaaggcttatttctccatgacgattttccgattaattatcttcaaaattaatccaaaattaattctcttaattttgttaattgtctttgcaattttgtttctataggtcaatggtcgtaatgttggtgcgtgcaccgcccatctgagcaaatgtcgcgggtcgtctggcgtttttttgcggtgcgtttccgaagagcgaaatcttttgaaaataattgctttgttttcccgccgcagaattcgcgagtgccaaatcgtttgtttgcttgtgactaacggtggggagctcacccgcggctgcttcaaggcggcaccatacgttgacgagtttggcgagactgatcccggctttcggtccgtacttttacaaaagccttacaattagccctctcacaaaaatgctttccttcgcttcagtcgcggcaacccaatgcatttaaatcgtgagctttactggaggatacagcgcctttggttgtaccaagaaattgcggaggaaatcatcaaccaatacgagctcagcagcaaccgcaacatcggtaagggaattagaattagtcaatttgctaaatgaattaatgctttgggcttttgagaaaacccattatggaagaagtttaaaatttttcgcatgccttaattcattttatttctttgcttttttgcagcgttcgaatggaataatttctgaaaggcatgcatcgaatgatcaacaaaggcgtaaaactaatgagaaggatgaagtgtataatgtgattcgaatttttattatttgaatgccaatttgcaaatatttggcttgtgtgttctgttacaccctaatctgtcagggaattatcggattattctctggattaaagcttttcctcatgaaggtacactagaaaaagaattagacacctgtgtatacttaactttttaatagaataattttaaaacatctcaatttaaatgcaatcgaacaacaaggcaagggccactttaaagcataattgcatccaaaaaatgatcaatgtcttgccaatagatgaaaagcattcggctctagttcagtttatgcatccatcgacttttatacgtccaattaaatattttcattaaaacaatcctttaaacatttaattgggctccattgcagtttacccgaccataaaaaagaccaataatttgacgagtttaatgtgttataacttttttagaagtatccaaattaaacattcttggtgttattcgatagctctaagtgttctctattagcttgataaaattaaaaagggctgttttatagtctaaaagccgcaaaaaatgaataaaatggat

SEQ ID NO: 27256 - DNA, 1476 bp, Heterodera glycines
  unsure (1)..(1476): unsure at all n locations
cgcgtttaatcgatcaaattcagttttgagggggtcttatttgtggctaatttgctttgcaatttgtgcccaaccacaaaaaacacctgttgctgctgttgttgttgctgcgcaactgatgccgtcccgggcgataaatatgccatgctggtggtgcggatgcttatgctgacgaggataggtaataaatacaaatggtacctacatctgtaaaagtcttatgacaacataaaataactacttactcaagccctagttaaatttttccagactacgatgaagtatttcacaatgtcactgatgcatcatcgactgcactaggaggacttttactgctccatgatgccgagacgcgaaaatcccaaaccgatcatcaattggcacgatggctcattgaattacaaaattatcaggtcaaaattgtccacgtggcgggaaaagccaacactttggctgatgcactttctcgtgccgctgaagacaagcccttgtcggagatatacaatgtggatgaactcgaggaaattatcgaatttccggtctgtctcgctttggcagcacattccagggtggtcgcggacccatttttgcacactttgaccatccgacacgaggatggaaacacttacgaagttaatttgttggaagagcaggcaggagatcctgaagccgcagcctacattgcgtttgtcagagatggggaatttccagctgatttggatgagaaagaaaaagagttatttggtggactcatttttgaatcacttcactcgtctctttttangtggtggtcatttgaattacaggaaaacaattgccaaatgcaaaaaatatttttggcccaaatgtactctgacgttttaacttgggtcaaattgtgtgtcacctgccaattgagacacaatccaacacccgcgtaccgggaagagatgctcatggtggcaggcgacacactttttgccaaagttgggctggacttggccggcccctttccagtcactcaaaaagggaataaacacattttaaatatcgtgtgttggttcaccaaatatgtgatttctgtcccggtccccgacacaaaagcacaaacaattgcccacgcttttcttaccaattgttacttaaaatacggtggttgtgttgaattaatcaccgataatgcctctgcctttacttccgaattttttaaggaattttgctccatgctttacattgacaaaaagtatgcctgtcctcattggagtcaaggcaatgcgtcaactgaacgcacttttcggacatttcacaacatcttggccaaatacatttcgaagactcagcccgacttcgatgaatttttggatgctgccaatttttgctacaacacgtcagtgcatgcttcaacgggtgagactccattttttcttatgtttgggcgtgacccaattttctgtgttgatcagatcattgatccgaaagttcgtgatccgatagcca

SEQ ID NO: 27257 - DNA, 774 bp, Heterodera glycines
actagggatgcaatttataggcactaaaaaccgccaaaataggtaggctttaggctctaaaaaatccccaaaataggcactaaaaatcctcaaatttaggggtgtaaaatgacaaaattttattcaaaaagcaaaaaatattatgccaaatcattattgagattcacattgcaaataagtaacatttcaagattttcgggcgatagacgtgagcgattgtcagtcaaaatagatttgtaaattgaaaatgatcgttcaacatcacatgaagtcaagggagcgtatttgtaaagtgaaatcagattggggggcataccgaaattgattttttgaccagaaagaatttttccaatatcgcaaattgtatcaaatcccgggtcttcaaatataaatttaaagtattaatttccaaatgcatattccttaaaacctttatttgacatgcttgacaataaattatctttgaatcagttgtgtaaacatcgttcatgtaattggaaacccattttttgaaaagaaatgcgcgggacgaaggttcttttggcatgtttaacactaaaattgaatattaatcactaaagaattctaaacaaatatttttaaattaattaagcaattccggattttattttccccaaagatttccgtttttattgcatttttgttaacaaattttgggcaaaacgccaaaataggcaaaaataggctctttcaaaattttttaggctttttaggcgctaaaaataaaagcctagaaaataggcactaataact

SEQ ID NO: 27258 - DNA, 1595 bp, Heterodera glycines
  unsure (1)..(1595): unsure at all n locations
tgtgaatcacacaantttttggggcaaagcaaattcaagcagctaatattcgttacttgtacctttagtaaaaaaatatcactcggctccatgcacatcagctgagagtgagcgtttgttttggcggctaaactcattgtgacagatttgagaaaacgtttagcagaagaaacgttgaaagaactcctttttcttcaacaaatttgcctctttatggatttaaattcgaaatttaattgaattttattttacataaattgtttgggttacaaaatattttttcaaaaacttcggcttcggcttcgaataaaaattgggcttcgccttcggcttcggctactaagccgagctttgcccacccctgcttctcatccctatcccccccccccagcagggatgtgcgaaaatcacaaaaaaaatttttcgtatacgcgaaacgaaaaagggcattcgacacgaaaacgaaacacgaaacgaaaaaagaaattttgaaaaccgaaaacgaaacacgaaaagaaaaacaaaattttgaaaaccgaaaacgaaacgaaaaaactttggtagacaaaaacgaaaacgaaacgaaatttcgtccatccctgatccccagtagtactcccaaacaagattcatcgttttgctaccccaatatctctctgcacaaattccaccaccaacgggttactacgaatgtctattgcacctttaggcgtccattttttcttttttcttataccaacattcttggattcaaacgaaagctaaaagtttatagaattttttctttacctaaattctgggcttaaaagcaacaaacaaaaattatttctctgaatgtagttgaaaaaaagcaattggacgccaaaaggtgcaacagagcccgtacgacattatgccactacttttttcgattccgcaacattttttaattccgacattttttccgatgtttcaattgctagcaaatttggtagccaattggttcccttaaaaagaagtttttattcaaattttatgattttttagtacatattattttctgtgtacaaattattattattattaccttctgaaggtttgataaaagttcgttcatttccgttaaaccaaaaaactgcttgaaaaattcaggattttctgcgcctttacattcaaaatattcttttagcttttcatcacagttttgcaccgttagttcgctttcataaattgatctacttaaatctaaaagtacgatttaaaatgattaatgtattttggtgccatttaaaataactcaaaatccttcgaaaacaggcaattatagcctttttcgctagaacattgtagccattataggaccgaatttaaaattttatggaaatattaatggtaattgttatgaaaatttcctccttcccctggcgacggcttggaaatttacctgttctaattttggcacgcatagttttggcatttttgatgaattcatccatttttcctccatcagtgttgtcgctgcccttggccattttttcnaattgctccgccatannattttgttgttgcaatcagnttattcagtttcgcttctttttccttcaaatattcacaaa

SEQ ID NO: 27259 - DNA, 2028 bp, Heterodera glycines
acttatttcccgagccgtttagatgccctgtcgtcttgtgcttcatgggtggctgtgcgcagctcttcaggtcatagttagtttaaaattttaattttaaaattgattataatgcttttcctcctacacctcccctctgaactcacgtcttccattctaactgtatgcataatttctcctcacttctctgcgctcaatttttctaagcgtatgcgctatttatcctttccctctgaatgcacttaacattttacggtatctttttctgctcctttctctgctaaattctcctaagcggatgctctatttcttttataccctctgaacacacttaacagtttacggtatctttttctgctcctttctctgctaaatatcctcagcgtatgtgctattctcttaaaccctcccattgaacttacacaatgacttatttttctttctaatttctctgtataagcaattataaaaatcaaatatatttagattcattttaaaatggaaaaccgttccctgaagcgccctttcccattttctattgacgaaattctcggcacacctccagccaaaaaattacgtcaaggtttttggatcaaccaattgcttggtctcgtgcaacagggagagggaagcgaaacatcggcatcagaaaagttgccgactaattttgtggagaaattgggtagcagcatcgaacacaatgcaaatttcacttcaccaaagtgaagtcgcgcttcatcatcaaagacttacctgctgatgctgaagtacttctttcctgtatactcgaacactgcattgacgaggcaaagatgaacagccgagaaaagcgttgtgaatcaactcacctcggttgcttgatcagtggtccattgcttgatggaggcgacgtctttgttcctatccgtccaataacgactaacactactgacagcataatgaatttattcaccaaaattgtgcaatcgaaaaaacaaaaaggcacaacacttttgggtgaaccgtttaccgtcactgtaactacagtcgaccgcaacagtcttccgtcaaaacggcatctgaaagggggcgcaagacgacgactggcacctgttcaccatcaagtatatgagaagtgtttgatcaaggtgaagcttccatcttatttattatatcattgactgtcaatttaagatccataaccctgacgagcgcaacttttgtctcttctatgcactccaagcaacaatggtagcgaagacacgtggatggccaagtcggaagttctacgactacatgcatagtcgagcaagtcaacgtgggaaatttcatcaagacaccgaggaattgatgcggcaaatcagagctccactggacttggacgcttatgacgctgacacttatgtgccattggtcatcgatcattggaacaacgcgcagcggcagcaacagcaccgttttgcggtttccatctttggggaatccggccactacaagccgctatacaaatacggccacgacgactacgatacgctgttggctctgtactttagcaacaaccattttgatggcgtgcattttttgagtggtcttttcgctggcaagagatactgtatatcatgtgaacggccatacagtaaagcaacgatgcacacccaatcatgtaaagcgcactgcctcatgtgttcgcgagttggccccacgtttccatgttcctcggatgatgatggcttcttcaaacaatgcaacggatgcagcaaaagcttcagaaacagcagctgctatgaccaccatctgcgttccaacttctgcaaacactccaaaaagtgcaaagactgtggaatcatttggaatgtggcggataacaacagaaaagggagagacggacacgtttgtggtgaaaagttctgtcatctttgtaacaattttcacaacattgaacgcggctgtttcatacaacaaattgagaccagaaaccaaatgaagccgtaccgattcattgcttttgattgggaaaccatgcagcatttaccaactgatccgcttcat

SEQ ID NO: 27260 - DNA, 255 bp, Heterodera glycines
ctattcggtttgtgtgttgtgtggtggcgtgcagagccttcagagggatgggacggattgtatgcacagactatccccttttctctctttcttttctcgcactatctcgagaattatttgtgtctgtccttttgcctgtgtgcttatctccggaacgatctttcgtttgccaaaaaatttgggacggagaaaaggccaatggcgttaattctgctttgatctatttggaaaatgtggagaaggggaggggggggg

SEQ ID NO: 27261 - DNA, 805 bp, Heterodera glycines
atcaaagattatcgcttctcgcacaatttgagaactgcgtacggatgggagaggaagcccactaaatgccatagcatcatagaaaatgacgtctcatgcctcgacatgttcccagaattgtcaaagggttgaaaatgcgattaaagcctccgttccgactaattaccggcacaatgtgcgcaaccgggcgaacgagatttttacgagtcccattttgagtagtccgtctgataaataactgggaccactgcaaagacggtcctaggattttggcttgggcgtgggggataccgccccgggcgacaactttttttttttttgcgtcgcatttttcaaaaaaaattgctgaacaggagctccgccggcggagccgatagataccgccgaaaaaattattgcaaatatagtgcaatttgttaatagatttggtcaaaaaaatgccatttttcgattttagcattttgtggattgcgtttataatttttaaaattttttgtaaaactggtggtgtaggtcttggagggggtatcaacaagaaaaaaccgaaaatattatttttcccttaaaaatttcggggttttttttggagggcgtcccaattaacagacaaatgaaaggcaatccaatccatgccctttgggttcctgaagacaaagaaattacctttcaggccaaaatcgggcactatgttcaacgaatggaagtgcacgcatctgttctaactgttgggccaaagctcgaagttggccagctgtccccagatggaaatgattgtcggaatcgaattgagtcggtagagaattgg

SEQ ID NO: 27262 - DNA, 1097 bp, Heterodera glycines
tccctcccacttttccttcccccctttttgttttgaccttctaagatccgaccggacaatgaattcagtccattcgccttttccttccttccgttttacttctccaattcatttcacccaattttttgcgctattttcagcaaagaatggaaattaatgaaataaaagcaaatgacagacgaatggggggaaaagcgcagccgaaaattggggtcggacgtaaagcgaagcgacaaaagcacaattaatcacaacacaaaacaaatacaaaacaataaatatattaatggattggaaatgaattaatcgctctcattaaaactcttttgttggaggtaacacggcattttaaaatgggcaccaaacaatgctttaagagaagacaacgtggcacaaatgccaatgagcagagcaaaagctaaagtttggaatgggcagattatcatatgtttatttgggttttattttatgtactcacttattactgtaccgtacagtatcccttttgcccacagaatgaatttgctgaaattgaaatttacaaaagtcattccaaccattttttgatgagaaatgcaaacctttgcctttgttcgttcatttcgtgagaaaaattggaaagaacaaaatgaaaaagaaaaggcaaaatgagcgcaaccaaaggaacggtggaggagccgacgaagccgagaaaagggccaaaattgggcacagattgggcaacgaaaaggacggatgccaaaacggcagaacggacgcacagacgtgcgatgccaaactctgaaaaagtgccaaaaatgggggggggggcaatagaaaggagggacaaaaagcaaaaaaggagcaacggtttttatgccttgcggggttccgaagagctcttccgcctcttggttcagcggattgatgaccaaagtgattccaagcagagagttggcggtgatcagtgccaacaccgcctgttggacccacgcggtgcgaattgagccgaccaccgaatcggacaaagtatcgccgtaggcgaaagaggacgacaaaacgacgaaaaagttgaacagagtgatcactgaaggcggtgaaacccaaaagtgatcatc

SEQ ID NO: 27263 - DNA, 1193 bp, Heterodera glycines
  unsure (1)..(1193): unsure at all n locations
gtccccccgaaccgatgcgcccagatttatgggagaccgatccctccnggaatagcttccctatagtctgtacttaaatctgcgtggattntgctccccatcaatgtttgagtaccccaaacggacactcgaaaaaatcgatttttttgtttcggggcagtccccccgaaccgatgcgcccagatttatggggagaccgaatccttccggaatagcttccctatagtctgtactttaattctgcgttggatttttgctccccataattgtttgagtaccccaaacggacacttgaaaaaatcgatttatttttgttttcggggcagtccccccgaaccgatgcgcccagatttatggggagaccgaatccttcgggaatagcttccctatagcctgtactttaattctgcgttggatttttgctccccataattgtttgagtaccccaaacggacacttgaaaaaatcgatttttttgttttcggggcagtccccccgaaccgatgcgcccagatttatggggagaccgaatccttcgggaatagcttccctatagcctgtactttaattctgcgttggatttttgctccccataattgtttgagtaccccaaacggacacttgaaaaaatcgatttttttgttttcggggcagtccccccgaaccgatgcgcccagatttatggggagaccgaatccttcgggaatagcttccctatagcctgtactttaattctgcgttggatttttgctccccataattgtttgagtaccccaaacggacacttgaaaaaatcgatttttttgttttcggggcagtccccccgaaccgatgcgcccagatttatggggagaccgaatccttcgggaatagcttccctatagcctgtactttaattctgcgttggatttttgctccccataattgtttgagtaccccaaacggacacttgaaaaaatcgatttttttgttttcggggcagtccccccgaaccgatgcgcccagatttatggggagaccgaatccttcgggaaaagcttccctatagcctggactttaattctgcgttggatttttgcccccataattgtttgagtaccccaaacggacacttgaaaaaatcgattttttttgttttcggggcattccccccgaaccgatgcgcccagatttatggggagaccgaatccttc

SEQ ID NO: 27264 - DNA, 1195 bp, Heterodera glycines
tgactaattaaataatttttttttttaccattcctggaatggggataatgttgatagaacagatggaaaagcctatcttttgaccggttaaagccagctgggtcactgttccatccttaaatattaaatattttaaattataaagttttaattgatttaaaattatttttgtttaatttttcggcttttaattataccaaatggagcacggaaatggtagcttccctcaaggtttggcaatttggcttcatcattgatgaacaaaattcggatgccctcttgaagaacctgtaaaacaaaaaatcaaatttaaacaaataaataatatttttttattcacaaaaattatggtcataaaaattcttttgtaattatttcggtttaaattttcgaaattttcaataaattaaaaaaaaaatcgcaccgttttctgttcgtacacataaatcaacgaaggtttggtggattcggtcaatttcagcacatattcgccagctttgtcaaccccattgatctcgtagaagtcataccacaggttggttgagtactgcttgcactcggcaacattgcgttgctcggcaagttcagtctcgacatttggtgttgctccggcagtaattgggcacaaatacacatttgctacctgtacaattttgttgtttgttttatgaacgttttatagagatatctttaaaattgttaagtagtagtggacagaagcttatacaaaatttattataaaatagtatccatccgatgggactccaacctatgccaatgccttgcggaatatttcgttaatacacttagctatggtattttagcacaattcctcaatcgtccgatgggactaacccatgcattggccctgtcgtaccttataatctaaccaaccgatgagctacagtaaccctgttttgttactatctcattagggcaaattgatcatctacttcgccagttttgtgtgcatggcggacgggggacagctccactgggggcgtcgggcgcaaaatgtctgataagttgccattaaaagattcgttttaacccccttttaggcacttttaggtcttttggtactgactgtggccaacaggtgttgcccaaagtctaatgttcctccggtctgctcacttggctgttgtttggcggttgtatattgttggggtacgttgggggggggggggggggg

SEQ ID NO: 27265 - DNA, 1411 bp, Heterodera glycines
  unsure (1)..(1411): unsure at all n locations
tgtttagaaatttctgcgtgccaacacntttggtcagctcctaaatttatttcaaaacgtacgcttcttcatttgaaccatttgaattggtgaacgaacgaacgcaagaaaagctgacattaatgttggaaaatgaatcaattttcggcaacgaatgggtaatgaaacggtgcccaattggggagacggcggcggcgattcattgggaggacgacaatttgaacactgtcgaattttggcgttatgctggctttaagagggcgtcttcagcagaataagcgggacaaaacacataacaacggcaacaacaatgatcgccagaagaaatgaattaattaagaaatgatcgatcattatgtacatttaagtgatcaaatgtattttatgaagaacaattgaaatacatgtgataataggttggtatatttaaataaatagaatgtgcaaaaaatgtgaaaaaaaatttagagaatttggacaaaatagttaggtaacaagggtggagcgcgcatagaaaaaaccccggtcgcgcattcgacaatttgacatgaaaattcattcggcattcctgacttatccggcggattagactaaaacaagtgaaaatgatatttttttaacaaaattggtatcagtcgacagctcgacgatacaaaccgatctagatttttgattataacttttttcattgtcgacaaaattcaacaatctttgtatcgaaagcttttcacgattattagccttacaaaaagcacaaatatttgctagcaaatagaaaatttatgaataagaaattacaaaatttcgactttttcataattttcatgttgtaacttttttaaaaatgtctaatcacgaagcaatatcttagaagtagcttctaaacatgttaagctttcgaatgataccaagattattggatttaaatgacaaataaaaaagttatagcccaactgacgtagaccggcggttcccatcgttcgtaatatattcaaatgcgcgactgtttaggctcaaaaattatttgtttcattccgataataaaaaaatttttctaaacaaaaatggaaatgaaataaaggcaatcaaaagcagcagtcgctaaacaaaaaaagtattgtcagtcaccacacctctttgaaattgttgtgccattcattgtttggtgggctcgaataattgtggaatcgcaattgcttcggctgcccatcgtttctcgaaatgtgcaaccattttgacaatgcttgaccagcagcaacagaagtcacaagccaaagtgtcgaatggttggtgcaaacgcgttcattatacgcacaaagtctggccctgcctaaaaagtgtactccaagaacgaatatactgccgtaataatacaaaacccattattctgctaccattctaaatttattta

SEQ ID NO: 27266 - DNA, 1440 bp, Heterodera glycines
  unsure (1)..(1440): unsure at all n locations
aaaaaaatggatgataaattgatagcattttaaatgacagtaaaagcgaaccattagaagaaaagaccttagatagccaaaaacgggggacagggacacctgttgggatttcgacctaaaggactaatgatcgtttagttacgtgcaaaagtgttgtagcatcatcatcaccatcttaaggtttctttttcttcatcggttttaccattttattacggctggtgatgaatttgggttcctcaaaaactttaatcgaacgaaaagtgaagtcgccataaattgtatctccatcattaatgccatatgcgtccattgttttgttatctttgtccaaaattttatccactgatttgtataattccatttttgattcttcttcaaaattgacatcccattttactttggtcgcggccttgctcttttccttcacatttttcacagtgtcgttgcccttcagctcaacatagtcagaattagagatcggataatccgtatacggatttttacggatccgtagtccgtaatccgtatttttttcggccaatacggattttttacggactacggattttacggctttttagtccgtaagtccgtaatccgtatgtgtgcctagtccgtaatcccgatcctgatccgtattttctcaaaattccgatctctagttntaagtgaagaaaatgtttcaaattcatgcaaatttttaaaatcaagctttttaatgccatgcgaatcatcatttatgcagggctcggatctgtccttatttataagatttgtccttatttggagggtccaaatcttacaaaataaaaatgtccttatttgtaagatttgtccttatttcgggctattgttcttattttgttcttatttcttaaatatattcaaaattttgaaattttatggcagaatgtcactattttatcaagaaaatataaggtttgcgcaaaatttggttattttttgacaaaaaactgttagcaaatcgcattaaaaattacaaaatttttcccggtggcgcctatcggcaccgccggaccatctccccacttgttccccaaaagtttttgaaaaaacgcaccgcaaaaaaaagtatttttaaagacaaaaaatcgccgcttggcttttaataaaaaaattggccttttttggtgaaaatctgttaacaaatcagaattaaattacaaaaaatttttccggcggcgccggaccctctcccctcgcacttcccaaaagttttttggaaaaatacgccgcaaaaaattgttaaaaatctgatttttttatcccgaatgcactaaaattttatgatttgctaatttcctccccaaaattgttaaaatcgttaatgggagaccaaaaatatactatttgataatttttgatcgaataaattataaaaataactgatttgaagcaatttttgcgaaatgttct

SEQ ID NO: 27267 - DNA, 890 bp, Heterodera glycines
  unsure (1)..(890): unsure at all n locations
taaagtccggtccctactcgcaagtgcctaatttaatctttctatagcttaaattcattttcaaattatctgattaaaatcttccgttaaaataaaaatttgctgccaaaagatctactgacggattgtccggagccgccccctctcaacctcccacccctcactttggtcttgaatctgaaatcagattccagttgtggcatcgttagtgcctcagagtcccttcggatctgtggattctgcggcatagattctgaggagctcggtaggggtcagcttcgtctggccaactccgtctcagttcaaagttcaaaaagctataacttttttcttcgtttactaaacaacaatcatatgtatcagggagtcggaaaatgcgacggctcccggacttttcgacagaaggacttttcgacagagggcttttcgacagtaaaacaaaaaataatggacttttcgacagtaaacataaaaacaaataattcttattaatatttcgttaaattttattgttttggagaaaattttacgcttttcatttaaattttaaacttaattactttttactgtcgaaaagtcacctcctgaaatttataatatttctgtcgaaatgtcctttgctgtcgaaaagtccggcgcccaatgcgacaccggtaatacgacattggaaagcacctgaataaagttatgaatctaaaaattttcatttgcatagaaagatactcatcaaaagcttttgagtgtccaacattgtaaaatttttagggcatccaattatatgcacatgcatatttttttcctggactttggtgggcctgaaacgcagcatattttatgcgcatattttgcgattttatgtgcatataattggatgctctaataattntatt

SEQ ID NO: 27268 - DNA, 1696 bp, Heterodera glycines
  unsure (1)..(1696): unsure at all n locations
attagtgcatgatcaatcaatcactctttgcnnggattttcncctcgctcaccgccngcagtcccatggaccaaaaatgtcggcgacacntcacaatcagtcgccctcccacttcgaattgcgctcgcgtcgatgatgtacgtcggagtgcaattggccaattgcggaatgtgccccgaggggacggccgggtgagtgccgggcgggtaaatggccgagtaaattgggggcggcgactgttgcgctgggggcatttgctgagtgtttctgctgggatttggcaatgtctccggcagagtaacattgccttttgcggaatctgtcgcctcaatcttcacggaatctgtcgcctcagttggttgctgtctctgctgctgttggcagtgataaattctttcggcaattgccaccggcggcactgtcgcggtcggagaagtgcccgaggcgggggattgttcggcggacgacgaggagagaatggcatcctctgcgggagtgagcacgtaactcatcgggtggacgggcgccatgttcagactgatctcgtcgaattgcagctggtcctccggcgaaggagaaagcctttgcccgtcggtattggcactcattttggggcgtctgagtgattctctttaataaatggatataataagtgtttggaaagatgcaaccaaatggatttttgaagatatagaaatcgaatagacaaacttatgagtgaaggaaaagcgaaggacgaaaattggggaaaaagtgggaaaatggacggtggggggagggaaatgccaacaaatgaatttggtggcaaatgccaaccaatttttgagaggaaatgccaaccgatgaggtaggcatagtgccaacagtggattcattcactcacacccatcgcagttggccttaaactattcaaaccttttcatttgtcgtctaaatttatcctctataactttgcgaattcagtccatttttgtttaatcagcttcgccaaaagattttgcttagccaagcagaaaagattaatgtattgactaaccgaaaacggcgaaggattttggaaggccaaatcaaacaaatcggccaccgtttgttagtttttattaaggttggtgcgtcaatcgcatttaaattgaaatttgacagccttcaattagaaaaagccctttcccaacactttgcccattcaaaattaaattttaattataaataatttttagcaaatgaaaaaaaagtgatgcaaattgtgatgtttatgaggttaagagcgattggcgaccaattttgaatgttgcgcgggatgaaaagacatttgggactgacgatgaccaaattcaggcacagttttgaagcagtaacactccaaaagtttgagtgctgtcggcataagttgctttttcatttggggactgaatgtttcgaatgagtcaaaaggccaaacacagagagaaaagcacctccaaaagatgtacatgtagaagaggacggcatggtgaaggtaatagaggaggtaagtgatgaagaaggcgaactgccacaagtgggtctgctgcacgtcgaacacggcctcgtaaaggcggaaggcgtagttgggcacattcagcagcacaaaagtgctgaatagaagaacattaaataaaaggcaaatttacactgcccgggggagtgaacgccctcagggcattggaaatgctaaggg

SEQ ID NO: 27269 - DNA, 1364 bp, Heterodera glycines
  unsure (1)..(1364): unsure at all n locations
acaaaattaantggtccaaagttgcacattttaggtagaaaaatgctaaattaacaatgatttgcagaattaactattggaagttatagttttatagagggaaaatgcaaaactaagcaaatcaagacaacaatgcatcattttttggatcaaaataatgtgacaacaaactgctgctcgtgtgtgttgggcatgtgtgtgtgtgtgtgtcggtaggtatgcgcacgaaagttctatcattaccacttgctttgactgcactgcgctcttcctaattcattccaccattcctcatcttcagattgagttaaagtttcatctgtattattatcatcactgttgttgctgtccatacttttcggggctctgatctctgtgtacatacgcccgagccatcgaagtgaagaattatgcagctcacctttttcatccaccagttcaagaagttcaagcggatagaaccggtcctcccctctgtctgggtgctctattgcgcagtgaacgtacgggtgatgcaaccgaattcggtgacggacgtaatagtgtgcagcaacattgacattatatggacgcggcaaacgaccataacataagccatgatgtttgatgctccctcattcgtgatgccgttcagaaaaaaggtctttcgtataccgttcctgtctcggtacattgtccgcactttacgtcctttcaatgcattaatcactatttctctgtcgttaggatgattcagtcgctcacgcagtgaaccgacacttgtagcgagcaaatgagcacaaaaagaactgacaagcatcacttcaatgagaaatgaatgtgtaaaatggttaatcaggcttatttatagtcgcttttaagtgtgaatgaaacaaagttaagctatggattttctttaaacactatgcaaacaatggtgacccaatttttaattaattgttcctaaaaatctatatgacctacataaacccgtatttaagcgcggtttgtttaataagtttcattcattctcattaattaatatggatagcagcactattgaagagcaaacaaatgtaggacatcagctgcatcagcagactatgaacttaaactgtgactgtaaacatccaattaccaataaaagatttgccgggtctgttcctactgaggcttttcattccatccaagacgaaccaacagagcagcaaccaccaccagttaaaataccagaacatttgtggaaattgaccaagggcaaattcgttctgctcttccgtctatgcaacttgtgtcaaaaccgtctctacaacagtgaagacaaaacagtgcgtaacggggaatttgttgatgtgaagttttcgctgtgccaagaatgtgttgtt

SEQ ID NO: 27270 - DNA, 729 bp, Heterodera glycines
ggaactgtatcaaattaccagcaaaaatcaacggcaaaacgaatgccatgagcgcaaaaactttggggccgactgccgaagcgcctaataaaaaatcataagtttaatttatatgcggatagacgaataattaattattatgagtaattatgtttacacggaaggtgatcaaagtgtatcggaatttgaaaagttgaatttaattgaaaatttttaattttttaaggcctggtcttgggaaagcattttaatctaaggaaccgaattctcaaattggctaatccatgttggttctgaattaaaattaaaagtgcttttcttttaaatttaaattttaaaaatggtacagaattttaagaaaatgaaaccaatttacggtgcgtgcgatattctgctctattcataacaattaaaaagtacaaattaatttgtatttttagaatattggtttcattatttgcctaattaccttgattataatatttttaggttattaaacagaagcgacacagaataaacttaagaaagttggcataattcattaaatttgatgttgtcttatcctatgcatttgaaagtgccttttcaagaaaataattgaaaagcagttcttctgttaatttattgccaagatttagtattttcagtttttggcaaaattgcacctgcaggcaatgggaatggcactgattggtcgagttcgccggttttggaatggcacttccaatc

SEQ ID NO: 27271 - DNA, 1216 bp, Heterodera glycines
accggggatctctagggccggtgcctgaagatcattcgactcagcacgtcgatgccttccaataaatatttgtaaccgtcgttatgctttttcaactggtcaaatatgcacaaatcgcactgccaatcggtatggaagccactcggtatcgtctttagtctcgggaatcttttccttatgggcttgtgaatcgtgtaagttctctgtttttcgagaaaattattaacgtctccggtcgtgatttccgggtcaatctttttggcctcaattaaaattttttgaatcccagcgaaacttgccggagattttaaattaaaataaatttttgataaaattttctctacagtcttgcccatattagtggtttgaagggtttcttctctcgtgctatcccgggtgtttttatagattttattgcctttttccttccacgtccccacatgacctttgatttatcaaccatgtcttttactgttggatccttcagtaaccgatctttgagaaattttgcaccgcgcggcgtttcatctttcttccccgcgagatacaacaaaacatctctataattactgttttcaatcggcaaattcatgttcgattggacctttccagccgccgtaattttaaataaatctttgttttcctttacgtacctaaaaagaccgtttaaaagggtcgggtgtataatagttttgatcggaatgggtgtttttaatgtgtgtgttgtttggggttccctagttaactcctcaagtgtatcagtatctgattcaggatcaggagtttgctctttaagtcttttcctaggaataattattttccgtggttcatcggtctcttgtggtttggattgagtgttgaggcctagatatggtgcaacgttcggaccgggtacatgattctcaatcaccaccttctgtggtctattttcaagtatcccctttaccgtacgtctttctttatagagccaatcatgtctcttcgccttgagttcctcgtttatgtcggggtcttgtaaattctgagaaatctttgcatctaaactcgctttttcattttggagataatcaccactattcattacactccgtagagccaaatattccgcctcgggaatcattaacattttctttgtaaatttcatgatgttattttttctaataaatgttgggctaaaacactcaggaccggtattcagacagctcccagggctata

SEQ ID NO: 27272 - DNA, 942 bp, Heterodera glycines
tttgtgacgtataaaatttctcaaaataaagagatagtcatttttttggatataagataaatgtaaaaattctctgagaaatttaaagtgggattgcgcaccgccctccctctcgcgctcgagcgcttttgtaacgtataaaatttctcaaaataagagatagtcatttttcttggatataagataaatttaaaaattctctgagaaattaaatggcgattgcgcaccgccctccctctcacgctcgagcgcttttgtaacgtataaaatttctcaaaataagagatagtcatttttcttggatataagataaatttaaaaattctctgagaaattaaatggcgattgcgcaccgcccttcctatcatgctcgagagcatttgtaacgtataaaatttctcaaaataagagatagtcatttttcttggatataagataaatttaaaaattctctgagaaattaaatggcgattgcgcaccgccctccctctcacgctcgagcgcttttgtaacgtataaaatttctcaaaataagagatagtcatttttcttggatataagataaatttaaaaattctctgagaaattaaatggcgattgcgcaccgcccttcctatcaagctcgagagcatttgtaacgtataaaatttctcaaaataagagatagtcaatttcttggatataagataaatttaaaaattctctgagaaattaaatggcgattgcgcaccgccctccctctcacgctcgagcgcttttgtaacgtataaaatttctcaaaataagagatagtcatttttcttggatataagataaatttaaaaattctctgagaaattaaatggcgattgcgcaccgcccttcctatcaagctcgagagcatttgtaacgtataaaatttacgaaaataagagatagtcaatttcttggatataagataaa

SEQ ID NO: 27273 - DNA, 1309 bp, Heterodera glycines
agaggtttgatagtgaaataagtcaccagcaaaacccaaagcttatattcttttgccttatcttttctggacatttcccggaataaaaagtcaaatcaaaatttgcttaccaatcgaatgagacttctgtccaaccatcgtaatgtgtccggcgaatcattctcattagccgctctccaagaagccaaccgagccataaaaacagtgccggcgtcctgatcaaagctatacccaatcgactgtttattcgcttccatgtcggcccatgaacgacaagtggtggtcactcggactcgccgatgtccatccgaatgttggtattgggtgataaattgcagcatcgcacgtgcaccttgaggaatgccggtgccatgctaaaagaggaagaaaaaaaagattgatttaggaaaaaataaaattgtctcaaccggagcccctgtggcctagtggactaaggcgtcggtctcctaaaccggcgacgcgggttcgactcccgccaggggtaatactttttttatttattgtaaatttatcttttcattatgcggagtaactcgtttttctctgataatttcgaacctgtccagacacttcgaacgccacggcaattgtattccgaggggtaagggagcaaaatttccattgtgttgtgccaccaatgccaacttcagtgtctgaaaccatcgaatttttggcattgatcgaagaacaacagccgagaatcccttcgactttgagtccattgctaactttgacctgtagcccgaataatcatttttataaaataaaaataataacgtcacctctaaagtggcgttaaaagtcattttcaaatttccatcagcgtccttttcaaacactttttggaatgtctgtttgaaaagagtcgaatcgaaggaatcggccatcaccacgagcccatttgtactgttgtaaagcgacttcatttcgtaaagcccggtttggtcaagggcgcacgagaaaatgtcaatggcatgcccatttttcacggaccgttcagccaatgcgtcgtaaaatttgaaagcctaaaagttctcaatgagcgtttgtttccctcaccattgtagcgccaaatattaggttgaatatgtcaaatacagctcaattgacccggccaaaacaaatggatcaggtattgcaattttactattgatagatcagctgaaaaccctatgagttctcttcttctctagttcatgttgagcaacaagcatgagcaaagacaaagtgggtatatatatatgcaataatgttattatgtcccaaaatttttcatctcgaattattt

SEQ ID NO: 27274 - DNA, 962 bp, Heterodera glycines
ggcaagcgactggcgacggaggacattggaccggcaccaagacgcgatgaaaattggcgaagcacaagctggagacaattcacggggacgacattcacacgcggcgggcgaggaggaagcgctacaaagtgctacaactgtggacgaacgggcacgtggcacgtcgatgccaagaaagacggcgagatgaccggcgttgattgagaggaataagagagatagtggaaaagggggctttggcaaggaaaatgagtgtgttttgattttgggggtataggttttaaattaaaataatttcgctaatttacttaggtaattaaaaatgtcaaaatttcatgcttcataggcaaaatttgggaattgttttttcatgtgcttcggcagtaaaaatgaaaaattcctgatcagttctcgagacaaaggttgatggctgggcactttgccagtgatgcctgagtcttgaactggatcagggacgatccaatgtacggttgggagtgagtgacacgaagcataaaattttgatttaaaattggaaaaagggcatgaaaattagcaaaattatttttgaaataattttctttgcttaggcaaattttgaagcgaaaatcttggtaagagaccagggacggtctttggtaaggttggaggtgtaaggtagatccgggttttcttgtttaccggccgaagctctatgaatttcacattctcacatttatttcatttcgcatttaatttcccttttgcttattgttgcccctttcccgacgataattgatcgatcacatttcatttttcacgtgtatttaatgttcgccatttccagcgaagtatcttcagtctctctggaataaagccacttttcccagtgcgtgcatcaaaggcgggacgtgatcactgggcttgctcatcccatgggccctcccttcaggagcttcagagttccttcgcagtgttcccaa

SEQ ID NO: 27275 - DNA, 1000 bp, Heterodera glycines
  unsure (1)..(1000): unsure at all n locations
cgtgtcaatgagcacagtcgcgtttggccagttgtgaaacagaaaaatgggaatatcagatggggtgcgtcccatcctaaaaattcctcttttcgtctaaccatccctccctttttgtgcactatttcgtttcaacattttatcaattttttgttgtcttttgaaataaattgtgaaaaaatatacgaaaattattttcgcttttaattatgatgtacaatgcttttaagccccgccgtgaggcggctcctttttgtgaactattttcgtttttaaaattggatccggattttttggcttttttaaataaattgtgaaaaattcaaaacaaaaaacttttattgcgttacaaatgcttttaagccccgccgtgaggcgggacagttccaaaatttgcaccacattttactgtggaaagtccaagtaccttaattggacaactacgtgtcaatgagcacagtcgccgttggccagttgtgaaacagaaaaatgggaatatcagatggggtgcgtcccatcctaaaaattcctcttttcgtctaaccatccctccctttttgtgcactatttcgtttcaacattttatcaattttttgttgtcttttgaaataaattgtgaaaaaatataagaaaattattttcgcttttaattatgatgtacaatgcttttaagccccgccgtgaggcggctcctttttgtgaactattttcgtttttaaaattggatccggattttttggcttttttaaataaattgtgaaaaattcaaaacaaaaaaattttattgcgctacaaatgcttttaagccccgccgtgaggcgggacagttccaaaatttgcaccacattttactgtggaaagtccaagtactttaattggacaactacgtgccaatgagcacagtcgccgttggccagttgtgaaacagaaaaatgggaatatcagatggggtgcgtcccatcctannaaatcctcttttcgtctaccatccctccctttt

SEQ ID NO: 27276 - DNA, 1393 bp, Heterodera glycines
gcggatattttccttaaaagcttgacatcatgaaaaaatatgtacaatatgcctaaatcgcgaatattcactattatacttacgaagagagcaaaatagtgatttgtagtcatcgatagtgagatccatattgtaagatatcaaagcagaaatttgttatttgatctcctttatatagaaaaatcgagcaaacaaattgttagatcattaatcagtagtatgagtagctcataaactcgtctttttcaaaaaacgagatgtgttccaatcagggatgtctgtaattacggattccggaaattacgacgttttaggatttccggattgcgggttacggatttgtgggatttttacgtaattttgatccgtagatggattgatagattatttttcaagacgatttcttgcaagattatttattataaaatgaattttttttttattattaaaagtagagtagaccgtcaccgcgaccgctccgggaatcattcttcccagtgcttgtcggtcccggttcccggtcccggattttgaaaagctcaggtcccggtcccggtcccggtagggcaaccgggaaccgggaaaaacaagcactggtaagaatgggggtctgagtgcaaaaattagtgagaaaattggagtaaaaataataattaaatatattcgataaagtagcaataccaactgtgcaaatggcctagtggctagtctccttggcttttcccttcttctttcccctagttcaatccctctacagaaattaaaatattttgaattttttttttgtatactcatggctttcctatcgacaaaatatgattgctcatagttttttttaattgacacatattttatcattttttaaagaaaatccgtacaaattgagcctagtaatctcaaaaaccagccttttttttgttgaaatttgttaacaaatcacactcaaattttcaaaattttccccggcggcgcctatcggcaccgccggacccccttcttccccaaaagttttctggaaaaagcgcgccgaaaaaagtgatatgaaaagtatgtaaatctgaatttctattaatattcgatcatttaaagtacaaaatgattgttggttgaaataattgaagaaaattagtttgaaaatttttattaatttagatagctttaacttttggattttataaaataaaaaccaaaataaaaatttaattatttaatattttcacttgaaataaattaaaatttgaatttttttgaatttttaaaaattcccggttggtcccggttccggtcccgaacaaaaatcgaggtcccggtcccggtcccgacttctcaggtcccggcaagtcccggtcccggttttgcccaaaattcccggtcccgctctactctataaaaa

SEQ ID NO: 27277 - DNA, 1226 bp, Heterodera glycines
taattagcagggattcttttttatgtaagaaaaatcgcaaaatatgtaaataaaatatgtataaaaaatgctaaaatatgtatgaaatatgtacaaaaagaaccacaatatgtactaaaatatgtaaataaaattttttaaatggtgtttttttggaaaaaaatcttcgtaaaggggtgaaataagtacaaaatgccctaaaaatgacctaaataggctttgaagcaccctttttactatctctttttttttgaaaaaaacgatttttaggggtatattttcaaaaaaaaattttaaatttttcatatgaaatttctatcacttctcaaaaatcctaaaaatatgtacaaaaaattgtgaaattttgggttttttttggggacatttaatgaaaatttccttaaaaatcctcaaaaatttcaaaatatgttcgaaaaaatgcgaaaaagtccaaaatatgtataaaaatatgtacattatatgtaatatgtagaaaaatcccgaaatatgtaaaaatatgtaaataaaagtcccaacttttgttcgcaaacacaaaaaagaaagtgtttttcctactaattaggctatggagaatccaggaaaaaaacatgtatttacataaaaaagaatccgtgtaaatcactatttatcctacgctggcatgaagaatgtcttagcagtcataaaaagaaaagaatggaacaatccgccggaaaaattccacgattcagaacaatccaaacaactatttccatccatttacgctatctccagcaaaatttctatgcccaactaaactgtgtataattaattatctggtcattaagccagccacgctaagcgttcgattgtcctgtattctgttaactgatttaagttataattaatctttgcttcgagttagtatttgatcaacgatatgagaggagggacaaaattccttcgcaaattgcgtatatcttaggattggacagtacagattttacgagatcggaaagtgaagccaaatttatgccagatatgaatggaggcgtataatcttttcgaggttatattcccgatctcattgaatccaatgaagatgggtgaagtcacagcaacagtgttccccatcgttactattccaggaaaacctgacgatacaggtgaagaacaatttttagcaatacaatataataaaattgtattaagggaattttctgaacttcctgatcgaaattcgtaca

SEQ ID NO: 27278 - DNA, 1096 bp, Heterodera glycines
  unsure (1)..(1096): unsure at all n locations
cattcgtactgaaatggcaagtacatactgnaaaatggattcatgcgggaaaatttgaaatttgcttattttcaagtttgtacttgaaaattgcggcgcctattggcaccgccggctaatttcttaaaaaaaacttgcttaaactcgaaaatttgtctttttggggaaaaatctgttaacaaaaaatgaccagtggaaacaaaaaaaatattggaaaaatccaacctggcggaaaatatgaccttctgaattaaatatttaccattctttcgcattttttcgcgtacttgaattttgtgtttttatctgtgcagttaattaattgtaataagtagggatacgctttttaaatcacccctaagaaaggacctaaaaaaatttcaaaaaattcacccctaagaaatgaaaaatttctcaaaaattcatatccaaaatttatttttttgacaaaaattgtgattttaaaaaatatttagtctcaatactgatttggcttaatttgttaatttttggagaaaattttagattttacacccctaaatttgaaactttttgggacctattttgccatttttagcacttatttggggggtttttagaacctaaaaatcgtatccttattaataaacatcggattttgaaaaatctttttattataatttatgattatttttccgtgtgaatttttccaacggtgaagaaattttaacgaagctattatatttgcttggcccattaaagtattaatcgctgaaatttgctgccatttccatccctattttcgtactttacgttattttatttttactttcgtacattaaatcgaacggccgcttggtcaatttcaatgctggcaatatgtctcgcttttgacaaagactcgttcaatttgtcaattttttgttgaagttcgcgcatatatttaacgaaaatgtcttaaaagtcagactaattagttaatcacggcaattcaattttgggctccaagtacaattaagttggttttttcgtcttagtggtctgtgagttagtcaccaaaaggggggtcccaggttcaagtcctccctatgttgtgtgttaatttcaatttcttctt

SEQ ID NO: 27279 - DNA, 977 bp, Heterodera glycines
cgtctaaccatccctccctttttgtgcactatttcgtttcaacattttatcaattttttgttgtcttttgaaataaattagtgaaaaaatatacgaaaattattttcgcttttaattatgatgtacaatgcttttaagccccgccgtgaggcggctcctttttgtgaactattttcgtttttaaaattggatccggattttttggcttttttaaataaattgtgaaaaattcaaaacaaaaaacttttattgcgctacaaatgcttttaagccccgccgtgaggcgggacagttccaaaatttgcaccacattttactgtggaaagtccaagtaccttaattggacaactacgtgtcaatgagcacagtcgccgttggccagttgtgaaacagaaaaatgggaatatcagatggggtgcgtcccatcctaaaaattcctcttttcgtctaaccatccctccctttttgtgcactatttcgtttcaacattttatcaattttttgttgtcttttgaaataaattgtgaaaaaatatacgaaaattattttcgcttttaattatgatgtacaatgcttttaagccccgccgtgaggcggctcctttttgtgaactattttcgtttttaaaattggatccggattttttggcttttttaaataaattgtgaaaaattcataacaaaaaacttttattgcgctacaaatgcttttaagccccgccgtgaggcgggacagttccaaaatttgcaccacattttactgtggaaagtccaagtaccttaattggacaactacgtgtcaatgagcacagtcaccgctggccagttgtgaaacagaaaaatgtgaatatcagatggggtgcgtcccatcctaaaaattcctcttttcgtctaaccatccctccctttttgtgcactatttcgtttcacattttatcaattttttgttgtcttttgaataaaatgtgaaaaaatata

SEQ ID NO: 27280 - DNA, 985 bp, Heterodera glycines
tttttaataaattctgggggacgagttttttgaatttactttttaattgccgttgtgctcactgttacccgacatttgcgccaatgtccaaaatcgggtttcaaacttaagttttttcaatccctaaatagcctaagcagcattaaataagcgattgaaagtgattgtgtctgataattagatagacaagtgattattgaaaaaacaatcattagttattcaaacaacaaaagtaatgggtgctcgtcacactcaccctgatcaccaaaaattatgctccgatcgtcgccgagtgtctcaatttcctcgccctcctcgtcgtccgtttcctcccatctcatgcggttgttgcctgcctccagcagcgtgtcggcattttgtgccaaaattgccgccgaaaattggctggcatttgcggcaatgtcactgttaaaatttaattggaatttaccacaaaaaaaaaagatttaaattgttgcgctttaattaatttatatggaagattggcattaataatttatggtaaaaacaaattgaaagagtatcatggaaaaaacagcaaaaagggaaaccaaataaaaattttttttaataccgatagaaaaaagatttcgcatcaaaatgatcatttttagtgcatttttatttgaattttaagccgttagttagcctataaaaattcacataaattatggtcttgatttgaggcatttgtgattattagttaacaaaaaattggaaatattaaacaaatatttataaaaaacactattttattgaaaaaattaaaattaatttgttaaaaaactgactttcccctgcattcacgctcttcgtccctgcttgcaccacgctgacgcaacaatgggtccgaaaaacggcgtgacacgccacctgcgaaaagcatgcccgtacgtgtaatttcaaaaaaaaataaagcgccttcacagcactgaagcacgaagtgtaaagcagcgctgcattg

SEQ ID NO: 27281 - DNA, 1394 bp, Heterodera glycines
  unsure (1)..(1394): unsure at all n locations
aaaaccatcnaaaatgggcgttagtcaaaaaaccttcaaatgaaaatattttttcatataactttgctcaaaagcaaccaaattttaaaatcatttgtttcattcgatagtcctaagtttttttttattatcctacaaattttcaaaaagtttcgttaagtttcaaaatagttagaccaaaaatgttcaaaacttgattgttcttttttgaaacttaatgaaattctatgaaattctgcaggataatagaaaacacttagggctatcgaaagatatcaagtattttaaaatttgattcattttgggcgaagtcatgaataattttttgtcaaaaatttccaatggtttttgatcagcaccgtcaaaaccgtcgacccaacagatcatctcacttgttgaaccatgctatagacatatgttctattcgtaaaaagcatgatcaacgccttttaattgatgctatgtcgttttataaaacccatcaaaaagagggcattatatgaaaaaaaaaaccatcaaatggaaaattttaacaaaaaattattacccataattttgctcaaaaacaattaaattgtttaattcttgatataatttgattgccctaaatgtgttttctaatagcctgaaaagtttcaaaaaattctccaattttgacaaaattatggccaaaaatacccagtcaaccagcaggttttcaaacatttttggccttaattttttcgaaacttcgccagatttttttaaactttgcaggctactagaattcaattagagctatcgattgataaacaaaatttaatttgttagttttaaaaaaattttgatcagaatttttgatggcaaaaatttcaattaaaaattttaaagccctatgtgttttcctaatagcctgcaaaatttgaaaaagttggctaagtttcaaaaaagttatgagaaaaatgttttgaaaacgtgactccctgtacacttttttttgccataactttgttcaaacttgacgaaatttttgaaattttcaggcaattagaaaacatttagggctaccaaatgatatcaatcaaaaaatttatcattcagaggcccctaagtggcaaagatatgggtaaaaatttatttttgaaattttataacgccaaccccctttttgatggattgcttacaaaaacggcataacaccatagcaacaacatctaacacaacaagcgcaaagcgtaaacaccacatgataaacaagtacaatgagagtgaataaataataacatgtatggtagtaatacattttgtccttgaccgtcggatggcatatgcattcagatgagcattgtatagtagaaataacaggatgacaatgcccaacttccatagggatttacggtagcaagcactcatta

SEQ ID NO: 27282 - DNA, 624 bp, Heterodera glycines
ttttggaaggaagtcaatgatccttcaaaagtcagtgattcattttgccaattggcacattcagctcattcattcaattcattcattcattaattgattcggtcggacggaatttgaacggcaccgcccaaagacattaaacattcccacggaaaacaaaacaaaaacagcagaagcagcagcagaacggcaaaaaagtgaaggaattttatcaaaaggaaaaaggcgtcgaaataatgagaaaagacagccgacgaatgaatgagtgaaaagacatggaaaaaggaagaaagaaatcggagaaagaaaaatgggaggggggagggaggagaagagatgggatgggattaattgaaagtgagcggccaaatgggcaaaaatggaagaagcataagggaggaggggagaagcgcggggggaggaagaacggtaggacaagcaaaacagacaaaggttgcgaccaagggatgtccaaccaacgtaaagacaagcaaaagtgggggaaggggggggcgggggacaaatggggggggagggtaattacgaaggccaataatgacttagtgaagcaattaattgagcaattagtatgaaataataacaaaaaaggagcgaggaaagaaa

SEQ ID NO: 27283 - DNA, 877 bp, Heterodera glycines
gcactcttaatgatgttaacagaaagtaactaatataaaaaactgacaaaaaagcctaagtctaggcataagcctaaagcttaggcctagtctaagccattgttcgagttgcctgtgcatgagttgtcatgataccttaggtctaacaacgaactttttagttaaaaacggacaaaaaaatagttttggctaaaataccatggaaacagggacggcacggaatcccgatttccgaaaattttttgaggttcggaatgccatccccgccatggacacaaaaagtcatgggacgcgtaaaatatgttgggacgcgtaaaatgtgatgggacgcataaactgttgttgggacgcgtaaaatgtcatgggacgcgtaaaaccgactagaaccaaaagattttggtgtttacaattagtcaaaatggaagaaacaaattttaatacagaatttcacacgtaaaagtgtttgaaagaaatacaacgagaattttcggggggggggggggttaaacatgtagaattagacttttggaaaagccagtataattattagcaggaaaccctaacaagatttttgtgcctagccagggcttgggttttttggtgtttgaccaaggtctggtttcctggacaaaacctagatccaagaaaaatccaggcatgaatgaatccaggtccaagtcgtgcaataacattcatttgttgtttcgagcaatgccccaaattaggcaccttatttggtacttatgtattatctatgtgcagattttcaaaaaaaaatttctgaaaataaacttttttttaggggttttcagggtcgggaaaaccgattctggcatccattttggcccaaattcgaaccccgaacccggattcgaac

SEQ ID NO: 27284 - DNA, 1204 bp, Heterodera glycines
  unsure (1)..(1204): unsure at all n locations
ttaacaattgggtgtgaatatttntgagatgcaatttttcttttcataggaaatatttaggagcacaagtatgtgcccggttagctcagtcggtagagcaccagactcttaatctggttgtcgcgggttcgagccccgcatcgggctttaatctttttatgattttttgtttcggggtttaaaattaatgtttcgttaaataatattaaattaaattattacgttatattttcttttattatcattaagaccctttttaaatataatttaaagttgttgctaatcattttttatgttgatttatttaattgtaaataaaaagttaatttaataaattaatttgctacaaatttattccgaatcctcaaaaggtaatcgaagaacgttctgagagttccccctggacatgggtcggtgcaatgttttacgcgggccaactgtacaccaccatcggatatggtattccgatcacccaaacttcgggcggtcggttggccagcattgcggtgagaacattggccattgagtatcgaggcaattgtccccgtcccccctgtccatttcagtacattatggtcggaattcctctctttctgatcattttgacggaaattggtcgccttttgtcgcgcggacttcggaagctctacaaaaaattgcacgctgcgcggaaaaagctgccggaagcatcgcgaaaaatgagcgaaccgatgcgcgtaagttggaaattttagaaattaataatttgcccttgggtaatttaatggcttaacaatgggcatacattgtcgacaattattgcccattttccccaaatgcatcaaattgctccttaggccatttaccatctgacggccgcaatggccggcaccgccgtgggctccgccgccactccgatgataaacggcgcggtgcgcggcgaacttttggtggaggaggaaatgcgacggagggaagaagagagaagagacgctcaaaaagcattggaaaagctgaagaaagaggcgcaaaaagcggcggagagaggcggcggggaaccgccgcagcaattcccaattccgtgggcattggtcattctgctgatgtggacgatgctcagcgcggcactcttttgcatttgggagaccgagtggggctacatgacctccatctacttcttctttatcgcgatcaggtcaacaacaacaataattaatgaatcaat

SEQ ID NO: 27285 - DNA, 1095 bp, Heterodera glycines
  unsure (1)..(1095): unsure at all n locations
cttcatcgaactggctcttctattctcattcaatcgctccaaatttttttacagcttanctaggccctattaagcttatttccagaaaatctcgcatgaattctcatttttaaaatttttatagatttttaaatgtttggattttttttgccttaccaaaacttcatcgaacctggctctttctattttcattcaaatcaccccaattttttttacagtttaactaggcccaaataagcttatttccagaaaatctcgcatgaattctcatttttaaattttttatagatttttaaatgtttggattttttttgccttaccaaaacttcatcgaacctggctctttctattctcattcaaatcgccccaattttttttacagtttaactaggccctattaagattatttccagaaaatctcgcatgaattctcatttttaaattttttatagatttttaaatgtttggatttttttttggcttaccaaaacttcatcgaacctggctctttctattctcattcaaatcgctccaaattttttttacagcttaactaggccctattaagcttatttccagaaaatctcgcatgaattctcatttttaaattttttatagatttttaaatgtttggatttttttttggcttaccaaaacatcatcgaacctggctctttctattctcattcaaatcgtcccaaattttttttacagcttaactaggcccaaataagcttatttccagaaaatctcgcatgaattctcatttttaaattttttatagatttttaaatgtttggattttttttgccttaccaaaacttcatcgaacctggctctttctattctcattcaaatcaccccaattttttttacagtttaactaggccctattaagattatttccagaaaatctcgcatgaattctcatttttaaattttttatagatttttaaatatttggattttttttggcttaccaaaacttcatcgaacctggttctttctattctctttcaaatcgccccaaattttttttacagcttaactagaccctaattaagcttatttcctagaaaatctcgcatgaattct

SEQ ID NO: 27286 - DNA, 1334 bp, Heterodera glycines
aaaaagcgggagtcgggagcgggatccggtaaatcccgcgggagtcccgatcccgccggactctagttaaaagtaataaattttatttaaaaagtttaaacaaaataattgttatgaatttcatgtgaaaaaccctttaataattttaaaataaatgaaaaaattaaatatctgctgacaccaaatcaagagagaatgaattgcaaaggaatttaaaaatatgaaaataatcaaacttagggtgacgggcttaagattgagggtaaagtttctataaattgggataaaagggcagacagtttttcgtttttcttttattataattaatgaagatagtttaattaacaacgattataaattaaataaatcagataatttgcttaatataaaattaatttagcaattataaagagttattataacagcggaataattattttattgtaagacgcaaactaataaaaaatacaaaaaacggatgcattgttgatagtacaaactttgcagcgaaaagagagggcttcaagcaaattattaaattaaatgaaatatttttaaagaaatataaaaaaaattgtatgtagcaaaataaaaattaagaaaaactgaaaaaattagttggtttatcaaaaaatggtgaaaatcaaacaatgcgggaaatatttttatctttaaaagttatatattatatatttaattttttgggaaaattaaatccatatttttacaaaccatcattttaaatatcttgaaaaatatataaaaatatataaatctaagacaatataattaagatacaatacgaatacgaattatagaacgcattaagtcataacaacaactcgagtgggatggaacgatatttaagaatcaaattgtcattatctcaaacctaaaagtaaaattaacaatatggataaatcggataaaattaattgccacaaattatttttttttaaatactataaatctttaattaagaaatataatttaagaacttgtatttgattaaataaattgtgttcattataagaattaagataaaataaattatttaaaaaaataaaaaaatcaattttaatgagtggagcgcaattaaaagttaaaaagaaaattcgtgattgaaaaaaacgatacaactaaatcaaacatacatattccttgaaaaaaaccaataaaattctttttaacatttaaaataattcgaaaattttttgtccggttaattgaatagcaacaaagagccataacagccatgatatgtaaaaatttgaactaaggcataaaaaaatcttcatataaatatataatgtaaatttaaattaattgtcatc

SEQ ID NO: 27287 - DNA, 1362 bp, Heterodera glycines
attaataaggatgggaatttaagtcacaaaaaatctcaaaaaaatcgacttaaaaagtcatgaaaaatcgccaaaaagtcatgaaaaagtcataaaacgctaaaaagacacgaaaaatcccaaagccatgaaaaaataagcaaagagtcacataaaaatgctaaaaagcacgaaataaatcaaaaaaagtctagaaaaatcaagcaaatataattaaatcaatcctttagaagaaagtaaattaaaacaattaattttaacgaaataaaaacccgccagatttttattttatttttcagttccgtcatttgaatccgaatggtataagaaatttcagtacagtctcgaacatttacttatatatttttctgaattttattcactaaaagataaattttgccttaaaaagtgacaaaaagccatgaaaaaagtcataaaagtgcaaaaaagttataaaaatcttaaaaagtataaaaaaagtcacaaaaaatgaagttagaagcttcaaacaaggtttagaacttttaaaggcattttacgatatttagtcagcaaaaaaaagtcatttgacttaaattcccatccctacttattaagtgaattattaaaaaaaaattttacctaatgcctagagaagtaaatcgaattttgtccggcagcgcatgttcaggcatttccatagacacgtaatcaacttttaactctgaaatttgtggggtcgtttcttagggttgtatttttggtttttattgcatttttgtaaatattgtaaattttagcaaaacgaaataagttttttcaaattttttaaagtcggtttttaggggtgtattttcgtgttttttttaaaatgatctgttttttttcatttcataaactcgtttgttatttttgcaaaaaaattaatataatatttaaaaaaaaataaattttttttcaaaaaattctgataattccaattgaattttccaaaatattttctcacattttcctaaaatggcagttcattttgttttttctttttttcgacgggcggtgcacacagcttgattttttaaattggtcaatgaatacaaaaataatcaatcttgttaaaagtaaattacgatcggaatatttctgaggcgaaaaaatcccaaaatacatatgggccaaattggagaaaaatagcaaataggggaaaaaatgacaaatggcaaattcacacctgtggcgaaattttctaaatttttcagtaattttcaataatccaaaaaatgggagaatgtccatcaaaacatcaggacaaattcaactgaaattgtgaaaaaaatggggagaaacacagctttacttttttaattgatgtgaataaattgatgg

SEQ ID NO: 27288 - DNA, 1114 bp, Heterodera glycines
taatcactacacaaaatcattcgtccattccccaaccaacgacattaagcccggcttctgtcgctggcattctccagcgctatgaaatgcaacagtttcggctgagttgcgccaatttcgagtcggaatcgagctgttgctcgacctcacaacagatggagtactaaataaaactgaattaattatttttcaaaaattaaactaactttgccccgaattttcaggataattgtcgactccgagtcggactccaatctgacgcggtgtccgtgttgtcgctgtgcccaagtgaatttgatctgtgccaactgtctgaacactaatgttgtccgaattggcaaagtgcgggaggacaaacggcgtctgttgaggagcaaaagtgccatttgccatctcatccagaacgcactcgccgacgaagtgagtcccacccggggaaaggcttttctgatccggtcctgttttattgccataggtggacaaggggcggggggggggggtcaatttcgtttaatttttggcgaaaatcgaaaaaagcattgttaaagacaaaagtctatcaagttttttccgatttcataattttttttattaatttcttttgcgtttctccaatttcgtaaatttttcaaaagtatatggtagagagttaatgaaatcgccttaaaaatagcaaattcggtcacttttcgacaaaatctattaacaaagtgtgataattcggcacctccggcgcgcggcccaccccccgtcccctaaagttctttggaaaaagcgccgcaaaaaatggggtgaacctaaaaaaaggtcgtcggaaaaattttgagtgcttttttcaatttcgtagtttattcgcttagatttgagtcatcgattttccattccattccccggattgcctgaaattcttcggtctaaatgaaacatttgtaattttcagatcaaattcgagggtgaatttcaccagctcagtcgctccattgaagaaattcgggcgaaaattgcgcacaaaaaggaccaagttggacgacttagacaacgcatttcgcacacggaaagtcaaagtgagcgcaatcgacagaatgtgctccctctcgaggtcgcgttttttttg

SEQ ID NO: 27289 - DNA, 684 bp, Heterodera glycines
  unsure (1)..(684): unsure at all n locations
tttttttttttttttttttttttcacctttttttttttttttttttttttttttttttttttttttttttttttttttttttttttttttttttttttttttttttttttttttttttttttttttttttttttttttttttttttttttttttttttcttttttttttttttttttttttttttttttttttttttttttttttttttttttatctataattgttagaggtttgtgcttgtatctttttttttttttgaaaagaaagaattttttgttttatgttttttttggcccgccggcccaattatatttattgtgtttttgttttttttcttttttgttttttttttttttttttttttttttattttttttaatttttattttttaaccgttttatattttttttttttttttttttttttttcccctttttttttttttttttttttttttttttcgtttttttgtttgttttttttttttttttgtgtttttttttgtttgttttttttgttttttttgcccttatttttttttttttttttccgtgcccccctttttttttttttttttttttttttttttttttttttttnncccctcgtttttttttttttttttttcttccccggccgcacatgttttttttttttttttttttttttttttctttttttt

SEQ ID NO: 27290 - DNA, 707 bp, Heterodera glycines
gagacgcagttggccccaagacgcagttggctcagacgcattggccagacgcagttgacccataccgggggggacgggggtgagaactttctcgcccccggggacgggggcgggggtttgtttttaattagctccaaaaaatctcacaaaattttttttttttgaatgatgtgtttggctccacattcctttattcgatgtatcgcctcgattcaattcttttttggtataatttagagtccggtaaaaaaaatttccgggagcgggatcgggaatcccgtgaaaatcccgctcccgttaaaatcccgcagaaattttacgggagtcccgggcgggagcgggagtaattcgaaaatttaattaaaaactaacaaaaatatttttaatgcacaaatttgaaggaaaatccttttattaaagaaaaaatagacagaaaaatttagtaagcagaaatttgaaattaaaaaatcatatttttggtcgaaaatcagaaattttttcaaattgcttcaaataaattttttaaataatttatttgttgactccctttattaattttaacaattttttgcggcttattttggtggtgaccagggtggaagagggaggccggcggtgccgataggcgccgcagggaaaaaaaaattgaatatttaaatacactgtcagattatgtccaaaaatagccaatttttgaaaatttgagg

SEQ ID NO: 27291 - DNA, 1830 bp, Heterodera glycines
  unsure (1)..(1830): unsure at all n locations
actatttatttatatataaacgaacnnaagttatattcaattttcttatcaaatcaaaaaaaatacattaaacgatttaattatttttgcttcataatacaaaattttattaacaaattaaagaaaaatacatcaaacgatataaaatttgtttatttttatttttttttaataaaggttaagttttaaaattttgtttcttaaaaatctgttgctttttaatttaatcattataaatttattatatttaatataattttttaaaattattaatactactttggtttaaaatgtttgttttatttctgtatttaataaaagacaaattttttaatgttttttattactgttaacagctaaaatttaatataattgattttgttttttaatgtatttcttttagttttgattattttgatgcataatttatccgctgcagcttatataatttcaataatttttaaaaatatttctttcaatatataatgcctaggttttatcaataaataatatcgaataaaattttaacaaataaacttccattattctgttcaagaatgtctttatttactcaaaagttcataaaataaaaagaaaattcaaaaataaacaaacaggaaaataaatatcataatcaggcaattggtaatctcgtaattatctaacaattattgttttcggtatttttaataaattatttaaaataatttaaatttcaaatgaataaaacttcaaagtcaaagaggaaaaattattggaattttaaataaattttaaaaatcccaagttttttcattttaaataaatacgacattgaacttatgggttttgagcgtgaaaattgcattaaaaattaatggtaataaaaagcattttaaaatttagaaccctttttaaagttaattcaaaattaaatgtgattctgaaatacagtactaccaaaaaagttaaaaatatgtaccaatatgtaaataaaaaattttatgatttttttttggtggttcataaatattgtattgaaaattaactttataaatttttcaataaataattaaataaattaattttaataaaagttagaatgtttcaaaagaagaaattgcacaattatttttatttcttgtatttatttatttatctaacatgataatatcacatcatttttaaaatatttttatattattattattattattataattaaaataaaattattatcatttaataaatctcatggaatgtcatagcgcttgtggataaccgtgtagaagccattccagttgttgctttaacgtggggacaaaattgggactttcattaactgtttaaaagcttttcgatggattattataataataatttatattatattacttattttgattcaaattatattttttaattaaagaatctttatttgctagggttttttttattattaaaatgcttattttgccttacatttttttattatttcttttagattgttagctcgaatttaattgtgtaaattgtaaaaaaaaaataataatactatagtaatttttcttttgttattatcatagaaagttttaaacgagtgccaacaatgaggtcaaaaaacaagaaaacaaacaagagatttttattagttatattattaattttttttttgaaaatgcttaaagattaattaagcttttgattagaatttaaagtatgataagtttcttggttttttcttaaatttgaaatttcttattcatcataaaaatatataaaacacttattatgtaattagttaattttttcattttgagattaagaaaataaatgatatttattgtcttt

SEQ ID NO: 27292 - DNA, 1179 bp, Heterodera glycines
  unsure (1)..(1179): unsure at all n locations
ctcaacttggccctaagaaatcgctagaaaagggcaactgcagccaaatggccggttgacggaccaccgaacaacagacattcattttggtttttcagattgtgtaagcgtcaaaattctgaatgccggagcatggtcgaggagtcgagaccgttcgcacctgactttgccacgggaattggaggatttgatcccggaagttgaggacttctacaaaaagcagcactgcggacgaaagctgaattgggcccaccattggtccacggggacggtaattagcaaattaacattgaaacaaagttcacaaatgccgaaggtttcgttcaccagcaaagcgggaaggttcgacttggaagtgaccactcatcagatggccattttgttctgttggaacgacagacccaacgacaaactttcctttgcgacgattcgtctcgcgactgaattgtccgagggcgaattggcgagaagtcttttggtccgttctccgttttggctgcttttcactgctttcctttctttcagactttggtgaatttccccaaagtccgaatgcgactgatcctttgcgaaatcgcccaacaaccgttgatcccgaaaagcttcaacgactccactcttttttggcttaatcacgagttttgcctgatcaaagtaaaaaaaagtaacaattgacggacgatgcgattgatctgtgcattgtcagaatgagaagccgcaaagccggggaaagattaatctgatcggccgattgcaactgaaccaagacgcaggcattgagcaggagcacgaggagatactccaactgaggactttccgggttcaagaagcgatcgtcaagataatgaagacccgaaaaaggctgaaccaagtcagagacacgagcaaagggagggagggacaattggcacgactaatgacccaattaaggctcaattgcaaacggaattggtcgatgtgctcaggaatatgtttttgccctcccggaaactcatcaaggaacaaatcgagtggctgatcgagcagaaatttctgaagcgggacgacatggacatgaacactttcatttacgttgtttgacttcgaaagtgcgcgtgcccggaaaactgcatattttgtggcatttggtgactttgccaacaatgaattgattgattcgtanaacataatttgtcattt

SEQ ID NO: 27293 - DNA, 1562 bp, Heterodera glycines
tttttttaaggagttctctgtcttaatgtacaattttttgatcaagaaaatctcatccggcataattttatatttacgtttattatctcgagatcatctgaaaaatatgtgataattgaaaatgttttttctttgtcaattgctttttatgttgtttattatcgtttattttaatgtaacaaatcaatacaactgtaatttgtattgtcctgggaattatgcagaagggtaaagttaatcataatataaaataaaattagaaacattttttaattgtcacattagtaaaataattaattttttgctcatttctcatgaggggagggggggggggaaagggtggaggagggagagctggtcccgattttatatttttaaactttgtgaaaccatttggttggcatccacgaataaatgaaacggtacggatcaaaatcgccaatttaggcgtaaattttgtcctggacaagaatgtttgttacgagcagccacataccggtggacaaacaaaccccttttggcccttaaattgaagtaaattgagggggtggaaaatttttaaatttcgtatgaaaagacaatctcgattgggtaatgtcggaatttttgaaaaatgcatcggagtagctagccataatcaatagtctctatttagctggaaaattataaaaaattaaaaaattcggaatcttgttaaacatcaaaaccaaatgtatcaaatttatgaataatcgcacatttttctgaagcacttcaacatgtttgttgttgtacttttctgcttgtggtaagtgtttgttgtttaacggtttggaggtacaaggagtagcagtgacagagttggccatcggttgggcttccgtcgtattgcgggaaatgacaaggaagatttgaataggaaaataaaataaaatttatttttatttaaaaattaaaaaaataacatgtattaagtggtttttgatgtatatttaattaagtaaatttaaaagaaaatccgacaatccttaattcagatttaaagtttcaaaaattttgtataatttctatttttttcgcaaattagtgctaacacaaaaaactcgaagcacatagatcaatttcggaaaattaaaaagaagaagaatcaatagctcaaaaaatgaatgaaagaaatttaaatatttttacaaaaaataaattatgaatttgtggctttttgaaatacgcggaaaacataatgccaaaaatgtatacaaacaatctttagtcactcattggcaatccgtccttttttgggccagtttgaccaactccttcgtggaggcactgcggctggccggctcattcatcccgtcatctccatgggtaaaatgtcaaattgttaattttaaaaataattatagcataaaaaaggaaaataaaactttggcaaattggagtgcaattgtaccaaatacggttctcagctgcttgctgctaattaatgagttttttcaggcgtccaggccgcgtgtcgttcagtctgccagtgccaagaaccgtcactgaattgccaagtacgaaattaatagtaaaacatt

SEQ ID NO: 27294 - DNA, 494 bp, Heterodera glycines
tgaaagaaaattgagaattttcaaaaaccaataagtttcttcctgaaaacactgaccaaataattttatttctcaaaaatttagagagaacaatagaaatttcgtgaagaaaatcggcagacactcggttgatgtttttatttcaaatttgtttttgcttttaatttatcttccccttcccccttttttaccccctctttcacccttccctcctcattaccccctcttttcctcctttctctctcccgcttcttttccgacctcccctcctctcttcttgtgctctttgttattctctaatatgtaagttcgttctcacatcatccgttttggccaaatcgtccacctcgtcgtcccatatttctccgattttcttcccttactcttttctccattcctttctttttaacgagtttgacgaccgggacacgcaccaaattcgtggccttgggcccggcccctcttttccgagttggggtgggggaggggggggg

SEQ ID NO: 27295 - DNA, 2182 bp, Heterodera glycines
  unsure (1)..(2182): unsure at all n locations
aaaactgcccaaatcaaaaggataataaagtaaaagatccctaaggtgcaaagaaaaaaaaattatgttttaaaataattcttggaatcagtaagattgtagcttttaaaatttgggaaaatgcctgtatggacctaaaaaatcggaatctctaaactacaattttattaatacaatctgccaagtttatttctacgtggaatattgcatgattttaattttcttactttgcaatccaaactaaaactttaaaatataaatacataacaaaaaataaattccaaagtacttaaatgaataaaaaataatcagcctagaggaaaccgctgaaatgttggtcattcaacgaaaatatagtaaactaaaaaagaaatcacaaaatacaaaaaaaatgctattgatttacgtaaatttatatttatttattgtattgatactctcgcgaaagacgaattttttaattttttttaatttttaaccagaatatttaacttggaagagaaacattttttaattttttgccagtaaaattgatcctatcactatattagttagagacgacaaatccgccgggtacggtagtgacgtcacccaagccaaaaggtattggcttggtccctaacctattgaaggccacgacagatcttcgaccccagcgcgtgatcgctgacttcagctggtagggagggagatgtntgtgtttgctaattatttgaattagcgccaaaagatgctcgttaaatcgatcatcattttgaccccttcgttctgtccatttaaacccgcccttttcccccatccgtgcatttctccctcatttcatttgttgtatttccaatattattgtgaccccgctttctcccctcgcttattatattatatttatttgtgttgaaataaatcaatatttatttcattgactgttgacggacacaacaaaattttttcactattacacaaattatttattatcaaaatttaacaaactgtctggcaaataattttgctttaatatgactatagacatataaaccataacaaaaaccccgccgtgcagattaaaatatttctttaaaaaaagtaatattaagcctagcattaaatatttaacaattttgcaaaaatttatttaaaataaaaaatgctaatcaataatcttcaatttagccaaaaatatatttttatttccttgttaatattgactgatttatttttacattatatgcaaaaaataatatgaatatggaatatgctgaaaattctcttttttatataaaatcatttatatatatatatctctttttattttatactttttatatttttgggtttacgcctctgaaaatattagttcgacttaatttcagctttaatactcctaaaatataaaaaatctatttttttttgaaagtgagtgaatttcatttattatttcattacagaagagtgaacaaaatagtagtcttgatgttgcttaaagccatgataattattgttttaatatgctatgtgattagtaatgacaaagaaaaggataaagcccatacgagcattggtaatagtaaagctcataaatctgatctatattctgataaatctaatcttcaacctgaggatgctcaaattaatcaacaacatcttaatgctaatcgagatagtaacaaattcgatcataatcataataatggaactaataccaattgtgatgctaatcaacatgaccaacatcatcatgctaatggagttgatggtgattcggatgataatcagcttgatcagctttatgcaaatcaccaactcgttcaattacatgcaaatgggaacaatgatcaccccgaaaatgacaatctttatgataacaataacagtgataagtcaaaaatagttgaccttgacgatgaatttcgggatcagttccctgagctcaccaaattgccagaattaaatggagtagagtttgttgggaatcatataaaatacaccaatcaaccaaaaagcgacacgcataaagacaaggaaaattataacagtanaagaacttatcttagagaatttaatatttattnagttttcgtaagatggacggacacagcagaatcatttgacattgaaaggaagaaatagctgattaatgctatcaatgaaaagattatcggggtttaggttttgactggatcactaa

SEQ ID NO: 27296 - DNA, 1905 bp, Heterodera glycines
tcgtttacaataaggttcatggtaatggcaccggcacagaaaaataaaatcacacaaaatggtggatcaacaactagcacattacgcaacactcgtcgaaacagtggcggcaccaagacggcgttccacgtaaatcacggccaaaagtaacacggcacagaccaaggcacggaaggcacatttcacccaagccggccaatcactaacgtcatcgcttccacccgccgatcggtcgtgcacgttcagcacggtaagcgagaggcgtcgccgaaaccaatcgttcccgttatcgttgttgttgttcatccgtttttgacgacgttcgccagccatgggttgaccagaagcaatggcatttgaggcggcggtgacagttttctaaattttaaatttacttttgatatgacgcaaaacgttttggcattttgattaagtttttgttttaattaattagcctgtatgtgagtctcgctatcgcttattcgggggtcaattttagcttttggtatgccgaatacgttttcgtgattttttgaatattttaatttgcgctgtttgggagactacaatttctcttttggcatcgcacatgggttttggcatttatacaaggattttatctaaaataattagcgctgtttgtgagccttggtttcgattttcgcgtgttattttttgtttttgtgcacttattacctgtttaagacttttttaaatgggcttccaggtattagcctaacagaaatatgtttattaatataatgtgcaccttttgaaatcttgaaatattacaaaatataattaattaattacctgtttactacttaaaaagatgcgtaacgccaaattgaagtgtgccaaaagtttatttaaattttctttaattttgtcgccaataaatttgcttttgctgattttctgcttcaattcatcaattatatggtcaacgtcaacattttccagcaattgggttactgtaatgtccaaatttgttacagtattggcttcaatatgatttccttgcaccaattgttgacacaaattcattaacaattcccgaaaattggcatcaattttcaaatcagcgatttcaatgctacataaaatgccaaccattgcattttcctcgacccatacagtagccgaattacggtcaattttaccggtgatcagcccattgtagagtatttgtgccttctccaacatttcagttgccttcatgctgatgctatttttattatcactgctttcacaatgttgatggatcaagcttatcagcaaaagtattaataaaaaagatcgcatcattattttgttgttataaatgtttaaatattattttcaggtgtataaatttttttatgtttaaaatataataaaatttctaaatccaatttattattaataaaaaaataaataaaatcaataaattcagctgcgtcatttgataaacaaagacaggggaaatggcaccaaattaataaatgtttgccaatttttcaaggaaaatgaatgcataatttttatttaaaaatatgtttgcgtaataatatgctagcgtatttcgtaaatccgtcaaaatgggacctatttcggcaaaattcataaaatttactcaaaaagacaattttttgatagagttaagtattttctataagttacaacaatagcaaataaattttaaaatttcagaataattgtcatcagatcatcagaaattcacaaaatttactttaaaagttttatttatgaaaattttatatatttttaagttgtttattaatagataattattggggcgcttttttttttatcacaacgccgagatttaaattatggtggtgaatgaatcaattcaaagcgtgggcgctgttcgctcaaaatccgtgttttctgcatccaaat

SEQ ID NO: 27297 - DNA, 1880 bp, Heterodera glycines
aaatttcaccagcagatgtgccgaattgcgctgccccatatttgtctgtatgtgcttctctgtttgtatttgttggccggcgcgtgggccttcgcgcgcattgaacacaatgcggaacgcgcggaacaggccaaaaaattggaacgcattggttggtggtggtgggctacgatattaactgatatacagtacttgctcgattatagccctgggggggggctctattgttcaacccctctcaaaaggggggctttattcgagaggggggttctaattgagcaaatacggtattccaattgggtcacaatcactttggcttaaagttgaattgtacgagcaaattgcatccgcggcgggcagagcgtgtgccgtacgcccggacgaccgctttcgcaccggcatttatgcgtcattggcgcgcatttcgcaattttttgagggcaaacagttccgcttagtgcccacgctgatgaacgacgagcaaacgtcgcctgaggagcttcagcaattgttggacgaagtgctgccgccccggtggagtccgatgtcgtccgtactgtacgcactgtccatcctcactgtaacataccgtacttacattacacaccagggatggcactgcacgaaattctgatttacgacttccgacatttttggacctcgggattccgatttccgaaaaattgttgaccctcggaaatccattttccgttttagaccaccggttacggtcctacgactccactcactccactgggtcaatggctgtccatcggatacggacttttaggaatgttttccgctgcagcagaattgatgcccattcactaccgtaaaccctttacaggcattccgcttaccgtactcgccgcggtggacatcggtcgctttctgtccgacgtggtgctcatttcgtacgacaaatttctggtgtttggcacttttaacttcacttacatatttgtttattctctcacaatgacagaggaccgccaaaagtttgttggcattttgcggggttcgctgtcggactggcaaagtgatttcgcatgttgagacgaaggcactgcagtcgctgaaccgactgcagcagaaaaagccaatgtgagcaaagcgaagggggggggggactacaaaagtgaacaaataccgtaaacgaatgccagcaaatatattacggtaattgcaaaatgatttctgtgtttgctgatagggttgcattggccatatcgaagaagaaagggcggcaaaagcacagtgacgaacacggaggagaaaatgatggaggagcggcggacaaaatacaaaaagaaaaaggcaaaacggagcccaagggtccgttttcaggaccaaagattggaccatgaccatttaatgaggtatttgtggctttatgagcaattaacgtcccctcagggaaacgtcgtttgccgctttccgtaaatgccgccattctgttgcttttctgtatgctcggcggtgtcgtttacattgcagccgcgggcagtgaccacaatttcatcgaaggcttcttcgtcactttcaatttggtggccaatcttacgatgagcggtgaatgaatgatctcgaaaataaaatgacctttttggcactttaccatttcagaaatgccaaccgatatttctcggcttatgacactgatctacatttttgtgttcgttacttttggtaatacatttttacgtttcagtaaaataatttaatttaattttgcattttttatgactcgctgttttgtcaatgtgtgccgaccttgcggccagcgaactcaaatggtgcaaaattattttcgttctggcatggcattttccttcataaaatgtttttttcgtaaagggtgttcctgaaaattcattact

SEQ ID NO: 27298 - DNA, 1381 bp, Heterodera glycines
gaagcggcagagtgagttccttcggtgcaggaaaattattaaggaagagagttcattatttatttatttttgcaaaattaattcataaatttttatcagaaactgctctgaaacgcaccaaatgttaattaaaagttaaataaggctctctgatgctttttctatcaaaagggagatgaataaaatttttaaaaatttttaattcctttttaaacaggccaaaaagtttaggcttatattttaaaaagtttcatctaacctagcgcactaaaatcgatataatctctccaaattttgcaggccttctccattgtaaaggactaacttaacctgaaaaaatgccaacgcttgttgtttttaaaatttttcgaaattctgactttttcattaattatttattttttgcaaaattaattcataagtattttttcagaaagtgctctgaaacacacaaaactttatttacaggttagtttaggcactctgatgctttttctatcaaaaagggagatgaataaaatttttaaaaatttttaattcctttttaaacaggccaaaaagtttaggcttaacttttttttcagaaactgatcagaagcgcaccaaactttgcagggatactgaaaggaagagaaataacctattttaaatattatctagtcggttcatttaaataatttttatccaaaaaatttttttttgggttttcggggcagtccccctgaaccgatgcgcccagatttatggggagaccgaatccttcgggaatagcttccctatagcctgtactttaattctgcgttggatttttgctccccataattgtttgagtaccccaaacggacacttgaaaaaatcgatttttttgttttcggggcagtccccccgaaccgatgcgcccagatttatggggagaccgaatccttccggaatagcttccctatagcctgtactttaattctgcgttggatttttgctccccataattgtttgagtaccccaaacggacacttgaaaaaatcgatttatttgtgttttcggggctgcccccccgaagcgatgcccccagatttatggagagaccgaacttttcgggaatattttctctatactgtgcactatatttgtgcggtgtatttgtgctccccataagtgtttgagcaccccacacggactcttgaaaaaatcgatttttttgttttcggggcagtccccccgaaccgatgcgcccagatatatggggagaccgaatccttcgggaatagcttccctatagcctgtactttaattctgcgttggatttttgctccccataagtgtttgagtaccccacgcggacacgcgaaaaaatcgatttttttgttttcggggcagtcccccc

SEQ ID NO: 27299 - DNA, 1224 bp, Heterodera glycines
caggattttttgggtttgaaaattaaaaaaaaattttgaatgactgtttggctatcgttttatttttattttcgaaatttcatattaaatttataccaaatatgttgtttttcaaattcaattactaactttacattatttgaataaattcgttttggttatttcaattgtcaaaagtaaaaaaattgggataggaagaataaaatagagaattaattcgtatttaaaaacctgatataaaattttttgttttaaaatatctataaggacttaaaatttatcattgattaaactttatttatcttttacttcaaattatcaatactttattcactcagatcctccccatttttataattgtatttttaatcatgttttgagtattttagtaagaaatgactaatatataggtgagttttcaaaattttattcgattatttaaatcattgttataaataaattttcaagaaatacatcaaattaatttttttcaaatattttaaaccatattcatcaatgcgatgattaaatataataatttataaatataaataaaaattatttttttgatcaattggcaatttaaaggaaatttcagtgagatatgaaaatatgaaacgtaaatgacttgtaaaaaaaacaatcaaataatttttcacaaattttgaaaccattatactgttgtataatatacaaataaacaaaaataaattttttacaaaaataaaacaccatacgcgcgatttattcagccgagtttatttccatgaatatgttaagtgtcacattacgcataatttaaacaaattattaagaaaaataaataaaatataaaaaaacaaacaaattaaattcaatgcattattaaaatcaacgggtttaaggaaagtgggctgtacatattttttaaattatgattataatatataaattaaatatatgtttaccaattaattttttcgttaacatttaatttgcattacaattatcattattaaataagtatagttttgaaatgtagaaataatttttcttttattattattcttacgtattaaaaataaaaaccttaaatattagtatcatatatatttttctgatatgatatattagattaaattttaaattaaataaaagcataactatgaatagtaaacaaaacacatttcttaagtcaagaaattaaatgataggaattttaataataaaatgatggaaatacat

SEQ ID NO: 27300 - DNA, 1380 bp, Heterodera glycines
acttttgcgcctttgcactcatccattcgaaattttcaaaacgaaaattaataaaataaaaattaacggatatttgtaaaattttaattgccaatttttttgaaataatgtacataaatgagttgcctatttgtcgcgtcggatgacaatttattatttgggaacaaatgacacaaaaattgggctcattttcatcagcaaaggaaggaagcattgtctccccatggcacagctgagcccacaattatctctacacaataataattcattttgccgttaagtctttctttgtgaattgcgaggaaaaagaaaattcgtaaatataattaattactatgagacgaagaaagaatttgaagctttaggctaggcctaggcttaggtttgcttgtgtctaggcttaggcttagtgcacacaatttttatctaaaactgctaccaaaaatttccgtctttaaagaaaaattcaaaaattttttaaattttattacagtaccggagaaaagtttatgagccgacttaaaatttttaatttttgtattatctcggaaacgaataacgatagaaattggttgattttttatttccgtttcatttttctctttttaaaagtgtcgcaccatttaatattgggatttttctgtgctcttaggattgagattaaaatttttttcttcgtgcgcataaacttttttgcggtactgtattattttttgaaatttagaaatttgcgtttcgttgtgtcaaattttttcattttttgttaatattttttgaaatttacacgcaatttccttttatcttttcttcatttttatgttcccatcactgctacatgaaaacccaatgttcaaatgacgtgtaacctacataaatatctaaatttaactagtttgtttaaatatcggatgatcctttgactaattaatccaattaacgatttatttcgcacatttcgacccctccccctcctccccatgttcatttttcctcctttttttgtcttgtttacgcattcccatattcctttatggtttcgagtgctaagataagagaatgagacaaacaacattcttgcttatataaggtacatagtatttatgttccttcgcatttggttgatggtttttgttgcataaattggagcatgggaaggtgaagctgcacttattcatccctaaatctctgacaaataaatgggttgtaaatctccaataatcacttctccgtcccttcaatctttcattgagttgttcacattcttttttattcattccctaatgtccgtccatccaatgttttataatacacaaagagaagattgcctctgtgagtgttcttctccatcgcattgtttgaccagcaagcagcaggtccact

SEQ ID NO: 27301 - DNA, 952 bp, Heterodera glycines
tttggttttctttgtcatggccttttcatttggccagccatttttgacaaaatttttgacttgaataatattttcatcgcgctcagaagcagcgactaggtccgaaaattttaatggcaattttgaaattgtttggccaaaatttgtttcaaaatccgtttcggcattgatcatggcgatgattttctcgtcttcggtctcatttcctttggcgattaggcgcgagagcgcatcggcttggccaaaatcctttgtgttgatgtattcgatcgtaaaatcgtaggccaacaggattaaagaccagcgaagaagacgattggcactgcactgcctaattccctttttgctgccaaaaatgctgacaaggggcttatggtcagtctgcaatgtgaaatgccgtccataaatcattttatggaatttttgtacggcaaaaattaacgccaagccctctttttcaatctgcgaataatttttttccgcaggggcgagtgattttgaagcatgggcaattgctttgatgtttccgtcctgaaatttgtgataaatgaccgctccgatgcccaattcggaagcgtccgctgcaacaatgatgtccatttttggatcataatgcgttagcagcaaatcggatgccaaaatttccttaatttttcggaatgcattttcgcatccttcactccaactccaatcaatttcctttttaagcaaatcgtcgagcggttttcgaatgaaccgcatgtttttgacgtattgttggtaatggtttaccataccaagaaatgatcgcagagatggaatgtcgtttggtgcaggcatttgactaattgcataaatttttgctggatccggtcggcgtccgtttttatcgataatctgtccgagatatttgatttgatcacggaaaaatttgcatttcgccaatttgacgcggaatccgtatgcctgaatt

SEQ ID NO: 27302 - DNA, 1853 bp, Heterodera glycines
ctcgtggagtcgtttttggtgctctcttggtggtggccatcttcgtttttggcgctatcccgaggatgaggccacaaaggttctgcaaataaataaaaagcccagaactctcccgaataataattgtccaggttccttgcgttcaactggacctggccagatgcgtcagtcaggtcgttgctgtgccgtcttccgccgcttcgtttcccaattcaatgcaagtggaatttttacggatcgacgagaaaacccatcagagagatggcgttaggttcgctttgggcgtttcgtttcgtcttttgctcattttttgctcattttcagtttgatgctgttcgctgccgatacgccggaggagaaggaacattggatggactgtatcaaccaatccattcgtcggtccaatgtttggagaggcgttcaaacgaaagtgctaattttgatggtgcgcattgtttgaacggaattgcctctctcattcatttatttggtggatggttcaaaaattattttattttctgattttgtcctgactttgtcgttcgcttcagacattttatattattgtttactgccctattccttgcacaaacaaaacgtaattcacgcatagaaatcccccgttcaggaacggattacttttactgattttatccatttcatttttgatttgtatgcttcgtttgaaatttcattgataacaattggtcctataacttgtattcgaatatttgatcgggagtaattatataattttctttcccatgactaattattgagtccttttgacggacaatccctcccaattcgctttccctttcattctctaaaatggtttacctctgtttacaaaataagggctcactcaatttacgcttgcttatttctactttttattccaattttagaaacaactttttcattgttttcaatttgtctcaattggcttttttggggggggtgactttcgtgggaagaataccagaataccgagccgtagtgggaagagtgagtggatttaattgtttatttggtgatggcttaaagtgtgcctgttcctttctgggacacaagcttaatatattttttaaattgtgcttccgcaaattataaaccgcaaaaaaagccgtacgagaccaaaataagctccttaaagtaaagcgatccgccgaatgatgtctgctcaatactttcaatgttttcttaccgtaatttctcatggacacccaaatccgagcgccctttgaactttgctattttcgttgttttttctgatcaatttttgtaattggttcccaattggcatttcccccccccctccagtccctttcttatgtttacggtttcgctgttttaaaaaatggagaataacgtcaaagccttcctcgtcggaagacgaacggaaatgcgaatgcatcagaaatgggcgctaatccgagcgctgttttcctttgatggctcttttcccgtcgttttcttttcacatttttagaaaaattgctcacaatgtcaacgcatgcacaatgccccagcatttaatatgcagcaaattgtttttgtgtgattaaaataatgacacaaataatgcgatgacgcgaaattgccaagacaaaaaaaagggggggggaaagaacacaatgaacttcgaggcgaataacttttggtataggcgcgtaatcattttgtaataaatgataccactagaaagcacatcaataaaaatgctataaaatgccaggtccttttttgctttttaaacttttgatcgactaaaaatattggaatgaattggagtaattagctacctaataagatgtaaggacacactaaaataaaaataaaaggcaataaag

SEQ ID NO: 27303 - DNA, 1226 bp, Heterodera glycines
gatgtgtaccaataaatagagagtgccagagaaaaacattatctttttttctctaattttttgtctccttttggcttactatctaatattttcattattagcaaaaacaacatttacttctctccatataactttttctcaatccatacaatctgcaccaaattttgtatatcgatagagaaaaaaatttggaacaaaatgtaagggtttttaagagcaaaaaaggattatctaaaaagttattcgagaaacaaaatttaaaatgctcatattttttttctaactcatcaaattgcttagcatttgcttagaaaaagcttctcatcatcaagagctttcgaaagataccaagattatccaatttggttggcaaaaaccttcaaaaataattaccaaatatcgtgattttttaatattttggacaaaaataaatgaaaatattcatgttgcacaacggactcgaaccaccaccctttgtccctttactatcttacaaaaaccactgagccacacacgcaaatcttttttggtacagcagctcagtttccggacgccgtgttaagttctagtgattttggataatttaaaattaagaaacgaatccggctaaaaaaattggttgcgttcattttaagtgttttgttcttttgcattttattagggctaaattttgtgattttagatgtttactggaccaaaaaaacatttttagaaaaaaccgagttttaagtaaaaaactaatcggttttttaaaaaaaaattttggtgcaatatttttacacatgactgtgtgttcttattttattaatatttttcttctgaatggcgttaagctacttttcgagttattagtgcctattttctaagtttttatttttaacgcctaaaaagcctaaaaaattttgaaagagcctatttttgactattttggcattttgcccatacacccctagaatcaactcaaaaattttttcaaaaatgcacccctaagaaatgaaaaattttcttaaaaatcgtctttaaaatttttttggacaatttttgaattcaaatattgattttgtagaattttttacttttttgaataagtttttgtcattttacacccctaaaaatgaggttttttagtgctattttccattagagcctacatattttggtggttttttagagcctaaagcctacctattttggcggtttttagagcctataaatattagccctaa

SEQ ID NO: 27304 - DNA, 1727 bp, Heterodera glycines
  unsure (1)..(1727): unsure at all n locations
cccattatcaatttttatgtgcctttcgtctgtttgtttcccccccncccccccgactttccaccgttccgttggcattgttccgtgtttttgtcattttcggtccgtctcatttgcttttgtccgccgtattgttcgtacatctgtcgtctttcttctgcacaaacagaagatgacgacgcttcgtccgattgccaaaagaaataatcgactgacgacggcgccggttgcgagtaatgtaattcttgcgaagtgtcggcaatggcaaaaggactgaacgcagcaacgggtggctgcaaattctcatcgtcgtgtgccttggaaatagaaaatgcttcattaattgtcattaattgcgggggggggggggggggcagtggtaataatttcgcattgttttgccatcaaaaaaggacaatctttcgttgaccacctgcacaaacgtagaggctggaaatggcagtgactgattgctgttgtttgagtggagaaaaaagtgcgattcgtccgacatttcctccttgaagaggggcgggtccgcgtacatcgacgacggctgtgaaatgttcgattcgtccgcgtactcatacctaaacaatgaatgaacaaccatcagccgactctttctttggtcatcttcgactgattattgagcgaggcgtgcaaatctcttgcatttttcactctttgaacttgccttatcgtcggtgagaaataagacatcggttggccaaattactgcgcgttgttggagcaattcggacgcattaagaaaaatacaaaacaccagagaaaaataaaagggtaattgaaatatttacaaaagaaagaaaattggtagaaaattaaatgatgaaaaccaagataagatctttcgaaatctgagttcagattcgtatacaaaaccatgatgtttaatcagcacatattttcatcccaggaaaaacaaatgtttaattatttttcgacgggaccccaattctacaccattgccgtacttctttatcaatttctaagtgtgtgactccgtttatataaaagtgccaactttttgttttggctctttaccaatttattatttcccgattcgattttataaaggaaattgccagggaaaagcgtaacgggggacggggagggagggagggggaaaggatggcaaatgcgcaatttgcatatgccttggaggacacttttcttcaataaatacagtacaaatgcaaattgaggaaaacacattcttcaccaaaaaacagcgagatcgaaccgagacagagagaaaaaaggggggggggcagagaatgcgaaaatgaaacgaaagttaattaaatacaaataaaaggatgaaaatttaaaagaaagtgtcttttagcgcctttattaacaaaattcgaaagaaggcaaattcttcttcataaagtggacattcaatgcaaaagaaaggacaaaagaaaaagatggtcagaaatgggccactggtcacccccccccccccgccggtcgacccatttcggacggagccatccatccggcaggcgcccagagacaatccccgcgggcaatgtctgttgccgcgggggagtggcgattgaagtggggaaggggaggaaggacatgtgacagtgatggcgaccttcagagagtgctcgggcggaggagagtcagacggaaaaggtttcccgccaatttctgccctgaccacccccgccccgaggcgagccctcctc

SEQ ID NO: 27305 - DNA, 1105 bp, Heterodera glycines
tgcagaaaattaatggacaaatgatcaaaattaaaattatttggtcataattaagaaatgaatcgcaactttttgagccatcgcaatgtgctcgtgcgtttcttaaattcgccaaagccaagaaaattaaaaattaacacatgtatcaaattgtcaaaaggaaataattgttttattctttttgattcgatagcccaatggttactgtattattttgaaattcaaaaatattcaaaaacttctgatcaacttaatttgatcttttggtacacccaaacttatcatttttgatccttgaaaggacgtcaaggcccattgacaaaccaacgttggaagcatccatgcctcgaaaaaatttaatgtttttttgttcaacttaactgaatattccgcttacattcaagtcacgggtctcgtgtttttttgggcctcggtctcgagtctcgggaaattttcggtctcgagcattactactactagggattgtctagaacagtgttcctccgtctgaatttttttactccggaatcccggatccagatccattgaatttggctgtcccaagcaaaatcccggcattttttctcattccgaatcccgaatctaatcagctgttccccttacatcctttgatatgttcgacgccttctccggtcgaagtcgacacactgttgcaacacaattccacgagattcgaacagtgccatttcagaacactgacctgaaccgcaaattttgatttatgccataattaatgaaaaaaataaaataaattgttttgagtttgttatgacgctttaggaagcaacttttgcagccttaattattttaattgaatttcataaatatttaaaaatttctattttaatgcatttattttaaaattattattcgtttttttattttccctgcatatttttgacgtaatgtttcgaaattttttgaaacccacgtaattgttttcttcactattaaggcccaattccgccaattcaggaaatgttggcaattgatgctgatcaattttggtcgtatgtacgagtcctaatcaaatatttcatttaaattgccagaaaataaatgttaaaattcactcacggtcgta

SEQ ID NO: 27306 - DNA, 926 bp, Heterodera glycines
ggcgtcagcgttttggtgaacgcgagaatgtgtttttcaatttttggtcgcatgtatctgagttttacccatgccaataaaatgttgctgacgtaaaaaactcaaaaaaaaatttggcgctagttaccaagaggtccattttgactattgttcctaaggttggacctgttgtgacgacaaatcatttcagtatgatacttgaaccgactacacatggtgatgagacgaaccagaacaaaacggaatccaatactgaacaaaatgcaagtgataattggtcaatgacgggggcaattaaaaaaaaggaagtaattaggagttttagtaaatttaaatggcaataaatgtcggttaataagtgttaaataattttgaggtgattttgattttttcatttgtaaattgtttaaatacttctttttaattacttttaataaaaatttaggctgatctgttgagcaatgagtcagaaaagtaagttgagattcccattcgtatttttatatataaaaaaagattttcacattttatcaacaaaaatgatttattctatcagtccaatgtaaactaatactttttaagcctggcaaaattcatctattgataaattcattagaaatatataaatcagaatattttaaaagcttcaattttaaaattaaatcttttcaattttttctctcaaattaatcttatttcaaaatcaaatctctttagaatggcaccaacaaatgccaccgctggtgtgccatcatcgtccaccgcttcatcctcagcccatgccaccgccgctgctgaagtggaggcggaaacacagctccttttggccgccgcgttggcgcgtgcgcgtgggaaacaaatcgcaaaacacccgccgccgaaagcggaggcacaggcgacgacactcggcgaatatgtgcatgaac

SEQ ID NO: 27307 - DNA, 1049 bp, Heterodera glycines
  unsure (1)..(1049): unsure at all n locations
aaattgactatctcttttctgctcacagtaataggaattccanccgcattctcagaataattacgccgatactaattgctctggaatttgtttctcggcgcgtttgtttgggaaaaatttggaaaattggctatctctttttctgctcaacagtaataggaattccaaccgcattctcagaataattacgccgatactaattgttctggaatttgtttctctgcgcgtttgtttgtgaaaaatttggaaaattggctatctctttttctgctcaacagtaataggaattccaactgcattctcagaataattacgccgatactaattgttctggaatttgtttctcggcgcgtttgtttgggaaaaatttggaaaattggctatctctttttctgctcaacagtaataggaattccaaccgcattctcagaataattacgccgatactaattgttctggaatttgtttctcggcgcgtttgtttgtgaaaaatttggaaaattggctatctctttttctgctcaacagtaataggaattccaactgcattctcagaataattacgccgatactaattgttctggaatttgtttctcggcgcgtttgtttgggaaaaatttggaaaattggctatctctttttctgctcaacagtaataggaattccaaccgcattctcagaataattacgccgatactaattgttctggaatttgtttctctgcgcgtttgtttgtgaaaaatttggaaaattggctatctctttttctgctcaacagtaataggaattccaactgcattctcagaataattacgccgatactaattgttctggaatttgtttctcggcgcgtttgtttgggaaaaatttggaaaattggctatctctttttctgctcaacagtaataggaattccaaccgcattctcagaataattacgccgatactaattgttctggaatttgtttctctgcgcgtttgtttgtgaaagatttggaaaaattggctatctctttttctgcttcacagtaaataggaattccaactgc

SEQ ID NO: 27308 - DNA, 1579 bp, Heterodera glycines
  unsure (1)..(1579): unsure at all n locations
tttgcatttatttatctagttgtgcccantcccctctcgctcgtggagacatttaccaatcactcgctcgcccctttctcgtcactaatttttgtccgccaaaaaatttgagggggtttaattatccaagtttgaacccaacttgcaataaacaattttcgattttgtgtcggcaattttggacgggtgggaaaatagaaatggcgaggcacccgcggggcgattggagtgttgttatcttcggcccatttgctttggcatttcggcgcgtcaaactgaagtggactccttttcgcaggagtgcctattcagcgctctgctagcatcggagtgatcgcactgatcagaacgggagcccagtcctgattcggaactcccaagcgcagtgatttggacagaaggtcagcacgccagcagaggtgttgacaaaagggttcagactttgagaggtcaaactcgggagcaccgatctctccccaagtttggtcgatggtgatgtaatcactcgtgggccctaactttgtttgcctcctaaccccctccatgtccaccctcttgcgaaagacggcagcagagtagtgctctccgagagtctcggtctcgagtttgtaagtctcagtctcgactttcgagacttttttacacccctaatgattggcttttttaaaatttaaaattaaggtaattttggcaactttctgcttcatttactcattcatatgcatggtctagtgggttgtgctcttggatgttttcttttttgttgtgttggatcagttccccttcaagtagttattttttcttctaatttttaaaaatatacctttttcgatgggaattcgatcacaaatttaacgattaaaattagggttgttcccctgcatgtttcggggagttacgaaagtcgtaaattgcacttgaaatattttggtctcgagtttgggttcctctaagcaggaagccttcagatttagcctaaattgttcagcagcaaataattttgcatgttttttcgttttttattttgtagcctaagacaaaaggaatagattagtcgttaattttaaaataactgcaaactacgatgtctattgacaatattccttatactttccgattcggccatatttatggatatcattgttgctgctagcttttatctctgatgtcctcataaataaattagagatccatattgacaaaaaattatcttataaatgattgtcacggttggaagtaaacacttgagtcataataacaatggctgagttcctgtaaaaatacaaaatataattaaatttattataacccagctttggaataaataaaggaattttttgcttcgtgttgaacgcgcctttgggttcctataagcaggaagccttcagatttagccagaattgttcagcagcgaataattttgcatgttttttcgttttttattttgtagcctaagacaaaaggaatagattagtcgttaattttaaaataactgcaaactacgatgtctattgacaatattccttatactttccgattcggccatatttatggatatcattgttgctgctaactttta

SEQ ID NO: 27309 - DNA, 1708 bp, Heterodera glycines
  unsure (1)..(1708): unsure at all n locations
tagaaattccaaatgaatctcataaaattctcctaatttctttctatttttcaaactacattccactaaatttgatcaaaaacgaagatagttatgaattttcgaaatttgactggattttccggggctcaaatttagacgatttttcaaaaatttgtaaccaccttccaaaaagtctgaaaacaaaaataaagtatatattcgagttcagcaccttaaattaggccataaaaatgcattttggctaatttaggagcaaaaaaatttttcatgaaatgcaaaaccatggggtcccccctttggttttgagtttcaaaatcacaattaattttataactttttttaaattcaagataaaaacatgagataaagcacattagattggacttaaaattctctacaaaaaagctcttagacgattttttgataaaatcaactcctgacgagttattgcgccagaactgaaattgaggcctagcaaccaaaaattttctatttccaaaaaaaattttaaaaatttttctgaaaatgacaccaatcgatagagcatgaaaaacggttgcttgaaagtggtctccgttttccccggaaaaatctgtaaaaaataataaaattaaaaaacggaaaattttcgagggggcctagctcgaaaatttctgaaaatttcagaaatccaaaaacatggttggatagagctcgtcgagctgtacaaaaaagccgcttacaccgacctcctccgatcaaaccccggcgagttattcagccggcgctgaaatggcccaaaaaagtatgcaatttttagccagtttttcggaaaaactgacaagaccttggggtccggtcaagaaacaaaaaaaatccaaaaaagtccaacttaaaatcctatcgaggccgatttttcaattaggcctttaaaaaatttttgaatcccaaaaacggcaaaaaaaatttttaaaaagtgacttttctgggtcccaaattccaaaatcacttttatttctataacttttttcaaaaaagtgataaaaagctaaaataaaatttataaaatagagcaaaaaattacggattttttgagtatattatttttataaaatactttttcagaagggagttaggaatttttttctgaaaaatcgaatttttccagaaattctggaataacttttttatttttgcagatagaaattccaaataaatctcataaaattctcctaattttttgctatttttcaaactttattccactaaatttgaccaaaaacgaagacagttatgaattttcgaaatttcactggattttccggggctcaaattttgacgatttttcaaaaaattttaaacaccttccaaaaagtctgaaacgcaaaataaagtgtatatacgtattcagcacctcaaattatgccataaaaatgcattttggctaatttaggagcaaaaaaatttttcatgaaatgcaaaaccatggggtcccccctatggttttgagtttcaaaatcacaattaattttataactttttttaaactcatggtaaaaacatgagataaagcacattagattgggcttttaattctctacaaaaatgctcttgcatgactttttgctaaaatcaactcctgacaagttattgcgccagaactgaaattgaggcctaccaaccaaaaattttctatttccanaaaaaatttttaaaaatttttctg

SEQ ID NO: 27310 - DNA, 830 bp, Heterodera glycines
ccccccccgacattttccctcattatttcccattctcaccgttttcatttccccccccccctcctctccctctccccctattaatgtgattaataatgagtccctttttgccctgtggccttccgccaaaagctctttgtttgcttttccttctgaggctttatttgtatttatagcactaacattcttctcattccttggctttgtcctccgttttttttgtctccaaacactgaaataaaagaaaaacccaaacctaaattcccatgggaaaatattcattaaaaacaattatcaaattgaagtttaatgtaatttatgggcttatgtcttaatgtctgtttagactgtgcttttcccctttgctttatcttcttctgctttttccaattttgatgcttttccgtttgtttttccttttctttttcgtcctttcactctccggccaacacagagaaacagaaagaaatgtgccatatgacaggtcgtaaatttagacggattgccggtttggcggttgtaagcgatcggagacgggttttttgaaacttttaagaaaatgtgctcccaaattgaaaaagttttgagttttataggaggattttttgtaaattttaaaaatcagaaatatttaaataatcacaaatttcatccattatatcccttatcaattgatatgaattgtcagtttcactcatcggaagaagcccccgcagccgcgtcattcccagcaaattccgtcccaattggccacggaatttgtgccttcgaatggttcgacaaacgcattggaggaggagcagaacataatccaacgattgctgcacagc

SEQ ID NO: 27311 - DNA, 548 bp, Heterodera glycines
aaaattgcatttgatcactgatttgaattatgatcgatcggtcattcttaattaattcatttcttcttcttctgcggctgatcactgattttgttgttttgtccgtcactcatttggcccttttgtgatgcattgtccggcttcctcttccacttctgctggtggcggagacaatggccttaattaggcgcaattttaattatttaaacaaaaacaaatgcttttttaattgctcacccaatgcaattattggcactaaaaagccaaaagtacacattgttacaattgttgtcccaattttcatctttcttctgctgttgcttaaccgccgtggtctccccaattttgcatcgtttcattatccaacttttgtcaaattcatttgctttggcgaatgtctgcttttcctttgtccattcgttcaccaattcaaatggcaccatttgtattgacggcgcactaacagaaaaatgaatttcggaagtgacgtaagaaacggcatagctcacggagaaaatgctatacaatctgattgtataacaacaatc

SEQ ID NO: 27312 - DNA, 1301 bp, Heterodera glycines
cccctcggcacatattggcgacggctcgttgtagcacgactcgccgcacgcgccgatgatgccggtgaagcggcagaacatgtggtcgctggagtcagaatacagctccttttccttggccagcactttgtccaggtattctaaagatcaaaccaatcaattaattcaaattattaattaggtaatgatatgtaataattaaataattaccttgtgcctccttcggctcgtccttgaccttcacatattcgccattgtacaattcgcacaccttcttcctgctctcctccttcaactgcttgccgtacaagtctttcaggaggagaatctgaatttgatttgtattaataagctgggattttattcaaattggtcttgcgttattcaaaattcaaatgtttttcgaatcccatgccattaaataccctttgtcttcaatcatccttttcaagcagtacatgcttgtcatttctgaattcgaactctttaacatttctattctgtgctcaccatgtacgtgttcttgttggcgtagatgaagttgcccgagccgatggtgacgtacttgttgatcttgcgaagctcttcgtcctcctcctcctcttcctcctttgcaccgtacttgtctttaccgtatcccttctcctcctccttggcgcgcattttgcacacggcgccgtgcggtgcccagtactcctccggcttctcgcacaccacgtccatccacagcacatccacgccgcttttgtccagcgccgtctccagcgacagatattccttcactttgcgcggccattggccaaggaaaacgcagttttcgttctctttgttgtagccggccccgcctgcgttgtccatcgtcaacggccgtttgtacgcgccccactcggtcgggctcaagtagtccaccggctttccatccgtccaacttgccttaattagcgagtgactcattagtcattgcttggatcattaatgcttgtgcttctcctcggcttacatcctccagcttcttttcgctccatttcagcttcaggccaaaccaaaagaaggcgcggcccggctgtttgcagttgaattccattttgttcgcctccctaaggacgagcacttaaattggcaaaatattaaaagaattggcgttccgtcctctccccgcttttcttactgttcacaaattcgcgctccgtttcgctgtgcactgacgcgagttcggcaccttcagtcttgcacattttgttagcgtctgaccatggcaggctatgtccgggtttgtgaatgcctgaaaatggcaaaagaaa

SEQ ID NO: 27313 - DNA, 942 bp, Heterodera glycines
taattttgtgacgtgtcatccctcccccttattcatttgtttatttaagcactccttccttgcccacattgttccttctcccattcattttgctattttacattttgtactgcatttgacctccgacataaattgtgttttattattttattgtgtgtccaaaacagagacacaacattggcgcagtcagcagccgtgcttcacccattcgaagacacaccgaactgcaacccaacctcaacaaaaccaatagtcccaagacgggtgaggtccgctaaatttagcggttaaatttgacaaaaaccaatagaccctaggcgggtgaggttccgcaagacgcggttttcttaaatttcgacatccaatagtccctaggcgggtgaggagccactctgcgtggttaattgctgatcatcggacgagtcaaagccaatggaggccacccaactgcagcaagtgcttgacgcagtttttgcacgatttgccggaaatgcggcacctgcaaacacggcctcatcctcactggcacacgcgactctggccagctccttggacaaccggatcaccaaattccactacgattcggaatgcggcaacacatttgaccggtggtttaagcgatttggagtgctcatcgaagaggacggaaaggaactcccgaacagaccaaagttcggcttcttcttggcaaattgggggacgacgaatacaacaaatacagagacatcattagcccgtcccaaccggaccaggttaaatggggcgaatcgctgacaaagctcaaggatttgttcgccgaaacccgctcacttttcgtccgccgcttcgaatgctttcaaattcgacaaaagccgagccaagacatcacatccttggtggcacacatcaacgccgcttgtgaaaatgccgacctcagcttgacaaggtcacgctcaaggcaaa

SEQ ID NO: 27314 - DNA, 1314 bp, Heterodera glycines
ggatgcgcttgtcgtagccggagaaaagataatcgagcagaagggagtcgctaggggcagcggatgaagaagagaaagaagaagaagccgaagagggagaggaagaggaagagaatggcattggcaaatgggggacggaggaagagaagggcgagagagagttcatgggcaaagagtaagagggagggagggaagagacggcacggcgaaggacggagacaaatggacgaaaacggacgaaatgccaaaaccaacagaatgaaaccaaaacaaaaaaaattttgtttgtcagcggaaattgaggaaaagcaaaaattaaaaaggaaaagcaatcaaagcagaaaaaggcaaataaaacaacggacgaacggaatcggtgaagcaaaaagggaaattaataataatggccaaggcaaaagcaaaaggcaaaatttgggaaaggaataaattggcaaaagggaggacaaaaaacattcaatcatttggaaattcaaattgacgaaagggttaaataaacaaagctttgtcggacatcattttaacagcaaaagcgacggatgggaggacaaagagagaaacatttggcaaatgaaaagggggaaaggggagaagggaattcacttaggaagaatggatgttcttccggaaatgccctcacttttgggccattggcattttctgagggcgaataaaataagtgccaataaaaagggagaaaagcaaaacgaaaagcgccaattgatgccgttttgccgcacgttttgtgccgtgccgttttttcccgctgtgtgttcgcaaatcggcgcccttttcctttttccattgtccgctctttttggcctacttttttttttaattttccattttttattcatttaaaaatctctctccaaaagtacaaagcacataatttttctttttgccttttgttacgccaaccatcagaagagagtgtccggtctgttcttgatgtgctgttggagttgcggaagtgaaaacaccgctaaaaaagcacagaaaataaacaaagtaaacaatggcactttctatgcccgattaatgaaattgttgccccaattaaaaatgccattcaccgcggcagtggtgcaaaacgcgggggaatcggtcgaggatgtcgaatcggccaaatgtaagtgccaagtcggcaaaactcgccacgtaaaagtccacccaggtgagtttgtcgcccaccaaataccctcaaacgaatgaaacattcattccatccttggcaattgtttaaatttaaatgcctgtgttattggcctccaattgccgctcaaacattggccc

SEQ ID NO: 27315 - DNA, 1303 bp, Heterodera glycines
  unsure (1)..(1303): unsure at all n locations
atttcgaccattntacatgctcgggaattcgttggaaatntagtcaggatgtataatgctcggaataagaaccgtgattccagcaacattccggcccgaaattctccaactgatacattcggcacatccagggattgtccgaatgaaatccttggcacgacaaaaagtttggtgctaggattggacaaagcgattgaagaaattcgaaaatctttccggccatgccaaattaatgcttctgaggaacgaaaagttccattgcatccatgggaagaacccgaacggccttggcagcgactacacgtcgatttttgtggtcctttttggggatttatgtggtttgtaatggtcgacgccaaaacaaaatggccttggtcattaaaatgaaaaccacgaacacaatacgacaatttctgaaatgcgtcggatttttgccacacatggactccctgagcaaattgtctctgacaatggcccacagttcacgtcgggtgaatggcacgaatactgcaattcgcgaggcattgagcataccttgaccccttcgtaccatccgatgagtaatggagaagccgaaaggtttgttcaaactttcaaacacatgatgcagcgtcaaaaagacggaggagtgccatgtgatgaggctttgcaccaggttttgggactttacagagtgacacctcatccagcgacaaatgcatcgccagctgaaaagctattcggtagaaaattgcgtaccatgcttgatttggcacgtccaaccgatgagaacgccgatcagaataagccaaaactcagtccgacatacagagatcgaatcaaaagaaattttgatcggggaactcgagatcgaacttttgaaattggtcaaaaggtttttgtaaggaattaccgagacgggcctaaatggttccgtggtctgatcattacgaaaaacggggtaatttatctcgttcggactttgagaggcgtttggaagcggcacgcttatcagcttaagccggatctgacggtcgaagatcagccggacaacgaatccgtggacagcgactcggacgccgatgatcaacaacaggaggctgaagatgaacagaataatggcccagctcctcccgaccttcgacgatcacagcggaccaagaagaaaccgcagatcttcgacccaagcagcggatccttgataaggagggagggatgtgatgtattcatccccttgttcatttatcgattattttttgctgtcccttgacctctgcccctccccctctcatttgttatttaagtcttcctttctcccccttcc

SEQ ID NO: 27316 - DNA, 948 bp, Heterodera glycines
tgaaaaacgccggtgtccgccaatagaaattgttcctcctctatttcagttcgcttgtaaatacgataggtatttggaatttccaactgctccaaattgagaggttcggtccgcggtgcattttcatcacggcgtaatcgtttgattacctaaaaaacaaaaaaataacaaaattgtttttggatataaacccactttttttgtggcgcttttgctcggaaaagctgctagcacaggtgtgcatgtgttttgcagcacttgagcacgaatagtcgcaggtgcctcgcacgtctcagcagcacgtcgcttgagtccagttacaagtcgctgacattccacatgcgcagcattcatgtcgcacgaatgaactccgaccaacttctgcacaacgttatttaaatccgtgtgcaaacggcctgaattttaaaagatttgcaaaattcaaaataatatattaacatacccttgcatttgtctgacgggccatgaaactcacatcgccaaaatttcttaagtccatctgtgctcaattggtcgaaaacatagagtgcgccgtcatgttctaacttaactttgtttcgttttgttttaattttttgctgctggtccatattatataatttaaatagccttaatttagtttataaactcattaaattataaaataaaaactcgttagaaaaaagagtgaaacaaattttggtaaaatataatgtgagttatgaattctcttttatatgcaaccacgcgaaaacggccacgcgaaaacgtaccccacgcgaaaacggccacgcgaaaacggccctcacgcgaaaacggccacgcgaaaacggccacgcgaaaatggccacgcgaaaatggccacgcgaaaacggccacgcgaaaacgtcctggcccggcaataaaacatgaaaatccacttaaacaatattttattggcgtaagaac

SEQ ID NO: 27317 - DNA, 1344 bp, Heterodera glycines
ttccaaaattatgaaacgaaaaatgaacttcatattctctgttcagcacatcaaaataccccagaaaaatatttttcacccccattttcaacccaaaaaaaaattctgaaaatttctaggaggcctagctcgaaaatttttgaaattttccgggcatatagcacaccgttcgatagagcttaaaattctttacaaaaatgttctaagacgatttttggctaaacccaacccctgacgagttatgggcccgggactcaaatgtcccgctgaggccaaaaattttttctatttccgggaaaaaatcgaaatttttccgaaaaaaataccagtcgatagagctcgaaaaactatgttttggaagtggtcttcgttttcccgggaaaattcgttaaaaaatcctaaaattcaaaaacccgaaaaccgttttttaggcctaactcgaaaaattttgaaaattttcgaaatttttaaatttcagaaaatcgagcttcccaaactctacaataagtctgctgggcacctttccctcagatcaaaccccgactcggtattcgcctggtactgaagtgtactttttgagcacgcttcagttgccattttctgcaggccagggggtggctctattaaaaaaataaaaaataccagcatgtagaggacactttggcggggtgccctcgcagcgggcattttttgattcgagttttagaaaaaaagttacgggccttcaaacgcaagcaaaagtgagaaattagccgccgggactcagttggccaccggagcggaaaacctatagttttcccagatgcgcctcaaaaagttgtaagacccttccactactttcagggcgctcccggccttcggccgggagattttgtttttgaagacgaactgcaacgtttctctatagtaatataaactagcgggtgcgtgaaccgtcggatctggtacagggataaagcgcttcgcgctttgggagcttcgctacctagattagctctggttgtggagatttggaatttttaaaaaattatctgggacttttaggccgcttcgcggcctcgaacgggcgctttgcgcccgttttttaaattttgttgggcttatacgggcgcttcgcgcccgtttcttaaatttgttgggctattaaggcagcttcgaggcctcagacgggcgcttcgcgaaaaagcgcttcgcgctttgggagcttcgctacctagattagctctggttatggaaattggaatttttaaaaaattatctgggacttttaggccgctttgcggcctcgaacggacgctcgcgccatttttaaattttgttgggcttatacgggcgcttcgcgct

SEQ ID NO: 27318 - DNA, 1279 bp, Heterodera glycines
  unsure (1)..(1279): unsure at all n locations
gtcgccaagtgtcagtttggtcgttgcagtttcagttagaacgtgaggggcaaacgctccctctctgttgtccaagtaagcaatttgacatggtcgtcgtcccgtcaatcgatcctggacaagttgttgnaaggaaatattaaaaaatgacactccgcaaataaaacgaaaagccccgaacaaaacctttattttgactggagctgtatttagtatttcctcagttttttgactgtcactaaaataagtttcattattttcacccttataaaggccaggctttgcctcagaaaaggcaacggcctttccctgccacttttctctttgagttgtctcggcgtttgctcctctttcctccgtaagcgtattccaagttgctcctcagttaaggcttttccaaagggcaacgaatagacgaggaacaaaagatacttctcggaaaaataatattttgccaaaactttcaatttttgcgctgccaagaaataaacacttcctgtgttattgtaaagcattgcgttgtcagaaaccagacaaatgtcagatttgaattgatccaaattcaagtacatattattatctattttgtcatggattgttgaaaatgacatcggataatcaacgattgaatgatatccaggcgcttccaacctgaagttaaggcttatatgagttaagatcaggtaaacacaccgagtcaaaaaacgagacatgtgtcaataaagagagagtgcagagaaaaaaacatctctctttttggcgtactatttctttatctgtgttaatagagaaaaacggaatttacatttctatgtttagtttttttgtcctatgttaaatgcgcttcaaattttgcatagcgacagagaaaaaaattctgcatcgttttctctgtttgtttttatagcttaaatgttgttctaaaaagttattcaaaaaataaaatttcgaagcatcatatcttttttctaactcatcaaattgcttagcatttgcttagaaaaagcttctcctcatcaagagctttcgaatgatactaagattgtccaatttggttgggaaaaagcttcaaaaataattcccaaatatcgtcattttttaatattttggacaaaaataaataaaaatattcgtgttgcacaacggactcgaaccaccaccctttgtccctttactatcttacaaaaaccatttcgccacatatgcatttactttttgaactaggggctcaaaattgactcggtgtgtaaaaaacacaanaaaaaacataataataact

SEQ ID NO: 27319 - DNA, 1013 bp, Heterodera glycines
  unsure (1)..(1013): unsure at all n locations
atttcgattttgaattaattaatttttattaaaattttacaattgaaattatntttttcaaaaagttccatttatccccccgggggataaatggagacggggcgataattagagataattcagtatgcctcctaaatagtcagcttgtttttctttttcgtgtccaatttgaacttggtcttcgtatttgacccattacgcatgagcaaagggcgtctcaggccaacgtcccatataccaaattttcatacgtgggtccaagtttttctctggccactttatatattttttgcttttcacatcattgctttttcaaaaaaaaacttgttaatgaggcatagagggataagcgctgcctggaaaattcattgaaattttagtgcaatttgtcgataaattatttgactggaacattactgttttgggcaaaaccccaggcctggctggatccacgcataatcagttccacgttgatctcttatatagtaatttgctgattcagtatcttcgctgggaaacacaacatgcacaagttcgaagttgctcagatcgccaatttgtgtcccgagacggcggaggaggcaaaagcactgatcccgaggtgccattatttcgactttttttcaatttttcacataattttttttgtttaaatttagcctcgaaaacaaaatggaggacgaagaattggacgaacttttgaaggaattgcacgcgaagaaaacattccaataattttttttgtataatttctctatcttatcattttccctatttttttgttgcgtaaaagtttttagtttttcaaacttttgcaatttttttaatcaaataattgaatcataagttagttgagttgccattttaggagagtttcccgcaattgaggagggacccaaactttcgttccttaaaaatttatgataagccttcgattaaacatttctttccagtgaatctgggtaaaagaagtgctgatcacgaatatggcactcatttcggtctgtatcttt

SEQ ID NO: 27320 - DNA, 1998 bp, Heterodera glycines
gctttctgatctgatcagcagtggtcgatcacttccctcactaagaaccaacgatagaagtttcttctccaaagcattcctgtaagtgttttacttgggtatattacatatactgtagaatagatatcccctacaaattaataatgtttttttagtcgacccaacaaaattttgcttcaatttggcaccgtaccactgccaattaggctgagaaagcattggcaaaaatttggcttcgttcatgccagaaaatatgacagaaattgtaatttttaaattaaaatagatttataatttttcaatttatttaggctttttctctcctgttcagtgcatgttgttattcagagacggctccaagctgaaggacagtcatttgtttcggcacttcagccaaccgaacccattttcactttttattttctcgcacattctgaagccagaacaatcatataagccaagaaataggccactcagaaatcagaattatcttttcgattttgcccaataattcttttaaaaaggatagattttcacagataaattttatttgtaatttatttgtacagcttcgattttcattgtatgaataaaaattatcaataaattttgttaaaatattcaaaatgcatttttttgtagtttttttggaaattttgaggctttttgtgatttatagagaaaagcagcctcgttactgtcaaaatattgttaacaaattacattaaaaattccaaaatgttcacaggcgatgcctacggcatcataagcagactaatattttttagtttctcaaaagtaagaaaaaagtttaataaatttgttgaattaatctgtcagcaaatcaattcgggatgtcaaaaatatgtacaaaaagtggtcaatatattttgaagtttccagaaaaaatactaagctgagtaagggcaatttttcaaacccatattgcgccaaaagtctttctttcccaaatgggctaaatttagattcatgctctaaaatatacccacaaaaattattagaaactagcccgagagtttcttgtacaatttagtttttaaaattttcctgataaaaatttccattttggagtttctaatgggacggacgcccaaaagaactgtgacggaactgacccgtttcgtaagaattgacccccaaaaaattcagaaaaatattcttaaatcgactttaaaattttcaaaaaaaaacacccctaataaataaaaaattttctcagaaattcatctcgaaaatttatttattttttctgacaagaatttttgattttaaaagcataaaagaaaaataaataaaataaaaaaacggaggtgcgaaattttttgtagttttgcgaatttttagcatttaaaaaaaaaggtttaaaggcctgtcttacaattttatgattgacttggcgaatgtgaaaaaatgatattttagcaattttttctcacaaaagataaagaaatcactgtagtgatcacttatcacaaatttgataaatttctgaacacatttttacttctagcacttttaaaggtaatttgtagtgaattttgttctcttatagatgattcgaatgatttttcatggcaaaattttccaaattaacgtgtttttctgaatttttcaccacctaaaaacttcaatgtatttgggtgacattcattttatccgcctaaagtaaactattaatgggatgtgttcgtgatgctgtcagtttgattcatttgatcaaatgttagaaacgatctaagcctaatgggacttaatttctccggaaattcctgtaaaactcagcacagtctgtcaataagatttatttctgtaattaaaatgaacattgtgtgaaaaaatatttgtttttgttgttatttaatttatttcaccgttgtaagtttgatcaaatcaaattgggcataaattgccagtccaaaaaatgacaaccattcaaaggctaatcactagagaatagaattatagggaaatccataa

SEQ ID NO: 27321 - DNA, 925 bp, Heterodera glycines
aaatttcaacttttagacctcaattttcgcgtttcggcccaaaaaacgaattgggtcaaaaacgaattggccaaaaaacaaatcgtccgtcgtcctttttttattgtcgtccgttgtataaaaaaaactcccaagtttgccaatttaaaaaaaatcgcatttaaaaaaaagaaaagttcgaaaaaatggtgaaaatatttattaaaatgcgaaaataatgacgaaaacataaatttttcatgtttttgggggtgtaatttttagaaatttccaaagtatttcgtttttttttgtcgtatttttttgtgaaaagttgccaaaatggccgaattatggaggacgagaaatgcacgaaaaacacatttttagttcggaaattcttcgttttaacgccattattcatcactagggctgccaaaagtatgcaaatgcatatttttttcctggcttctccatgctctaaatagtacgaaaaacactttcttttttgtgtttgcgtataaaaatcgggacttttatttgcatattttgggcctttatgcatattttgcatattttggcttgttttacattttcatgcatattttgccattttttgtgcatattttccgattttttgcatattttgccatttttcttcaaatattttccgattttttgcatattttgccatttttcttcaaatattttccgactttttgcatattttgccatttttcgtaaaatattttccgttttgaatatcccttaagtaaattttggcagacaatacgatgagctttagtgccgaaaatcttgagaaattattgattttcaattgcaaaaaaaaccgatacaatttatgaggaataaaaatattttattggattgcacccctaattgtctagattttttgtgcatatttggtgcatatttttgcgatttt

SEQ ID NO: 27322 - DNA, 1267 bp, Heterodera glycines
  unsure (1)..(1267): unsure at all n locations
atggataataatgatgaanagtggtgaggaacaactactnttatatatttttttcctatttttgcacgatcttactaatcatatcatttcaagttattagcacctaccgtattttctctaattattccccaatctccattaatcccccaatctccgtttatcgcccagtctccaccaccattcatttctgataaaatcggattttaaaaaaaaacttttttttttgctccaatacttttgagtgtggctgtattttgggattttttgccactaaaagttctcaccctactgatcactctgacaagctgatgaaaattcattcgaaaaactagagaccgataaaaaaaattttcagggaacagtaaacggggctgtcaccgagaaagcggaaccgcaaaagggacctttttcgcgttaccataaaatttcgtcattttttttacccgaattccgccgggaaatggaaaaaatttttgaacaaataaataaataaatctgaccgttgaagttaaaaaaatattactcttttgttagattatagttaggttctttatgttcgataattataggtttatatcattctatggaagaaaagccaacagaatcatcagaagaagaaaagccaacagaatcataatccaataactttattctctaaatcttttatttctgatctgtaacgagtacacttttctatttcattctttatgctattttttaactcatttttacaaccttctaagattgcattatcagcttttaaaaagatttgtttttaaaaaagaatatacgaaatgaggatattatagcagatgcttttgatcttgtttgtaatggagaggagattgttagtctcaatacagagttggatttttgttccagtcaattatgaaatccaggttcaggcttttcaaaatgacaatctctacattttgactagcagggatgtttccgaggtccttctaaaaatgtcggtgaaatgggggggggggggggggggggggcgaggggggaaaaattacatacatcatactttttcgggatatttttaggcctgaatggttgcccaaaaaatataggtcaagcatgaaatgacaaattcataaggtaggccctgtcagatcacttttcgacacagatctcaattcttcaaaacccactttctctcatcactgacattgacattaaaaaaaaaaagcggaatttatgaattgactcaaaattcgggcacaaatccatgttgatctttccaacaaaaaaaaacatt

SEQ ID NO: 27323 - DNA, 1468 bp, Heterodera glycines
ggctttcaacagatggactttgtccagcattggtcgtctcactttctttccaaattctctcctcaagtgtacagatgagctcccgtcccgctttgtttgtgccctcagcgcgatttaattgagtcgttactccttgaaaaatccgatgcgcaaataatattgggtcagaatagtaaaaaataccattatgttgtctcatcgtgacattaaacgcagatggccgatttaataggaattgggaaggtaaacaacggtataatcaacggcttttgtgtgtttaaggtcgatcgatgagcttttgttttggtatcgtctggacagatagaaaaatcaccggagaacaatgatttgttggtaagagaaaagtaaagttgaaagaatgagacgattaataatgaggctagcgacatttgccagtcatgactcaccatcacataaagcaaatgttcttatcacgcaaactttaaaatttgtaaagattttttgtaaatttagtcacaatcatccaacagcaacatttatcggggtgaaaagatgaaagccgagaaaatgcaataattggggaaagttgagtgaagatcaaaattacgaatgaatgggggaggggcgatttgttattcagttcttagatttcggtaatatttagcaatttaattatcatcacattcaattcgtgtgacttaaatgaaaattgtgtgcgatgcgatcaatgattgctccgattgatgaaggatagaaaaaagaaaaggttggggaggaaaaagaaacatttggaaatgtcacaatgagtaatttgaatggaggaaatgacaatttatgcaatggaatgtgtgtggtgttgaacaacaattgctgaaggaattgtggaagtcagtcagcagcaagtccttccttcgcttttctccaaaagtacgccgcgactcaatgggaggagaagcggcggagggtccaaagggaactccgactcccccccccccccgccagcactctttgttctcccgtcattcatcccaacacattctttaatggtcgtgcgcagtttcggtctgtcagtcagtccccgcccgaccaaatgcagcgattacccacgacacgcttcgtcttttcgacttcacctcgttcacttatgcatacagcgatgctttttgagcaaagtcagtctttggctgcattttttggaaaattctttagtcatttgaacgaaaatgacaaaagaataaatttaacacaagagtacagcagacgaacccaaaagaacggtgaattaaaagcgtgggggaagagcaacattttgcaagggacaaacaatctccatttaaaggacacacgaaaattacttgaggtactgttcttatcgggaaacaatcatcagtgatcgacatgaccaacagggaatcctactgtcgattgcttctggtcaaactccttcccccaactgaccgtgaagcatcgacatccccctcgacca

SEQ ID NO: 27324 - DNA, 1268 bp, Heterodera glycines
atttttctcgtctcggaccaaccctggtccccaatttaacttttttgttctgggctcaaaatcaaggtccgggggttttcgagtgctgattacgaatctggactcgggtttgcctaattattccgaacctcggacccgaattccatttataattcaggcataagtaaaataagagcattttatgattttaaataccaattctaaatcggcccttcaaaatggcattaaaattctccaaccgttcaattttaccaatgcattttcgtttccggcctttgcgtcaaatgaataaaaaataataaagtcatcgagccgtccacaaattgcttttaattgttctgctgaaatttaattaaaatatttggaagaatgcgctaaaatacaaaaagaatgtttttcagtaatactgcttatggtatagggcccttttgcaaaaaaaaaatttaattttttaagtcactgaaaatatgtttctaaaaatttttggggtcgttgaaaacgaaaatctgacattcattttgaccaatttcggatcccggacacgaattcaaaaaaaaatccgattttttcaaaatttacagttgtgttagaatcaaatttgtcgggtttatttaagaacaaaattgagaattttgaaaattttagatttttgttcaaattcgggcccgggattcgaaattggtcaaaatgaatgtcagattttcgtgttcagcaaccccgaaaacctttagaaacatattttcagtgacttttaaaaagttatatttttccaaaagaggggccctaccagggatggcatttcgaggcccaaaaaattttcggaaatcggaattccggtggtcaaaatttttttggaaatcggaattccgaggcccaaaaaattttcggaagtcggaaatcggaattccgaccccaaaaacgtcggaaatcggaattccgtgccatccctgggccctaccatcggcagaatatttgtgcccgcagtttaaataacggcaaaatgatgacccaaaaggggaggagaaaaaatcttatttataaaaatatcattccttttttaaaattaggcaaaatgatgtcctacataaatgatggtgaaatgagaaaaaagaaataaataaaggcaaaaaagtttttacgaaaattatgcaaaagtggcaccgccgggaaagttttgaatttggcagcaaaaatagaaataaaaatggacttttgaaaaggctttactaaatacttacataatttaaaataaatttggtgtgaaattt

SEQ ID NO: 27325 - DNA, 948 bp, Heterodera glycines
ttccgtcgccggacgtcgcaaactccgcacgcatgagagctttattaggtgaacaaaaacacatggccaatcaaagggaaaaggcataaatggaccaggaaaacaatagctgacaatgagttaaacagagctaattttcatttatttgatttgtgtattgttttttgaaaataattgcaattctaacaaaattatttcattttttactctttctttagttggctgtcactctcacacatggaatcagctcgtacattggcacagtgtttgagtgaaatggcgcgacacgcgaacaatgaaacggaaccacaacgaaatgtcattaaaaggaaaaccagctgttcgtctggtgatctacaacagaatcagccaagctttgcgtcagaacaaatggatgacaatgacacggcctaacacaactttcatggatcatttcgtctattgttaattgcaagcgttccttctccgtcgcgaatttgagcaattcgaatttctaatctaatttgaacaaaaaatcattaatcggaaattcaaatttcttcacttttacactagcgccaaagattttctgatgaatgaccgtattccctccatttccaatttgtttattgtttgtgatttgtttaaacatgcaatcaatatttaaaattaatgcatatttttacagattcatttcattttacatgcattttcagcgatatgaaattttctctgttactcgcaaaaggccaattccatttaaaccgtaagcaaattccgtttcgacttaattttgtttaaaagggtcaaaaatttagcccacaagtggttcagaggcatgtggcagaagggctattcgtggccatcaattttccagcgaaaattggttcgttgtccatggagagcagaattaaagataaacaaaacgggcggtttgcgataaagttaaaactgatcattgttggatta

SEQ ID NO: 27326 - DNA, 1812 bp, Heterodera glycines
aaaattggctcaatattgcaaaacttggtcattttttggacaaaatctgttaacaaatcgcattaaaaagtcggtcgattgttttgggtttttgcttaattcggtcggttggtttcggtttaaaaccgaaaccgaaaaaaagctaaaaactcaaaaatttctcggtcggttttttcggtcaaaaaacgaaaaaaagctgacctgtccgatctctagtttttatggcatatttgagggatttttaatgcatatttggcattttttagtgaataaacttcaaaccctaattataatacataaagcaaatcgccagctctgtgatcgaaagtcgatttggcgtaaagattgaaaaagccattttcccattagccaaactcaaatttcagtgtttatccactggggatggaaagggataagccggcagtattttttagtcattttttaaacaaatcatttctgctgtaaaagtccaaacaattacataaatgtattcaaacgaaagaagcaacaaataaataatgagatgcaattatccgatcacttctattcctatgatcgatcatttcctaataattccttcactttttcttctgctgtccgctgggcccggcactcattttctggcgactttttgccttcattttgcccgcctttggcggagacaatggcctgaattaagggcaattaaaattgattattatagcaaaaactaatgccacacaccaaattcataagggcagcggacggtcgggcaatggaaatccctcagatttgccgtgaacaaaaaatttcggtttcggcattccgatgtccttgcaaattgtgattgttctccacaatgtcagttcgtttttgacatcgaaatgtttgtccactaaaatgtcgaaacgaggcgaaaaaagtgccaatttgaggccgagttgaggacagtcaaaatgaggaaaaatatccatccaaatatccgtacaaatccaactgaaaattcgggaaaattaatatattaaaaatttgagatttcaaatttaccgtcggttcatttttacggcaattagcacaatttgccgtttccaaatgattacacaaagagcagaataattccgcgaaacgaaaattgaaaaaccaaaaatttttaaagtcataaaaacggaattaaaatttttaaataatttacgaaaaatttgaattgccaggaggagcaattactaaatgaatgaataaaaatgaatcatttttcatataaaataacctttttcctcctcctccatttcattaattcgtttataattttcctccggttattttattgccgtaatgtcttcgagaattccgtacgtttacatcgtatcacatttcttttactccaaaatttggccagggttgccaagatgaaaattttcaatgaatttcataactttatttgagaatttaccccagtgtgcccattaaaacttcaaaatgaaattaaaattccacatttggctttcctggccttggcactttctttgctttcccattccattcattattctttcgtttttcagttggtagttgtgtctcttctgctgttggttggctgtggcaccattctttggttcttttgggtaaatgtcaaaaaacgacgacgccaaaacaaaaaagaaatgtaaaaaaatccgaaaattttgaaaaaatcaaaaaattcccttttttcagctttatctccgccgattgttggcttgaagtgttcgctttacttccgccttctcagcttggcctcggaatcgctctgatcagtcgccgcgtggacgaacatttaaaaacgcgcaaatggat

SEQ ID NO: 27327 - DNA, 1945 bp, Heterodera glycines
  unsure (1)..(1945): unsure at all n locations
aaacggcggtagcgccgcttgccctggcgatgtagtgtgtaagtacgtggggtagctanataatnttgcacatttgttcgattaatgtttggttgacttttccgcgcctcttcagaagcgcaacgctcgtgaatgagacaggcgaacttaggtccttgtataagaactcaagcaaacgaatttttttcaaatccgtaatgatgccttaaacttcagtgcggcgtttttataaattcctttgccggattggccttcgggaaataaatgcctactcaagagtggattttgccttgccctttcaacaaattcttgaatgcagttggctctttgttttggctacgcttgtctttgttgagcagatgactaacaatatcatctacaatgctggttataaatggccgcccacccgctctcaagacctgtccttccgcagatacacccagagattgggcatttttataaattaaatttaagatttccgtttgtgtgggttgtcgtttatttgagttcgacgaccgtggggcttgatcgtcgtcatcatcttcgagttctgcaacagtttcttttcgtgcacgcccaaccttgagatggcgacgcgtagccacaacaatcggtctttttatgttgacaggttttagcacggcgtcaaccacatcactcaaattttctaattttacacctacgggacgttcagcctcgtctcttgtaagtttgttgagacgcttaatttcctgctcatatttgactgccctttcctcttcatttatacggtcatcattttttatttgtttaattctggtacggaccaacccaattggtgttccgtcagatggtggcggtgcagccaaactttgatagatctcttcggggacgagcagataacgctttgtatgctgcatttttcttggttttaactttttttaaaaactatttatatttttcaatgacatccgcaataagtggagggcaattgcgcaatgagacctacaatggctgatagaccgtatccatgctgtagcaaaactttctttgcagatcgagagcagcgtgtgcgcgtgagatgacgaagcacctgtgcatgctttttgagcattttcaaatgccgaggatccaatggaactcggccctttaaaatgtttagacaaatttcgaccaggcataatatttggtcatcggacgcctctcgaataacaatttttgccttcttgacattacaaatgttctgcaaaaatggagtatttttcgaaattagctgtgatactctcattttggtaggtaagcaattttattttgatcatatatatatgagttctcagtcggattgtttccgggctttccgggtgcatgtcaaccaaaaggtagccaaaattttttacgcatgcgtcacgataggcttccataaagtaggcggtccttgacgggaagaggtgtgtggctattgtgcgaatctgaagggcgtccgctggatttctcattaacaccaaataatgtgagtttgtgcgagagacgcgcaactctttgttaaacaggtgtgggtcaccaaaattacgctcactccccaattgtgtgagccgcgtgtgaagagcgcgtccaaatactgctgactcatccccaccaccaaatcatccaatattaacaagaggttttgttttttggcgcaatcgcgtacctgttccgcagatggacgccactgtgtacagtgactggcacattgccagccaattttaccagtgcgttgcaaattcaaaatattagtgttcaactctccgtacccataaataacgcgctcaattgggttagagatcattttctgcaaattctgtagcatacgcattacacactccgacttccagacacaatcattgtgaatggatgacgaaattgcaagttcacgtgattaatgtttggaaattaatccattttttcttatattataaatgcgttg

SEQ ID NO: 27328 - DNA, 1950 bp, Heterodera glycines
tatttaaaattaataaaatcaattttttttttttgcatactgttgaaagcttaatagcatatgaaaatacaaactagctgtatgacacgtaattattagattttttagagtttttgcaacatatttttaaattttttttgaattaaaaataaatgaaaatattttgactatttttgaagaagaattaagaaaaaatgtggaaaaaaattaaatagtttgaaaagggaatcgaacatgagaatatgcgcacataggaacagcaacaattagagatatggtaattttttattttgagcacctaaaacctaaaaaaattttgaaaaaaattattcaaatattttgatctggggtttatttattggctcggattagttattttagtggtaacactcaacgaaatcagatttaaaatcgctaaataaaaggcattgtgttcctcacttttgagagtaaaaatataaataaatacaagttagtttcataaatttacaagtccatattttgtattatttatggatatttagatattataaaataaggacaaatggggaagctatttttaaagatttaaaaaaaaataataagacaaagcactgattgaatccaaaaatggtaaatttaaatggcaagaataattattaatttttttatcattttccttaaattaacgcctcctcctcctcttgtccaatgttcggcttcattcccttcaaattcagtgatgaaagctagccaaattctgcatttgcaacgtgaacggcgtgtggtggaattcctgcgattggttcagcaacatttggccaatgcctgcggcacccccattttggtgctggtgcgcgatgtatttggcgttgctgttgaattcctgtttaaagaaggaaaaaaagataaatttattttggcagaattacatatttaacgattggatttttttgatggaaaatgaaaaaaataaaccaaaaattcaaacagtttcagaaagagctaaaaaaattttctggaaaaaatggttttagagggtcagcaattgcccttctcattaataaataatgaaataaaaaataacatggaatttgttttaaagttaaaaaaataattattttacgcagctataatattttaatagaaaaacctcagaaaatcatagaaaagtatacgaaaaattattcgaaaatttaataaatgtttttacacaagtttaaatatacataaaaaatagcaataaacaaaaagttttaaatttgttgactaaaaaatccgattttctaaaattttatttcaagcttagcattgtttgcattattcccttactgttagcccataaccattttccgtgccacaaccaccgccactggtagcaccgcactgctgcacattggcaccattcccagtgccatccacagacaatttgttgacttttgtcatcacatcattcacaagggatgaatgcggtggcaacagttgccgaagacgaacacacaacagaaaaaggtgggccaactgagaaattaaattgaattataacaaaaaaaatttttaattgaaaattcaaattttgaaatttcataaatatatttataaaaaaaattaatattttattgcttttaatttttaattgtttaaaagggaaaaaatatgaaaataaaataaaaaatattctttttttaggaaaaaagaaaaattgaattattttgataggtatattttttaatatttattcagaaaaattgagtatgcaattaaaaaatattctttggtaaatagaaaggtattaaaaatttgttttttaaatattgttttattaattttttattttcgtataataaatttaaaaaattcttttacctaccagaacaaaaaatatcagatacaatgcgacggcaataagcaaaggcacaatgcgttcgcgatgatcgaacaattgtttatttctttaaaaagtggaaaatt

SEQ ID NO: 27329 - DNA, 860 bp, Heterodera glycines
  unsure (1)..(860): unsure at all n locations
agaaagaaccaggttcgatgaagttttggtaagccaaaaaaaatccaaacatttaaaaatctataaaaaatttaaaaatgagaattcatgcgagattttctgaagcttaatagggcctagttaagctgtaaaaaaaatttggggcgatttgaaagagaatagaaagaaccaggttcgatgaagttttggtaagccaaaaaaaatccaaacatttaaaaatctataaaaaatttaaaaatgagaattcatgcgagattttctggaaataagcttaatagggcctagttaagctgtaaaaaaaatttggggcgatttgaaagagaatagaaagaaccaggttcgatgaagttttggtaagccaaaaaaaatgcaaacatttaaaaatctataaaaaatttaaaaatgagaattcatgcgagattttctggaaataagcttaatagggcctagttaagctgtaaaaaaaatttggggcgatttgaaagagaatagaaagaaccaggttcgatgaagttttggtaagccaaaaaaaaatccaaacatttaaaaatctattaaaaaaataaaatagtgaagttttaaaaattaataaaaatttttaaattaagagttactggtgttagcatcatagcggtgcttttccttgtctttttgatgcccttgcaaaatctggtgcgcttctgatcagtttatataaaaaaagttaagcctaaactttttggcatgtttaaaaaggaattaaaaattttaaaaatatttattcatctccctttttgataatataagagtcagagtgccttattncacttgtaaataaattttggtgcgtttcagagcagtttctgtaaaaatacttatga

SEQ ID NO: 27330 - DNA, 718 bp, Heterodera glycines
aaaaatatttttggcaaaaaaagggtatttttggaaggccagttattaattccttccggctatcaaagtcactattaaatcccgggaatgggcccccacttttgtttttttttggagcgctgaataaaaccctaatagtgtgtttgaaaacgcccgaaaaatagtttttgacaaaaaatggctatctttgaaagtcacgattaaatccctaccgggaattggtcaccaacttttgtcttctgttgtagcgctgaataaagcactaatagtgtgtttgaaaacgcacgaaaaatagttattgacaaaaaatggctatctctgaaagtcacgattaaatccctaccgggaattggacaccaacttttgtcttctgttgtagcgctgaataaagcactaatagtgtgtttgaaaacgcacgaaaaatagttcttgacaaaaaatggctatctctgaaagtcacgattaaatccctaccgggaattggacaccaacttttgtcttctgttgtagcgctgaataaagcactaatagtgtgtttgaaaacgcacgaaaaatagttattgacaaaaaatggctatctctgaaagtcacgattaaatccctaccgggaattggtcaccaacttttgtcttttgttgtagcgctgaataaagcactaatagtgtgtttgaaaacgcacgaaaaatagttattgacaaaaaatggctatctctgaaag

SEQ ID NO: 27331 - DNA, 1096 bp, Heterodera glycines
acaacttgtgctggttggtttggctggggaattgcacccacccacgtctgagaggcctaaagccccttcaatagtgtcgcccatgccctcgcggcttggtcaacccaatgcatgaaagccttcccttcaggcttaaagtctctgtaattttgctcttcatcttgaagagcttgtcccttcactctcaggaaaatggcttcccattttccgttgtatttctccaaaagagaaattgttttgcatagattttgtctctctgcgattagatctgcacggacactttggtccgccagctctttgcccaagttttcttgggctgtctcaatgtacatcttgagacgcaccaccattggtgcaatggagatgcgcaagagctcactcattgctcttacgcttgatgaaaacacaataaacccctttgggttgtgtgtttgatccaagcgctcaggccgcgctttggattggtttggttggagggtaggcttacgactggaagccgacccctaaggggctccaattttatgggcaaaaggccacaaaaatttgcacttcccggcagaaggggaagcagactctcccggcagaagggggagtcttttaagcaaagcgaatttctgtccaaaagacagaaactcacagagtccaaagggacaaatgaaagggaggaaattcctctcctttactgaagggacaatttgaaaggaggaaaatgcttctcctttccttttgaaagccttttctttgacccaacgtgggtcaatggcttaatgatctgtatgaaagggctcctgagcgtcccttttacagatagagaaaagactaagactctttcttaatctttattcaaatatttacaattacaatttaatgcaaattgctttgaacagaaaactgtcccggctggacttactcaaaaagtgatcagagtgaagaaaaatgtaataatgggcccgggcttttataccccccccaacccatggggggggggttccaggaacgtgaaaaaatgtgcacaaacaaatgaaaaaaaacccattaaaaatgatgactcaataaaaaaaaatgaaaaaaagaaaaaaagctgagtcttaaaaaa

SEQ ID NO: 27332 - DNA, 634 bp, Heterodera glycines
  unsure (1)..(634): unsure at all n locations
ttcccttggcggatccattaaactttctctcacccctccccctccctatttttccgtgttattcgctcgttttatgcgatcgcgaccatctccaaccgtccacaattgcgaacattgttcattttcttgtcaacgatttacaacgaatgcagcgcatgacggacattctcacggatttgtgagagataattagccaattagtcgtgttaattggcaccttaagccaagtcgactggatggaatacaaccaattgacatgggcagtgatgtttttcatcgtcgaggagtgccattctttgccgataagcgaagggacaattgtgatgccaacactgtcttttttgtttgccggatttaccaatccctttttgacgacatttcaggactttttcctgcacattgtctccgattccttcgtggacccgcgcactccaagttggcaaaaggaagttctcaccgttggcattgagtcaaaaaagaccatttctgattgattttcgttgaaaaaaatgaccaaatttattgctgtgattatacagaataatttatttgtatcgccgcattgatcaatgcaatttnaacgaatgttgttgtgttaattgacaataaacaaatatgaatttttttggaatca

SEQ ID NO: 27333 - DNA, 1905 bp, Heterodera glycines
cctggcaatttgtgccatggcataagaaaagggccctacagaggagaagggcaccgaaaagaacagaagggggaggcccaatggcacattggagcaaaaaggaaaattattaatggtaaaaaaacgattggacattttgaggatcatttttgcctctcattttccattttaaaaactgatttatttaatcaaacaaaaatgctagtcaaatgaatgactgactttggggcggtgtttttaaatcgccgaaaattctgcaaaaattatgcaaattgaatcaacttggtccctttacttttactttcaattgccccatgctttttgctcttccgtccgtccgtccctaattttcgtttcatttgcccaccctttctcggcacagagtgccaatgaatgaccctccctccctttgagtgaccgaatgtttcagtgcgaaataagtgacgacggaatggacaacggatgaaaaggaacaaaaagccggcaaaagcatcggcagaacggacggagaacaaaggcacggcacggagaagggcaaactgtacgcggagaatgggggagccgattctgctgatggttgtggtagtcgtactgctccaatccatcgccaaggccaacgccattcaattgctgtggaccgaatcggactcagcctcgggtgaatacgcagggaacggcacccgggggaagggacaacgaacacttgggcaaggggggacccccgggggatgggcgaggcggctaaaagtaaacagagggtcaattggatccaaaagctattaaatggatgcctttacagaggaacgcgtgccggacccaccagcgaatgtaagactgacttattttataatttaaattcacttaaaaatcgacgaaggtacgcgttgaacagctgacgtcgaactcagccacaattcggtgacaaatggggggggggaaagaatggcattggcattttgaaaaccaaccaacaaaaggtgggaccctccgcgcaacgttgacaaagtggtggtcaggggatacacactttcgtgagagcaatcggcggattgaaatagcgatttaaccacaacatcccccgaaaaggtacggggccgactcaaccgaagcacgacgcattgtgctggagggcgcagaaacgacggaatacgcgctgaacggactaagtgaaaagagggacaaatccccccgaggggggatgccatgggatatcagagaaatgatggcaaatgatcagaaatatggacccgatcaaattgaataccctggcttggtcatactgaaattggagttttcgaaatattcaagcgccgaaaatgaaatgccaaagacggaaatgggacctctgaattacccaattgaacattgtcactgagccttttacttgatgagagtactcgagattgttcttggctccaaagcatattcctccaggactttttttagtaacattttaattacgtaattacccaccggcagggcccaatacgacttacgccgtttcactgaccgcgtacaacgaagcggagggcgaagattcgggtagcctaccatttgtcagaattcgatcgacccgttgtttatttgtctgaacttgtcacatttgccaagtccgcgtacttttgctggtccgaacgccgcctttgctcgcccgcgatacgcccgaaacggaagacggaacggaagcattgcgaccgcgcgacttgcgcattgagcgaacgccgcaaaaagacgcggcactgctcagatgggaagagccgacggatggaaaaggacagcgaccgctttattacgtaattaggtgggaaaaagccatgggaaaaacgcgccgaaagagtcgccgaattcggcactttttccctcaattgtgccgcggccaaatttccctcgtcattcgttcagtta

SEQ ID NO: 27334 - DNA, 1214 bp, Heterodera glycines
  unsure (1)..(1214): unsure at all n locations
taagtactacggactaaaaatacggaaaatcngtagtccgtaaaaatccgtatccagaaaaatacggatccgtatacgtatcagtattttttaaattttntgataaaaattggtntaataaatacaaatcttgaatattaaagctagaggaaaatttattatcaattataagcaacaaaattcaagataacaaaaaaacggaaaatccgtagtacgtaaaaatacgtatcggccgaaaaaattacgtattacggactacggatccgtaaaagtacgtatacggatccggtccgtatccgatctctaatagtaactatatttttaaaatatattattcacatttaattcatttaatcaaaatcaaaaattttttgcaaataaattaatttaatttaaaaatgctaatttattttcaattgtatttaagttcattaatttaaatgttatataattaatgattattaatttataaaaattttgaaaatatgccaacaaaatattcgtaaatttcaatttttattatatatttttttatttaaataaatattttgattaaattaaaatttacataaaagctaaaataaaattaaattctaaagacaattttaatttattttaaaataacagttaaaagtgaattattttggtctaatatgtaagcaattattatataaattgaaaatatgccaacaaaatattcgtattttaaattatttttaatttgatttttttaaatttacctcaattaaatttgttttaaaatgaattgaaattatgaaattatttgataaattaacattataatatattaattaatataaatcatatattttttaaaataaaattcgaaatttatgcttaattaaatccattttatataaattatttaatttttttcaggttttgcttcgccatcgcgtcaacaacagcatcgaccgcattgacacggccattgtgcatgtgctggtggccgcgccaagctcacagcccgcgcgttttccgcacgcatttggggtccgtcgcgtgccgatgccgtcgtcgcgctctcccgccacagcagtgccaagaagtgtgctcaccattttgctgccgacggcacacgaccgtaagtgatcactgatcatttttcgtgtgcacctcaatcggcatcgggcgngagtttgatcaggagaatccttctagatgatcggacgtcccactaatagtactgctcg

SEQ ID NO: 27335 - DNA, 1778 bp, Heterodera glycines
  unsure (1)..(1778): unsure at all n locations
atgctttgagcgggttatctgaccatcgcttcatcttntcattccgtggcactttccgcaatcggactctctctccccatattcgccttgtctcttgggccccncaattggaagtgctttcccatccgaagaccaaagtctttttgacccattccggactgaagaggttccaattttggctcttttgcctacgcattgtttttcagtatcaaagaatcgctgtgttctggcactccgatgctaacaatgccaatgttcgcggagcaagcacataatgccaagatgttgttggagtttggcattggcattgggctaagcaaagtgagtcatcggaattagacattaatgccggaataaatcataaccattgcagtctcttagttttcgattgacgcgcaaacggtgtttgacggactgagtgaggtcagtgccgcgaatgtccgtccttcggtcgttcgattggcttctcctcctcccttttgcttcatcttttcccccctttttcagcttttacataaaccaaaatatgcccagagggcgcttaaacttcgtcatattttcttggaccgtccaatgaatgctttggatgaagcgaattttcgcctctcgcagattatcagacgaagcgacggatcgaaagggaaaggcgaaaaacggagagaattcgttgggagaaaagggacagagaaaggggcgatggaaagctttcatttggattggactttcattctgttggcagtgatcactttcttattccttgacaaatgatcagctgaattcaaagtgcgaagaacacatttaaagggacggagcaattcgaattgaaaattgggaatcagttcaatgcccacacattggcacattgacaccagtgccattcgagacggactcggaaatatctttcgggttttttcaatcttcccgctcataaaaaacatctctcgaactttttcctttttttctgatggaatattcaaaataactagagaccgacttttgagacatatgcctttttttctgcgcactagtttcgatatagtaagcataaataacgcattttccacttggtttgaggcttctccgttgacttttattatgcctttttttgcctttttcgggattttcgtgccttaactgccttttttgacattttgccgttttggtgcctttttggggtttttttctgaaaaattccattaaaaatgcaataaaatcgggaaaatacaccccaaagaaatgaattgaaacaaaattacagaaaatacatccctaagaattgaaaattttttctcaaaaattgattaccaaaatttaattaaaaattttccttattcgaaaaacattataaatatttaataatcatttaaatgactaaaattaagttatttcgttaagtttacgtgttttactccctgaaaatccttaataaaaaatttttaatgccttttttcatgcttttttcgcgatttttggtgcctttttagtcggtccctaaaaataacttaaaaaatattttacactttgttttagcttgcctttttatttgacgttaactttttatttttttacatataattttttgttttttatgttattttcataaggcaaaatttgtatttcagcgaaagaattgccgaaaaacaaacggtcgatcggtaaacaaattaagaaaacccgggaattgaaaacattgctgaaaaatattttgaaaagcaaaaaaaaatgcaaaatcttgactgaatttttggtanaacaaaatttgacacatttctccttga

SEQ ID NO: 27336 - DNA, 1193 bp, Heterodera glycines
  unsure (1)..(1193): unsure at all n locations
aatttttggaaatcctgaaaaaaaaatccaaagatttcaggtcaatatgttttgtacatattgtttggcagccctaataattaaatcttcaaatattcttttggaaatgtttttagtcgcttagccatttggtattaaagcggatttttgttcctacgaaaaaaacaaaacaaaaaaattaaaaataagaggctgcattaaaatttcatttttgaggcaattaaaaaaaggcaaaatgtggaaaatttatgtttaatttaagattcaaaaaaatgccgataaatttccggcaaacgggatttcgatagaaaaaattattagagaataattatccacttaccgtttctgcatcaccaaaacccgaccttcgagtcgcaccttagaaacagagatttcgaatcaaaaattactaaatttaaaaagcaaaattggcaaagaaaacaagacgagaaattttgcttatgaaaataagatccaaaaagagcagaagagggttaattaaccccaagacaaaacgaaaatgaaatattttttcgtataaaatctgaaagattaacatatactgatttttaagatttatcttgaataaaatgttcgaattaaaaattcataaatttttacatattttttgacttttagcacccatatttattttcagaaaattcaagcctaaaaaagcccgtttttcagcagattattactgactgattgctttattatacaaaaaattatttttattaccatttattatttttattgatcaattcaattatagcatatccattttatgccaattttcttatgctattgcacgtttttctttataatccattccatacacaggtcaaataattcaatggcgtaataccattaattaatggcaacgtttaagaagaagcaaagaaagaaattgaaaaataggtacaacaccaaaaagaaatcgctgacccacaaaatgtccaagtctcgaatttgagttttttattattcagatgggcctaaggttaggcaaggggtaatataaagggtatattcgtattcagcgaccccgaaaaccctaaaaatcctaaattagactcattttgtttttataaattttgaaaaattttggacatttcgtgggtttttactcttttggacatttcgtggcttggacactttgtggggatgccaaagaaatnntgggtgaaatt

SEQ ID NO: 27337 - DNA, 951 bp, Heterodera glycines
ctttcgcgtgagcattttcctttttatttcttattgcattttctccgctttcatcctctgttcgttgcttcaaaatgcaaaaaaaaacccctaaattttgggttgaaattgggagtggtcgtcctactgcttcgaaacgaaaatttttatgtttggtgcaatttttttaaacggactgctttttagagaattgcacctcccccccccccccccccacgacgccacagaattattaatacagttacaattacaattaattttgtttcaaaattaaaaaaaaaaatcttcaaattcccgccaccaaaatagaatttggggtctcaaaatgacaaaagatctgctgacgaactaatttatgtttaattttacactttattttgcctctttttgtcagtttccgtacgcatacccaccaaatgggccgtgtggtgtccgcttttgtgaagaaaaagacggacggccaatggcaccgaattggcaaacggaatccccaatggccacaactgtttcagccacgggaagagccgggtgcacacaaagatttcgcaaagattggttaaaaaacgggcaaattttcaggcaaattggtgatcgaaaagggcgattttatggcgggcacttgtcgttacgattcaagcgacaaaaaggaaattgtgccgatgggaagcatgggaatgaacgaagtgagtggagatagagaaataagacataggaaggggaggaggaaattggcacccggggggatggatttccaaatttaataaagcattttttacaagatttaaaaaaattacttaccggtattatttaatttaaatggtttatttttttttgtttttgaccctttagatgtgcgacttctacatgatgttctattgggacgccgcttcgactggaccctttcccctacggcggaggctgtttcggcgaccggaaccctgcgggcatgaa

SEQ ID NO: 27338 - DNA, 714 bp, Heterodera glycines
tgaaatgcgtcttcttgtgccttaacaaattgtccctcctgttgaatcttaaaccattccaattctttgcttttcctttcttttcccacgctcacttttttggacaaaaagggcatttgtgcggcttttccccgctgtgaatgaatcggtgcttcttcagcagaaatttgttgcgaaaccgtttgaagcagttgggccaattgcacagcagcggcttttcctcccctgcgattggtccgtccgatcagtgccattccctttgacttgcgcccccccccccgccactgctgctcaccttccttgtcatttccattgcccatttgggccagcgatccctccgaaagcgtgggactgtcggccattgtctgtcctccaaattcgacatccgtccgcttcctttcttccccctcctcctgcctttctccggacggtgttttgtttccgaaagtgtccccttcgtcttcttcttcgtcctcctcttcctcctcctccaacatcggtccgtccctttaacaatttctttcattttgcattccaagagtgtcccccatttgatcactttttgcgtctccaatcactcagtccgtccctttccctcttgccatgatcacccccccccccttcttccctttcttcgtcagcagttcgattccccccctccccacctccaaataactctcttttccccctttttgcccgtccatcccatccatc

SEQ ID NO: 27339 - DNA, 1845 bp, Heterodera glycines
gatcaaaaaagtcatttgcactcttttgatcagatcactccttcatggtgatctggcacaccaaaaaacagtgaaaatcgggaaaattttctaaaaaattcctagggggctgtgaaattttttgggaattttaagcaggcccaatggaaagagcagaaaattttctaccgatttgctttttgaatggtgggactgacttacacccgctgaggtatagacatttcaattacggtgttgatcatttctactgtaaatgcagtactttttgtggacaccaaaatcccacacctcatcgggtataatcttagccccactaaacatcggacgatcttcttcaagtttggtatcattttaaagcccattaaaaatgcttaattctcacccaaaaaataaggtgtttctataatttatttaaatataatatttcgcaataatccttttaaaaatatgttatcgtcgtagatcgttcatttcttggccgtgtacatctcggccccacgtcttgccagcaggtccgcctggtcattgccataatcgcccgaatgacccgcaactttctcgaatttgacgtcaatagttcccttcgtcagattgtccagacgttcgagcaagtccctattttgcacatccgttccattgatggttttccatccattggttcgccatttgggcagccatttagtcatctattttaaccacgtcataaacgttcaattggcatggcatttgcaccgattggatcagaagagcagagtcagttcggatcaccagacgccgaatgtttcgcgcggttgccttttccaacgcagaaattacggctaaatattcggcacgattatttgtggctgggccattgaccggagctgagacattgtcggggtgtccatcagaccaaaaaacgccgaagccagccttaaatagtacaaaggatttagtgaaaatgacaaaactaagtattcctattcacataaatcactaattgatgtcgaaaattctcatcgctttacttttgcaccgacaaatccattccgactacaagcgccgtccgtatagacaacagtcgtaaatccatcgtccacggaaaccaagttggatgctgccaatgagttcgatgcctcaaccccaaacattgccgtattacgtgtcaaacgtctctcagcaaaggtcgtagcagccgattttacaatcattgtacgaacggggggccctttcttcgaaatcactttgccgccagaattcagagtttctaaaataatatttacagacaaaactattgagtgaattggctcaaatgcattttgcgagcccaaccaattaaggaagcccattccctacacccattctttggcatggccacaaattaaacttctgttttgtgcttgatcacaaatatttcgaattcgggaccacaattctttacattgcccatcacttaccacgatgcttcccaatgaagtcattagcctgctccaaagttggaaacttcttaaactttgcccccgaaaacccattgatgctgtcattacacttttgccaggtgttgaatacgccgacagcccttccccgcgcgacagcataaaacgaggcttgacgcatgacccaattaaacagtagagttgaacaatgtacaaattaaaagtagttgaaaacaagacaaagaaaacataaacaatactttttttgataaatttatcaaaacaaatgaatcgcatcaggcaataaaatgagtgttcatatttggagagggaaattgatttaattcaccatacaatcaaaattcattgcttttcgttttgctttgaaaatgacaaatccctaaatctaaaaaaaaatctcggagaaaca

SEQ ID NO: 27340 - DNA, 1011 bp, Heterodera glycines
ttagtcaataaaccattgcaacatcaaaaaatagtcattctatacagatacgaaaataagtgaaacctataaatttttccacaaaaattttgaatttttttttcgaaaaggggaggttaccaccggcggcggtagtattacataccaagttgaatctcgtgttttcgctgtaagccaagctttccaatcttggaaaaattgaagaataccgccaattttgattttgtaaacagaatcgttcaaagctaaaaattcaaaaaatattgttcctttcgattcctctagggtaaaattgcaagctaagcagtgttaagtgttaaatttaaaaactaattcttaaagtcgcaaagcatcacgctaatggcgagcatgcgatgacgaagcaagtagtggggtgcccgagcgagcggcgccccaattactggccgccgtagtcgagtgtgcggtgtcttggccaaaatgctaagtaacgtcaacggttttctgatgattcggagtaactgggaaacgccaatttttaatgttcagagtgactggtaaacgacaattttaattgaacgatttttcaaaaaaatttacccaatcaaaagtgccatattgagaaaagcataattgtcattaaatgattcggtggaaaaaatttcgtggggcattttcttggtcttcaacgtctgtccgcccgatcagttgccaccagcttcgcccgcctcaccaccagcctcctgctcatcgccagccgtgtcggatgtccaaagcgtcaagttgtcacgcaacagttgcatgatcagagtggagtccttgtacgagtcctcgttgagcgtgtccagctcagcaatcgcatcatcgaacgcctgacaaaaaatgaaaaacgtaacgaaatattcttttttttggggggaattattaatattcccaataatttgaacaaatacgttgtacctaacatgaaccaatgaccccaaaatcacccgatccaacaaataaaggttttaattaaacccattgattttt

SEQ ID NO: 27341 - DNA, 1433 bp, Heterodera glycines
  unsure (1)..(1433): unsure at all n locations
cagcaggtgaatgaagaaataaataattgaatgggtaaccctaaggaaagcaaaggaatccaattccttttttgtccctcaaaagcacattttcattatgttgcctaatttaagccagcctaaccaaatgccaatgccaacgcattgtccctcttcaccgtcctcacattttgccgaattggaatcggacagagacagcgaattgccaatcagcagcagaaatgatcggaacaataacgacacccaaactgaacagcattatcagcgcgtgttaaggatggccaatttgcgggcagcactgatcgacgaaccgatggatttgggcggcgacgaatgcccacgttcggacgaagagttccccacgggtggcgatggagcgcccgcttccgccgctccgtttcccgcttttggctccgtttcggccgcttcttctgctatcccctattttcaccctttttcatccgctcttccgcttcattcgtccgatttgatcacaaggcttctttcactccccgcgttcaattctttgttcgccgttccgtgccaaacgacgacgacccaaaaaacggtgccaacaaacggaataatgaataatgtcaccgaattttgctgctctcatccgtccccaattgccaataaattgccgaaaatggcacatctctcagcgccgtacccattgcattgcgcgatgagcacgccaaatttacatgcaccgaccacgcgaatgtgtgaaaatcagcagaaaatgggaggagaaaattttgacgggacgacagaaaaggtcaaatgggagacggaaataagaaacttttattaatttatcaattttttaaatttgcaatttcctattatttagccaacatttcccttcccaaattcgcattccttccaaactcttccgaagagttcatccgcctcttccaattcgccttcctccttttccaacatttgtcctccgtctttggcctcattttgtgtgccgaattatgaagcggacaaaaaggtggccgaagctttgcttacttcgccacaggcattcgcactttcgggccttcttagtccggaaatgctcggttcgtattttgggcattttatgtttggcacaaatttttacagaaaatgcccaactttgggaccaatggctgtgccaattggccacttcgctgagtgcgcagcaatggcaaatgttttggcgtcattacgccatgcttttcgggctcaaggccttgccaccgcatttgctttcattcttcaataattcttcgctgagtcacttcacagacaaagtgccggcggagaaagtctctttgaacgaaccgccggtaagccaaacaattcaatctgatcactggctaatttaattttttatttttttagacaaatttgatgctaccgcgcantatgatgccatggccaatgcttcatctgctgtc

SEQ ID NO: 27342 - DNA, 1007 bp, Heterodera glycines
tcgatagtattaccgaatgcattaatcgcatgacaattaagggtcattaacgaaaaaggggcgctaattaagggtcattagcggaaaaggggcgctaattaagggtcatcagcggaaggcacattaatttgtgcacctttttgctcctccgcttcttccatcgtttggggtgcactcggcgcctaaaccattaataatgcaaatgaaatgcatgttcaaataaccattttcatttacaaaacccgcctctgattcgtcaatgtctttctgttcatgcatttcggctgctactgcttcagccatagcgaaaataaacaaattcaattggaaaataaaaggagagagaatttgacagggaattcaattaacgatttgctaattgaaacggatgtttttaattttataatttggtaatactgacttttactggtcccataaaaaaagaataaaaaggctgtttttctacggttcttctttccacccgggggttatcggggccgctgatcacgaatatgacatccatttcgaccaattctaaacccggacccgaattcgaacagaaaatcgaaagttcaaattttcgaaatttggatttgtgtttggaaaatggtttaaatgcacggaaacaaacctaaagccatcattcctgtaataaaaagtcatgtaagcatctttttatttcctttttttatgggaccagcaaaagtcagtactaccttataattttgtgtttactgaatggcggggcttaaaatgaacgtttaaatgaaaataaacataagggaccagcagagaaagctcagcaaaagttgtttaccacattttcctctcttttcaaaacactcatcgaccgattctcacaaatataaaactgagaaagcaaagggaaaaacaacgaagaacgcggagaagggatttcaaaaataaacaatgtattctttgcgaaaaatttaatgaattaaacacaaagagaattacacagtaatcaatttacgacggaacgacag

SEQ ID NO: 27343 - DNA, 1431 bp, Heterodera glycines
aaaaaaagcctttcaaaaataatccccctggggaaagggagggggaaacatgtttcaaaatttttcatttttttttagttttattttcctcaaaacgggttcagaattcaataaaaataccattcccgggtgaaaaaaatgggttttgacaagttttttgggggaaaaaagcctttacaaaatattccccttggggaagggaagtggaaaacatgattcaaaatttttcaattttttctagtctaatctactcaaaccggttcagaattcaataaaaaataacattcacggtgcgaaaaatggggtttgaaaagtttatttggaaaaaaagactttacaaaataatacccctgggagaagggagtgggaaacatgatttcaaaattttcaattttttctagtctaatctactcaaaacggttcagaattcgataaaaataacattcacggtgcgaaaaatggggtttgaaaagtttattggggaaaaaaagactttacaaaataatacccctgggagaagggagtgggaaacatgatttcaaaattttcaattttttctagtctaatctactcaaaccggttcagaattcaataaaaataacattcacggtgcgaaaaatggggtttgaaaagtttattggggaaaaaaagactttacaaaataatacccctgggagaagggagtgggaaacatgatttcaaaattttcaattttttctagtctaatctactcaaaacggttcagaattcaataaaaataacattcacggtgcgaaaaatggggtttgacaagtttattggggaaaaaaagactacaaaataatacccctgggagaagggagtgggaaacatgatttcaaaattttcaattttttctagtctaatctactcaaaccggttcagaattcaataaaaataacattcacggtgcgaaaaatggggtttgacaagtttattggggaaaaaaagactttacaaaataatacccctgggagaagggagtgggaaacatgatttcaaaatttttgttgaaatatttatagtctcatctactcaaaacggttcagaattcaataaaaataacattcacggtgcggaaaaatggcgttttgacaagtttattggggaaaaaaagattttaaaaaaaaaacccctgggagaagggaggggaaaaatgatttcaaaattttcatttttttctagtctaatctactcaaaagggttaaaaattcaaaaaaaaaaacattcccggggggaaaaaggggtttgaaaagtttttgggaaaaaaaaatttaaaaaaaaaaccccccgggaaaagggggggggaaaaaaatatttaaaatttttttttttttttttattctttatcccaaaacacggggaaaaataataaaaaaaaaaaaaatttcccgggggggaaaaaaggggggg

SEQ ID NO: 27344 - DNA, 1094 bp, Heterodera glycines
  unsure (1)..(1094): unsure at all n locations
tgacgttcagggtacncctgagatacgccgaatttattatagttcagcggtttcgcacaaaggcaattgggcggtccaattaattatcggtatgtttggcgttcatttggtctcaatttgttgtttaatttgataatgctntaatatcaatttcatcattaaaattaattgctacaaattcattttagcatttgtttgggttgctaatctgttgtttgtgcttcatctcttctgctgatttgcggatgggtgaagatgaattaatgcgtttataaagaaagatttaattaatcccttaattaattaattgctaattcatataatacaattttgtcttccctcagattaaagtattcttttttattattattattaaaggtgatgaactcatacaaataacggatttattttgttaaaactgctgtatatttataaacaaaatgtaagccattaatcagttggtttgaaactgactagagcattgagaaagacaccgaatgagagagaaaatattttttgacagggtttgtactaaattctgaaccaaaaattttgtgatttatttttctctccctggcttttcttaactttttgcactatttcttatcatattgcacttggaaatgcagaaaaaaaaattggctttttgtggccatttaattctgcgtcgtaagtgtcgcttagattgtgaacgcaaatgtcatcaccatgcgacccaaccaatagtaattgccagggctgcaaaaaatatgcatgaaaagtggccaaaatatgcgcataaatatgcaaataaagtcgtaaaatatgcaccaaatatggacaaaaaaaacttgaaaattaggggtgcaaatccaataaaaaatttttattcctcataaattttgtcagttgtttttgcaattgcaaatcaaaaatttgtcaagattttcggcaatgaagctcacttttgacccactcgcgcatccatttaaatttggatttaattttatgcataattaaaaaattcttcctaaaagatatttaaatcgaaatatttgatgaaaaatggcaaaatatgcaaaaaatctgaaatatgtacaaaaaatggcaaaatt

SEQ ID NO: 27345 - DNA, 896 bp, Heterodera glycines
tgttgtgcgtctaaatagcttttagctcctcctttgttttcttgggaccagatcagacagaagatgaatgatagatgatttaaagataaagtttaaaagcttgccactagcaaaaatttggcaaaaaccgaatccacacttagctttgctcagtcaaaatactgagaaactcttcgggctacgacagatggggaataacttgtttgttatgggttatgtgagggggccgtcagagtcgcttttttggtgaattcacggttaagcgcaaaaatgcacgggcgtcgccagttgttgtgttttgctaacacacaaacaagataaatttattaaatgaataaacaataaaattagaatcacaaaataataataaaataacgacggagtcaaattagaaagtccgaaaaataaacaccgaaatgtaaaataacacaaatgcgaagaatgagtcgatgggagaggacccatccacaaataactaatcaataaaagtattcgtgtcgaaacttaataatattaaatatcaacacatccaacaagtgtgacttggatgtccaggagtggactgattcgttcttgtctccttgttcggccctttttggtccattttccgggcggttttttgggcgagatgaaattggcctggtgacgggcctggcgcacaactttgtcgatttcgggtactggaatgcctgaaaataaagcagttattataaaaataagaaattaggaagtaatcgaccgggtcggaagagatggctgaggttccgcgctatttccttagcacgttttgtgcggcttcgtcttgacaaatcgtccaatgaactgaccctcttgagtttgcccttgttttccactgctggtcgctttttgagcaggttcacctcttcagttttctt

SEQ ID NO: 27346 - DNA, 1618 bp, Heterodera glycines
actcacagccgtttatctccaataacagtgaacgtgccgccgtgcactgcggcatctttcttggcacaggcaaagccgcgcaatgaaaaggtggcatccgccgattgggagaagcaacgggcgaagagcaggacgaagacgaacactgacaaaacagaagaagcagacgaaggccacggatgaagaggaaatgaataagccatacgaagaagttggcaattcaagaaaataaaagtggcgaatggtgagaatgtgtgggtcaatacgcgcttttataccaactccgtacgacaatgacaaagaaacaaagacaatggcgctgcccgtcaaaatgtcgttgcgtcgaaatgtcgccgcgttgaaatgtcgccgcgtcataatgtcgccgcgtcataatgtcgccgtgtcataatgtcgccgcgtcgaaatgtcgccgcgtcataatgtcgcccaagctaaaaagagtcaaaatgtcgccaggccgaaaaatagtgaaaaagtcgaaaaattacatttttaaggcttcacaacacatattcagtaacgatttatcagaatagcacaaacaaataacaaaaataataaaattagcaggaaaaaggaatatttcaaaaagtgaataaaagggtaaaaattgggattgaacaattaagcgacatccatgcttgaatcttccatgttttcgtagtccttcaattttcctgcgtatccttcgacctgcagaccaagagccgtcatagcatcatgaatttcggcatcattgtcgtatttggcgtccgctaaaattctcatgatgactgcgtcctgcagcacgtagcgtttgtgtcgtttgtgtatgaagttcccggctgacctcgctgcgtcgacctgtcggtcgatgcttccgctgacttcagaaatgaaatcggaaagggctgggtgatgacaaagacctttctaaaattgttttatttgtgggttttataagtaataaatacagagaaatgaaggtgagttgcttctagtccattgttggtccttgcgagggcggaagccgcatgtgagtgcacgttccaaaatggaattggaaatagttcgcgacggacgacgggttcttcccaagggcgggcttaaaaatttttaaaagaataattttgtaagttttgctgtgcctggctgcaatatcgtcgttgacgatggactcaatgagtactgcaccaacggcgaggtctgttccactgttgacggccatgatagtgttgagggggcgggcgagttgatgccaaattgcacaggctgccctccgccagaagccgtgtcggtttgattcggggttcggctttcacgcgctcgagtattttttgccgtcgaatttccgcctaaattcttctttgtctaatgaattcgcacagtgcacctccatcggtcgtttttttcgtgagtgtaccgaaagcctttgacaacttttcataattctctaacaaatttcccaccttcagaccaaagacaaatgcctcccttttgagtttttccgagttcgaagttgatgaggtcgcgttcttcttcgaaatcgtcgtcgtacccatcattttcggcgttttgttcacgttgctcagaattcccttcgttttcgctgtca

SEQ ID NO: 27347 - DNA, 1108 bp, Heterodera glycines
ttttgggttgattttcgcaaaaaatgagtaaatcttagctttataatgtttttttcatctaaaatgattttaataccacatttagccatttttgaagatttactttatgtttaacaaatttgaagaaattttgagaaattacaccctcaattggaaaattttatgtgcatattttcactttttatgtgcatatttcacgatttttggtgcatattttatgcgcatattttacgattttatgtgcatataattccgaaccctagtgataataacagtgctaaaaatatgcaattttaattgaaatccctcaaaactcagaggatcacctttttcatgctaatttttatattcaaatcacctgttcataagtttgaccaatttttgcacttttatccgctagaaacagagctaatctatctatatatgcttatgctcaagactcgaattctcatgatgattttaaattaacctcttttcaaatgcataataattcccatgaaatcgacagttttttaattagctcattaattaattaacttcagcttcgaatgatatcattagcattggtagaggcaaattatgttcttcaactcactgtttttttgcctctaattgattggttaattacaataatgatgccctcgggcaatatttaccaatttatttactctttttgatgttcccaatcaattccaagtcaattagtgtgtgcagtaatttcacttttgctggtgccctccgcccattaacattattattttatgtacgtatttttttttttcattttgatttattttctttttttatttacaataaaatacagtgtgttctgctggtgttctctccctcccccccaccaattcagcaaaatttgattcaaattaattcaatttttggcgttgtgtagcgtagcgtaaattgcgcgcccttttggaataaaattttaaattctttttatcatttgagtgattaaatgttttttattagcctgaaaattttaaaaagtgcttaggtaactagatggtagagctctgtccatggactgggtgaaagcttagtttggtgcttggtcgtttcgtaaaatccgccattttagcgattttttcga

SEQ ID NO: 27348 - DNA, 1841 bp, Heterodera glycines
  unsure (1)..(1841): unsure at all n locations
tcttttaaagtagatttttcngctgaaaatgagtaaatntaagctttatctttgttttttcttctaaaatggtttttaataccatatntagccatttttgaaacttttactttatatntaaggaattaaagaaattttggtaaataaactctaaatttggaaaaatttatgtccatatttttgcattttatgttcatattttgcgatttttggtcaatattttatggccatattctgcgattttatatccatataattataagccctagtaataaatgtttctttgatgcggataaaaattttaaataaaagtttcgcgatcaaaattttatatttttaaggtagtccatttaacctcgtatccgaacgtgccgtggaacgcttcgacctcgaaggactagtgaaccgaaacaatatttaccggttaagcggcgtcggggggacgcccgtgactacatgcgggaggtcattttattattaattttgtgaaatatatttatagttattttttttatcttaaaaatgccttttaattaatttaaaaaaagaactccgctttaaggtgtttaccctccgcagtcccacccctgaccctatttcgtcattaaaatccgactttaatgataaatagggagtccaattatatggaaatccatatttttttcctggactgttgagggcctgaaacgcacgaaaaacatgtttttagcttggtttgaagcttctaggaaggatttctatatccatattttccatatttttccatatttcgcgatttaggtccatatttccatatttgtccatattttggcattttgtccatattttatgtccatattttggcatctttctaaaaaacctctattagaacggcccccagcagctaaattagcctttttgagcccaaaacccgaaacagttttcaaaaaatcattttttcgccaaaatttctcgagaatattgaataaatttaaattttcttaaaaattaataaatttatgtcaaaaataagcaaaaaagcgaaaatttcgcttttgttgttgattttgcgctaaaaaaattaataaattttagcttttatgtttttttttcttttaaaatgattgcacgtaattgccgaaaaaattcgagaccaatttccgaatgttgaccgactaattgcaaaacgaaagccgtctttgtcaaagcgccttaccgagtcaaaaaatttggaaatgtatctcatatgaaatttcaaccaataaatttgaagaaattttgcactcaattttgaaaaatgtatgtccatattttgacatttttgccatttatttccatattttgagatttttgccattttatgtccatattttgcgatttttggtccatattttatggccatatttcgcgattttatatccatatttttggactccctattgataacattgtatggaaggaaattttataattttattaaacatgaaaatacgaaaaacaactaataataaaatatttggaaaattgaaattgaaaaggagcttttaaggtaagttaatcgccacattaatgaggggggtgtggtgtgtgatagggcgggaccctattgtccctctaactatcacagaaggggacgggacgaaatctcgccgccggaatctcgccgagacaaaatctcgccgccgaaatctcgccgccggaatctcgccgagacaaaatctcgccgccaaaatctcgccggctgaaatctcgccggccgaaatctcgccgcagaaatctcaaaaaaaaaaaattcaaacatagaaatttctcaaggaaaaaaaaaagaaaattcagttataagaaaattccaaaaaaagcta

SEQ ID NO: 27349 - DNA, 1502 bp, Heterodera glycines
tctaataaccagggctgcaaaaaatatgcacgaaaaatgaccaaaatatgcacataaatatgcaaataaaattgccaaatatgcacaaaaatcgcaaaatatgcacaaaaaaaaaacttgaaaattagggatgcaaaataatattaaaaattttattctcataaatttattcggtttttttttgcaaattcaaatcaaaaatttctcaatattttcggcagtgaagctcactgttgacccactcgcgcatccattcagatttggatttaattttaagtataatcaaaattttttcctaagagatattcaaatcggaaaatatttgccgaaaaatggcaaaatttgcaaaaaaaaaaatctgaaaatatgcacaaaaatggcaaaatatgcaaaaaaaaatctgaaaatatgtacaaaaaatggcaaaataaaaaaatatatgcattgcatgttttttgcagccctgctaataacttaaattttagaaatttttaaaatccatctgtctttagaaatgttgccatgatttttgtacttgccattgttgtgatgaaacttgtcgttggtggcatgaagactgttgctaattaggcaactaattatgctgtttcaagagcattttatcaatagtgattgaaccactatgtatatgcataatgaggcgaaaaaagaaatttaaacatttttcctgtgacattattaattatgaactaattacaggcataaatttgttgcaaaatttttgttttttttcattggcataaattttttgggtaaaattttttttgcaataaaaatgaacaaataaccacgaaatgtggaataaaagtcgggtcttgcctgggaaaaagcgcttcgggagcttcgctacctagaaaatctattgggttgttaagcaatttaattgaacaaaaaattagggcaattaggagtgaataattaattaacagacggcgctttgcttcggccgcttcgccccgttttaaattttgtaggactcattaggaagaggtacaaccgtggtttaaaattaaatagttaagaaaatagttttattaaaattatgattaaaaattgaatgcattaataatttttaaaattttaaaataaattactctttttattaattaaaaagaaactttgaagtttataataattgaatatttatttaaattaaaacgaaattcttttttttttttttttgataaattcaaattaaaaaaatacatgaattaattaaatatttttaactttttttttttgtacattttaccatcggcccaaaaattggtgctgagttgtttcttaaattctgccactatgggcctttttcaaacccacaaaggcaggacatttgataaattcgccaagggataataaaacaaaaaaatgtaatttatataaacatttttgctggttttttgatttgaacattttttaattttcagcttttaaagtttttgtaaaataaataatgatactttttttcatatttttagatt

SEQ ID NO: 27350 - DNA, 1152 bp, Heterodera glycines
  unsure (1)..(1152): unsure at all n locations
tttaaaacgcttccaaacggcctatttgggcaaattctgagaatagttaaacgaatgattcgggacaaaatattagataacattattatatttaattaaataattattgtccttattttttcttactgtttgttgacattaatgtcgttattttggaaaatgtctcacagtttggtgaatgaattgttatgggttcaattccgtctttctgctgtattattttccctcacttttctccgccactattttaatgttaataaataaaaattaagaataatttactttatttaaaataaattttaagaaatatattcgattaaaggtaagattgatttagtcagtgataatatgatattttatacaaaattaattttaattattttataaattaaatgataaaatcaccggaaactgattcaaaattgactccaaataataaaatatttgaaaatagcacgccacaaaaaaaagaactatgaagagcaaaaaaattctggatatattttttaaataaattttcaaagtaaaaaatatttattaaaattatatttttttttgcctaagttctaagaatttaggtcttttttgaggaaaatgctgcttcttagcctggccaggcacctggtaaaaataagtccgagatcaattttaaataatatttgaaaattatgtgaaaattgagaaattattgttgctccttacgattctttcaccatttagcagttttctgccctatttaggagtattttctttgttttaatcctggttttcataaacattttcttcttaaaaaattttaacaattttcagaaaaaaattctaatgtctcaatttaactttgctgaaatgaagaaaaaatatatataaaataatttatgtttaaactttttgttgtgccggccgagggcaaacaataattaccaaatttattgaagacaaaataaataaataacaaagaaagcaaagggggaatatcgattggggatgaagcaacaaattanatgaagtgaaatacaagtgaaagaatgggtcaaagggcggactatttatgnngaggaaagtggagagagacaacgggggcgaggacacatacaaataaataattggnngcggctacatgattcccatcccctacatctccccccttaaaaa

SEQ ID NO: 27351 - DNA, 1060 bp, Heterodera glycines
gtgcatatttgagcattttttccacaaacctctattaaaacggccgcctctattaaagcgccctttcggtttctaatgaccgaaaaattttcaaaaatattttttgagtattttctaataaaaaatttaaaaatttctgccaaaaataagtcagaaaatagaaaattctccctttttacccaattttcttcaaataaattaattttacttttattttgtatttttggttttaaaatgattattcatacgatatttagctatttcagagatttttatgcttaaatttaacaaatttgaagagatttgtaaaattttgccctcaatttggaaaaatttatctacatatttttcactttttatgtgtatattttgccatttttggtgcatatttcatgcgcatattttaagattttatatgcatataattcccaaccctagttattgatttcgaaaatggttcatgtgcaaaaattataatttaagtaaataataatttaaaaaattatatgataattttgtcaaaagatttatcactttcactttttcaatacaagacgtcccctgctagactgtgttcaaaaaatacaaaaaatttcatagaaaagattctcgaatcgcgtgggaaaatcctgctggagacttggggggattaatagagagattgggcgataattagagaaaaatggtaccacttatttcctcccatattaagcaaatttttcagaggtaattagcgccaaaaaaaaaattttacggtgtttatttttttataacaatttttttcagaacagtggctaacacatctaggagtgttagcaattggcttgcgaaagaaaaggaggcaattgaatccgctaaccagcagcaggatgaaagtagcgaaactgaaactgatgaacaaagtcatgaacacgcaaacaccacgtcaaatagggcagcgcagcgtgcacgcagcatgcaacgccaaacgcaaaatgctgcagcacgacaaccaagtcgcgcacagcggcaatccgctgatgaacggcatggaagcagttcacgtgaatctaatataaat

SEQ ID NO: 27352 - DNA, 1432 bp, Heterodera glycines
atacatacccagggtatcgaaatcataagcataaaaatttcatgggacgcataaaaccgaccaaaccaaaaagaaatcaatgtaataagtcagtgataaatgaatggtctgataacccccaaagttttaatgataaatttattttttattaaactttgtctaggttgaaattatcagacggaatgacgacgctggaaacaatgaatggtggttggttaggaagagaagccaacacagacactgtactgatcagcagcaaggatacgtcccagcaaattatttgtcatgcctgaaaactccattaaacacacgcgtttgatcgtacttatccatttcaacaggatttgatttatgtactttgttcgcactattttctgcactttatagcattcataaattctcattttcttatcttgtaaatttgatacaacatattgtaagggttatcctttcgaagagttacataataaacattaaggattcgtttgtttggcataatccgaaaataaaagtcattaatttactcttatgtggctctttggcttaacagaacattcagcacaatgacagattccgtgttaggtcaaaaagaatgtttgttaaacagtgtcaattcggagggtcgggtgagcggtcgcatcggatgcctttctcttcttggccaggctgacgttgccgttcttcttcagcccattcagcaattgttccttcacatgattatactcaacgacacaagttcggcacaacgctctgtacaattcttgacctccgatcatttctaactaaaatggtcgggtcacccccaacgcatccatagacccaactcatccataacactgcgagtcatcgtcgtggcatttttttgattgtgcggtctgcttcgtggcaattttatgcatggatgagttgggtatggataagttgggtttaccccaaaatggtcttacatgaaaatgcaaaattatggttgttcagcatggattaataatgcatcattaacatgttacagtatgacatgctaaaatgtctgcgtacggtaagtcagaaagctacggtaccaatttaaaaaggaggaaattaattaaataattccctcaacactttattcagttgaatcagttagtggtgtcaaaatgctttcccaccttcgtgcattccgacattcgaaatgtgaatgaggcggactgtccacagcggcaaactgcgcttagtttctcaattttctcagccaaaggaatgagcatcgccacattttggaagggctggtaaaatcaaaaggtaagaaatgatgcttttatacacagcggcccaattttgggctctcagtgcaaataggtttattatttatttagtaatcagaacgccaaaactttgcaaaacttaaaattttccggggattttcccttgcaaaagcacaagagccgatctcgag

SEQ ID NO: 27353 - DNA, 1443 bp, Heterodera glycines
aaacaaaataaactagtttgtgccattagttctaaaaaatcccgccgatttaccgaactttttattggacaaaattattaggaaaatatcaattcatcaaattaaagcatttttatttttaattttagtttttttttaaagattattttcttttttattctttgtaaaaatatacaagtaaaaatgcaattatacataattatgaatataatattaaaatatctcaattgcgctattaattctaaatttctgtcttaaatgaagtattaattattcactaatttttacgaattaactatgctaaatcttctatgtatttttatttttaatacaaaaattcttttttttttgttttttaaacattttgtgtaaagtcgtcattttcatttattttttcagtacgcgtggcttagaccttcggaggagaagcaaaagatacataataaacgatcagaaattataaaattattgatatttgaaagtatctccttgctgtaataatttgatatttggatatttttataattttttcaattaattttttaaattgtatttaattattaattgtttatttaacagatagtaattttttattcactaatcatccgcataagtcgaatataattattcttatgatcgaaaaaatcagtattttgtttttccaaagagaaaattttaaaatttaagaataataattttcttccatttttccttcttaatttgaaatttaatatttattataatttaataaatttcttcaaaggttttatggcaacgataacttgatttattttggtaggacctcatgccaaagtattttgaggcaaaatttcaagctattctgataacctctgaaccataaaaattgaagaatttataatttttttgtatttgttgtgccttgcacttgaccaaagaataaatatttatttattccaattttggtgaagacacaattaaataaagatgagaaatgggggcaggagtatcgattgagggagatgggcacatacaacaaataaatgagggaatgaacggatggtcaaagggacgggggtatttatggaggaggcaacagagagagagagagtgggaggggaagagatagaaaggaattaaataataattaagcgggacaaatcagtacccttcccaacatctccccccttaaaaaaaaagtctgtcctcatccatcggtccgttgatcagtgatcagtccgctcaactcggagaatagcgttgaggaggacgtcgattgcgttgcgggcgatcgacacggacatggcctcgttcagcatttgcttcgtccgtctcttgtgcaggtgccgcttgttgatcagctggcagagctgcttcgttgggaccatccggtggtgccaacggaagaccaaaagcgtcgttgaaaaatgtcaacgcttcgttgccatggtcatcatcatccgt

SEQ ID NO: 27354 - DNA, 839 bp, Heterodera glycines
agtttgagataaatatttggtggtaatttttctgtgctccccccctgtgcggcccaatccgaccgtagtcccgtctcgatcgcccccggcccctttgtgctctccctgcaacttgtcaaagtcctgcacccaagtgcaggcaattgtcggactccaccgcgcccacacccgcacacaaacaaggagttacgacaagtggcgacctgggcagggacaaccaagcaacgacaagcagcaacaagtgcgcgacaagccgcggcggtgcactcaacggaaaaggtgtggtgaatttggaaaaaatcactcggtgttccaagttttcgctctccgtggcaaaacttggacacaacaaggaggggggaagcaaaagtgggagttcggggaaatactgatcggtctccgtgccatcagtatttcctaggtcaaattactgcttggtctccgtgccagcagtaattggtcaaattactggtcggtctccgtgccgccagtaatcggtaatattactgatcggtctccgtgccatcagtaataggggcaattactggttggtctccgtgccgccagtaatcaagcaaagtactgctcgctctccgtggcaacagtaccggtccttgccaagcaaaggaaggaccgttggcgtgaactgctcgctctccgtggcagcagttactccaacccgacgcggacaagtcaaacggtcggaacaacacaagtgtactgcttgatctccgtgtcagcagtacaaccagagcagccaatcaatcagcaagcaacaagcaacaagcgaaggcaaagcacaacaagcaacaaggcaaagcacagcaagcatcaagcaa

SEQ ID NO: 27355 - DNA, 1506 bp, Heterodera glycines
ctgtcagaaccacttgcgaaaaatgtgacacgtgagttttgacggactaagaatgaatcagcgattatttggtgacggattcagcggagccgcaatgtccgcagggcgacgcgtacaaagactaccagggaaattacttcacatgttcggtgagttgggcaaagggtcgaactgtaacagaacgctgaagttgcagaacacgggcaatggcaacacgtgccctgtcaattacgaatgttatttcgacggttacgtgtggggatgctgcccgacaaaaggtccgctcgttggaaatgcttttccaattaaatttctctttctctgtcttttcattttttctctctctggttttttttaatttttcctccgcttttctttccctttcggcttttcctttggcttttccttcgcttttccttccctttcggcttttccttttcttttcctttggcttttccttcgcttttccttccctttcggcttttccttcgcttttccttccctttcggcttttccttttcttttcctttggcttttccttcgcttttccttccctttcggcttttccttcgcttttccttccctttcggcttttccttttcttttcctttggcttttccttcgcttttggcttttccttcgcttttccttccctttcggcttttccttccgcttttccttcgcttttccttcccttttggcttttccttccgcttttccttcccttttggcttttccttttcttttactttggcttttcttcgcttttcttttccttttcttttcctttggcttttccttcgcttttccttcccttttggcttttccttttcttttgctttggcttttcttcgcttttcttttccttttcttttcctttggcttttccttcgcttttccttcccttttggcttttccttttcttttactttggcttttcttcgcttttcttttccttttcttttcctttggcttttccttcgcttttccttcccctttggcttttccttttcttttactttgacttttcttcgcttttcttttccttttcttttccttttcttttactttggcttttcttcgcttttcttttccttttcttttcctttggcttttccttcgcttttccttcccttttggcttttccttttcttttactttggcttttcttcgcttttcttttccttttcttttcctttggcttttccttcgcttttccttccctttcggcttttccttccgcttttccttcgcttttccttcccctttggcttttccttttcttttgctttgacttttcttcgcttttcttttccttttcttttccttttcttttactttggcttttcttcgcttttcttttccttttcttttcctttggcttttccttcgcttttccttcccttttggcttttccttttcttttactttggcttttcttcgcttttcttttccttttcttttcctttggcttttccttcgcttttccttccctttcggcttttc

SEQ ID NO: 27356 - DNA, 1159 bp, Heterodera glycines
tcattgtcagcattcactgatcggtgttcggcttttgctggcgattgattcttttttttttatttatttccttttcatttgacttttacggggcctttgtttttttaatttcgtttttctctttcctcatttgtttttctgtaaatttctttttcccttctccgatttttatgattcgctgtcgaccaaaaaatttattattcacttttcacttctttttttttgttgttttatttgtgatggaaaaaaagacaaattgaaaagttatttattgaaagcataaatatttaagaaagtgttaattaacttaggtttataaggcgaattaattgatcaattcaatcgatagccttcgatcgcttttttctctgtcacccgttttctctcattttctttgctcgcctcatcacacaatccctcactgctgttcgtctcgccatgggcttaattccaattgggggatggaagcgcatggcacggcattttgcccgtcttcgacgagaaaggcgctgggattaatggcgcgaaaatcttcgccggtggcacaaataaccgatgaaaaagtgatttgacgaagcgaggcgatttgatcaggcgaatacatcaatggattcaaatagaaaaaactgaacggaaaagagccaattaaaaggggtaattagagagggggggggcaataggcaattaagggggagggcgggcaaaggtgacaaatggccgaccgatcagcgtcacgagtccgtctgaactgttctccgataatgcaggagaatgtagggccgagcagtgagccgtccaccggctcctccatcaaaccgccaacgtacaaatcgatgtcctaatttggcaattagtagtaattggcttttcgtcgctttctcttttcccttttagtgttccctccccaattctcacgtcaactttgccgttgtacaaaatcgacacgcgtttctttgcttcgactccctttgcctctgcaattcgtttcttttgtttttgttgtcatttcccccccccccccccccgtcgacctggccaatcctgaaaagactttagccgtgccatcccacaaatttggcggtagtctttgcaaggtcgaatgccctggtctcttccccgctgaatgttccaagaccccatatcggaaacatcgaacagt

SEQ ID NO: 27357 - DNA, 1068 bp, Heterodera glycines
tgacaaattattaaaatttctcaattcgctaatacctacaaacggctttgtaggtaaataatcatttaaaatgaaaaaaatgctaaattttattgataggagaaaatcaagtaaaacctaaaacgtcaatttttttttacttatttttggcataaatttaccaatatgcagggaggctttaataaaggggtgagactttaatagaggactttttcgaaaaaatgcaaaaaaaaattttttaggaaataaatctaggtacataaagttttcagactgtttccagtctatgaaaaaatatgcgcaattacataccaataccctagtaatcactaattactaataataatttttgcgcctgttgcgcttttttctgcctaaaaatgcaatttctttaatgaacagtatgtcatacctaacttatttttttaagttaaataattaaaatattttatcttttttatagcaattttacttccatttggttagcaaaactaattataagacgcaaacaaaaaatgccagtgaaaatcgaaacactcaaagcgggagatggtaagaatccacaaataataggaaaacaatccgatggtccgtttccaaatcacagaagcgacttacccagcggttggtcgaaaggtcgtttgtcattacgtactgactttggaaaatggccagaaaattgacagctctcgcgaccgcggaaaaccattcgaattcactgtaatttctatgattattattctaacgaatcttattttaagattgggaagggcgaagtgatcaaaggatgggacgaaggcgtggccaaagttgtcattttcacatttcaattaaaattttcttttccgcagatgtcagtcggtcagcgggcgaagctgaccatcagcccggacatgggctacggagccaaaggaatccccggaacggtaagggggccgatcccatctcatttacaaaaaagcaacaattacagatcccagggaattcgacgctcatccttcgacgggggaattgatagccgaaaaataatgggaagaaatgacaggggatgagggggaaggaccgact

SEQ ID NO: 27358 - DNA, 1335 bp, Heterodera glycines
  unsure (1)..(1335): unsure at all n locations
ggggatcctagagcaggaagacagtaaattggaaaagctaaagctcccaccccgggatgaagaatatttactctcggacgtgaactctttgtgaaatttgggantttgataaaaaaaataattgttttttnagatttttaaaatgngaaaatttgngttngattttgattgntngntgtgatntggttggagaaggaatggttntntagagagngnnattntngatgtngtgaaatagggagnaggnaaaagtttggtgtaaaatatttaaaaaanaaangaaaaatttaaaattcacaggttgacttcctcctgactttccaccctacccaaaaactctttaaaaaataaataaacaatttaaaaaaaaaattatataaaaaaaatatgtaagagagagtctgtctccttcttaagccaaacaaaagaaaggcaattaaaaaattattaaaaatttaatttaaatatctatccgattctccatagtttttcataaatgaattcgctgggcttggaatttgtattttatccaaatatgtcgtcaaaaatggcaaaatggagaaattcaactcttaatacaatagctaacaatatcactacctggacgaaacgatcgagatatgatttgcaaataataattgtaaaatttttgatttatcttttaattatttgaacaaaattaaatttcatcttcgttatcaattatttaaaatcctatgcagtttccttgttttttttaatttgattaaataagttttatatttttcatttttttgcttggcctttttttgaaaaatatgatcacaaagacgccgtccggtcttgaaatttagtggtttatgtaatatttttgaaatcaaaaagaaaaaaaacaaacaatttttcaataaaatttattcatttttataaattattgtacccaccaccactaatttaaatttgtttatattttatgcaacccgtacttcggcacaggcaaaatgcgtgccgcgtcgtttcataaaattgcgtaggcaagaaaattgaaaaaagtcacaaatattgttcaaatatgagttggattcgttttcagacattccacagcaggcaaaattttgtccccccatttctcctcttgtaaatttgaactaaggtggggggtggaaggggcgggggggggggaattactgataatttagaaatctctttgggcggcaccgcgccgagaaacgggcagttgagcaagtcaatttgaagcggatcatcaacggtgtgtgtgtgccccgctgctcctccctacgccccccacctcattttgaatgtgtatctcctatttgccgctgaggcactttttta

SEQ ID NO: 27359 - DNA, 1061 bp, Heterodera glycines
ccccccccctcccatcgctcgagacaaatggaagatcgagaccgatcgatcagcagggcacagggacaacgtggccccccaattatatatagcatagtgtcagccccttaggggcgtaggggtggcggatggacccagcagcagggagtaagcagagcacagtcactttattgctccgctgctgattaagtggttgattaggggtggtgtacccacctcatttccgtcccatttcggcgaggggagggggtcaattctgtcttggattcaagatgttttatttgtgccaaaactaagaatggtgtgccatttgaaggctttaaatgaaaagttaagagattaaaaaaatgtaaaaaaaaagttatttcttgaaaattaaaaaaaaagtggtattctttgcaatttttcgtaagctaatacatagaccttgttaagagtgatacataatttagtagaattctatcaactaagaaaaaagttagagtgaaatatatttggccagacggaattggccagatggaaagttgctttttggatccggaaaataggaattggatggagcctaagtaaagcaaagatttttggaccggctaaccccagttcaattcaagcacataagcacataggtaaattattggtgccagtttaatttttgggcgctgtcagttactaatttgctgtcccaaaccccgataattttaaaaacatttttttaaattttaaaaacaatatctcatattataataaattttcatttaggatgaatcaaattgatagcaatagcttatactctaagcaaaaacatgattaaaatgattttttatgaatgaagaagaacggatgaggatgaaccgggggatgggaaagcggatggatgtaaaaggcagacagctgaagtaaaaaaaaaagctatactcccgccggtctctgttaaaaattttattcataattattcctaataatttttttaatttgaacatattaatctttgcctatttcgcgattttttgtgcctaaaagaggcagccttaatgatttggcatccaatggttttaatattt

SEQ ID NO: 27360 - DNA, 905 bp, Heterodera glycines
tgaggccgcgaagcggccgaatgtcccccaaaaaattaaaaaacgggcgcgaagcgcccgtcctgaggccgcgaagaattgctaaattacatcactttctagcgacgcggcgaagccgcgtccctgagcgcgaagcgctttccccacggcaccagaactcaactgaatacaacaaagccaactgtgcacctagtttatatatatatagaataaagttgggtttcgtagaaaaaattataagtccccgtagtttgcccggaggctcttgaaagtgcggcattgcttaagcaactttttgaggcgcatctgggaaaaataaggatttttcggtccggcggccagttgagcgccagcggcgctgaaacggcccgaaaatttttttgtccgtctttggtggcctgtaactttgcgggaagaagcgggagcgtaaaatgcttggtgggaggattttaagttggaatgtttgggaaaacttggcgcttatttggcggggctatctacaaaagcctggcctgcagaaattggcgactttttaaatccatttttggcgttttacgtttttcgggaataactcgctgggggttaagcggagcgggttggcgccgcttgagcattcgtgtagtttttaaagctgcatccgatggcgttttcagattttgaaaattctcaaaatttttcgagctaggccccctcgaaaatttttcgtttttgaattttattattttttgccgatttttcccaggaaaacggagaccactttcaagcaaccgtttttcgagctctatcgattggtggcatttttgaaaaaatttcaaaatttttccgggaatagaaaaattttccggaattgagctccccattcccgtcaaggctataactcgtcaggcgttgatttaacgaaaatt

SEQ ID NO: 27361 - DNA, 1403 bp, Heterodera glycines
aagcatttgcagcggaggggcgggccggtggcgcgggagtgtccatgacagcagcggcagcagcagcaaacactgtccatccagcaacaccaaacgcgctgaacgacggcggcggtgctgacacgagggcaatgtgcaggtaaacggaatgaatcattcattgtcaagcgccttctcacaatcaggccaagggccatacgatgaacgattgagacgtgggggggggtgtctcaataccgaatttttcatacgacgacccaattttctccggcataaaaaagcatttttaaaggcaaaaaaagttgtcggtctacatggctgaacaccttcgcaaaattgttgctgaccccctttccccaccttttttttcatgtatgacatggacattaacctagtttactgcgtctaaatttttctgtttccaccatgttaaggcgaaaggatttagattttttaacttcatctgatatattccgcttttcactcggcttacatttagattcgcgaaatccgcgtccacaaggccattttggcggcccggtcacccgtttttgccgcgatgctgcagcacgtggacaccagcgagtccaaaacggtgtgtgttttgtgtggtgtgttgatcgaagtgtcaatttaacattttttcttttcagtttggggcattttctcgtctttttttaatttttaaaaacgatattttcccagggtgtgctcgagataaaagacgtggagtacggggtggtcaaggagatgctgaacttcatttactgcggcaaaagttcctcagcggagctcaacgaaattgcgtccgatttgctgattgcggccgacaaatacaggtgggaggggagaagggattatcatcaagaaaacatagacaaaaaaaagtgccaagatttgaatcgagaaaaattgccatttgaattttgttatccctgtacagattggaggagctgaaaacgcactgtgaacattgcctcatccaggcgatcaacttcgataatgcgtgccaactgctgatcattgccgacatgtgagaagggcaaatacttgggaatcagtgccaaatataaaaactaactgaaatatttctcaattcctcccattttatcgttagttttgctatttttatgacggcttttacggggcaccttcattccctcgctcttccctcccctccttaattccgaaaaattcttttaatattacgtatttgatgagttaactgagattagaagtggaaaaagttttaaaaattaagtcatttctgttttcttttacaattagtgttttataatggcatcaagttagaatcaactttgaatttggcatgcaaatcgtctaactgcttctgctttgcttcgtcgacacgacggcgaagttgggcttccgaccaaagctta

SEQ ID NO: 27362 - DNA, 1749 bp, Heterodera glycines
gcaggtcggacagaaaagctaaggttacacattctcgagccaaggccatactgtcttccccctctctctccgctctctctccccactctctctctctctctctctccctctctccctctctctgtcagtctcccactctctctctcctctcgaacattgttaatgagtggattattattaattactcgtgaatcaactcgccccatcctctaacagtaatattatcattaattagtcgtcatcaatcaactcgttccctcttgtcatcattgatcaatctaccaattgattatatcatatcattaattagttgtcaattaactcgccacctcctgcaacagttgaacctgcaagggtcgtcttcaccatcatcatcattgcctaatgagccaataagtgcccaattagtgcagcaacagcaacaatcaaagggcaacccgctgatcattttggccaatcgcagtgtggtcactgttgcagttgcgttggcccaattgctgttgctttttgcccaaatttatctgctcaactgtttggacgaggacaattttcagcagaaacggggaaaattggtgggtcagcagaaaaacaaaatttctttcattaaaattttaaaagacttcaaaaaatttttcaaattttattttatttgaaaagtttggagttccgtggtcagtctcgagtttttcaaaataaatattggtggaaagtttaaccttgagttttttcgaaaaacactttccggtctttggcgaagctcttggcctctggttccgaggagctcaatctcgagaccaacccacagtacttgaatctcaagcaaaatttctgcgtataatacaataaaaaaaattaaggaaaaacaaatacatttgaaaatttatttcggtttcttcacaaattttgtaaaatttccaaaatgttttcccggtggcacttgccggcaccgctggacggtttaatcgcgttaaattttaacaattttaattaaaaaatagtcatttttgtcgtaaaatttgctaaaaatgttcctgtttttctcccatgacacttaaatttttagaaaattacattttaaaaaaaatttggtgccgaggaacaaaaaaattcttcaattaaaaatttttgttttgttccatttgctcagtttctcgaactgtttgtgctgatcttgagctgcttgagctggctgatcgtttttctgttatctcttcgcactgaatttgactgggaacacatgtggctgtgcaccaacttcaggccaaaactgctcagtgtggtcatcatcatccaggtggtgcacgtaattaattaattaaatggatttttcgtgaattctataggagcaactcgtcctctccccccgtatcgttttctgcacaaaaatttgatttttttttttcaaacatagaaaattttcaaggaaaattcttacaaatatgtttataagaaattaaagaatttttttgttgaaatagattttttatgaaattttatgatggttatttaaaaaaaaaatttccaaaatttgtttttcttgaaatttgcttttcaaaatccacaattttacacatttttaatttgaatgaatcttgaacttatggctaatacaacacgcgaaatgtatagtatagtcatactgtagataataatggtaccaataaaaataatacccccccccccccgtaaaatgataacaatggcattaaaagagctttttgcagactgtttcggccgtgctcattctga

SEQ ID NO: 27363 - DNA, 1552 bp, Heterodera glycines
gttagttgcttgggaaaaaccgggacaaaaatcccggaaaaggtgataggcttttcacagatttttggtctcccagtaaagcatgttacatatgatgcatgaattagcaaataattaatttcaacgaagaggacatcatttaccatgtgtgccatactgtaatttggtggcgacatatcgtcatcgggcgtgtgacttgctgaaatattatatgtggtttgaataacgggcgacagaaatgggagacgcatttcaattcagtttgtatgtctatggcaaaatgatttttgagtcaccatttgatcgtgcttgacagagtcatgcaacacaaaattcttttcaatatccagaagatgacctataatatgatatcaaattatttcctttcgcgatctcgagcccaaattgaaactaagagtgaagaagacaaagtatgtctctgtatggaaacatgacttattaagaatcaaaagggggcacccacttgttttgcaaaaattttttgtgataaaaaagcatgataatttgttatccggggttttaaaggtcgctaatcacgaatctgacatgtattttgactaatttctaatccctaacgcgaactcgaataaaaatcgaaatttttaattttttaaattatgattttttgttcaaatttagattaggaaatcggaattggtcaaaataattgaaagattcgtgatcggggaccccaaaaaccccagagaatacatttttatgactatcacaaaaaaattttcaaaacaaaagggtccccccttttgaaaaaattttcaaaaactcacttttacactagcgccgaattttttcaaaaattttaagtttcgacgcagccaattttgaaatgtaatataaactttttttctttgtcagttaaagttaacaaatcaggcatcatttgaaagctctatgggtgccctatatttatatgtcaaaatagaaatgaatgatttgaaaattaaaaagttatggcacgcggcgccgaaaaagccaagaaaaagtctatttttgaggttatgtttattcataaaattaaaaagtcatcagaagggcgaaaaccatttactctgacgactgttcagataaaagtgttgtagagtattttttgaaatttcgcaggctaatagagaatcttaagagctatcgaatataagttttatttgaatttttctcacaatgatttgaatggtggtgctaggacaaagtccgaatagggcaagtaattaaatttaatttaaaaaaatatttaaatgataaataatgatttaattaattaatagggatggtatttcaaaaaaatgattcacgtaaatatatatatatttttattcttaattaaaaattttaaaaaaatggatttattaaaaaaactataataatttcatttaaaatcaaaaactataacctaaattaaataagtttttatgtgttttacttcctaaaagtatagcccggtaaaatttttgaatcttgtagagagtagaaacaacaaatatattttacacaaaaatgtttcattcggtaagcaaaa

SEQ ID NO: 27364 - DNA, 1186 bp, Heterodera glycines
aaactatttgctaagtttttttgaaaatttttcaaaccctacccggaattttcataaaatttcaaaaaaaattttctaaaattttttccttcaaaaatttctaagttagaattttttttatttcatttggcggttttttgagtaacgccatagcaccgatgaaactgatgtgattgacggcaataaccaaacaatattacctaatctgcctgaacttgattcaagaatacagactatgtcagtttgaaaattccatgcaaaattcccgagacccggccagggtgtgattcccagggttaggtatactgcattttaagcgtccaatttttcaaatcaccgaattgctccccctttttgtttttaccatttttttgaatattttttgtttaatgtacaataaatcttgctctctacaatggtaattaattaaattttttgaaaaaagcgcgccgcaaaaaaaagtttttgaaaagcaaaaaaaagaaaaaaaggtcgtcgatttacatggctttacccccttcgtagaattaggcgccgaccccccccccccccccttatttaacgtgtgattcaaattgtatgtaaatgtatgtcacttatcgtgttcaagcacgccagaaaatccccgagtacaacttagaatcatttttatgggaccagtaaaaaacgtgaacgttttttagccctcttggtttagaaaaatttaatccttttggtttacccctttttagcgcaattctgtctgttatccgtcaggatttgttttggactgtttttggcacttttttactttagcggacccggtgaaaaaaaagctcacgcgataccttcaattctttatttttttttaaataaaaatgatccaaaacaaattatgtgtccatggtcagcgaccctgatggaaacgtacaaatataagacatttgaattttgttgaaaatattacagtccccccccccctccctttatttattttttttcatcgtgtcacctaaaatgtaaattgctcaaaaattcataaatttgataaaaattccggcacttttcggttttatgaccccccccccccagtcatttctatggtaatttgtgaaatttccctttagcaaaattttttaatggcaccgcccgtcaaaaaagaaaagaaaaagttttcttccgacaacatccggctcatttgtgaaaa

SEQ ID NO: 27365 - DNA, 1087 bp, Heterodera glycines
aggcaaaagtcaaaaaaaaggcgaaatattccaaatttaatttagaaaattaataatggaaaaagagacttttaaattgttcgatggaatgaaaaaaaacgaatttggacggggaagagaagcgaattggcattgttccgctaattgtgcaggtgcttttcaaagtgcgcttcatccaaagccaccaatttcagtttttccccaatttgcccttttttccgcgattcgaccggagagaatttttcggcacaatttcagagaattgtcagcccggcaagtgtttcgttcccttttattgttccaatttccttgctctaattggagttcgctcacttttaggttctcccgtccttctccccaacagttcggcccccctcctcccgtcgctttccaatcgttttcccctcaaaagtgccaaatttcggcttctttctcccttcgagtcgcattttatgatcgatgctcattccggcttaattcgttgcgtggcaccaattgacgcggaaaaggcgagcttcgtcaatgctaatcattaactttatctctgcccattaattgcctttttcccgttcagttttccgcttggcactttttcatcttggcacaacaatcgcttccttctgtcgcttctccttccgccctttctccgtcttcaatttccgttgttcccccaatttttactcaaccatcgcttgtgcttatcaaaatcatcaacaacaatgacaatgcgccggcctttgaacggtcgttttatgaagtggaagttggcgaaaacgcaccgaacggcacaaaaattttgaaggcatttattaaaaatagaaataaatatatttgtttttggcatttttagctatttgccgaagatgctgacagaggacagtttggacgcgtctcttattcactggaggaaatcgaattggtcggcaataaaagtgacaaaagcgaacaaccttcgacggatttttcggatttgtccgcccattttttgttggatgaaaatgacggatggctttcaattggcgccccgttggattttgaacgcatcggaagaggcattcttctcccattctatggcagatcacttttt

SEQ ID NO: 27366 - DNA, 2138 bp, Heterodera glycines
  unsure (1)..(2138): unsure at all n locations
ctttttattgatattttgatttttcattaatcttttatcctcccactcatataattatgaattacttgcatgattgaatatgttatctagctattttttggtatattattgtctttgttattattcttattctatttatttaatttttattatgtaaattgtcgtataattttggaattttctttctatatgctttcttgatgaaaggaatagcaattcgtattagccgaatgaaaagtttcaaagatattttgacaatttattttttatcctagccattaaggttttaattaaagagcggtaaaaaaaattattccggaacgggaacgggaaaacgaaaatgaacggggcgggattcccgaacaggattcccgcctttttcccgttcccgtaaaaatcccgtcaattttaacgggaatcccgctgggaacgggaaaaaatttttttcaaaaaaatattgattttttctaaaattttgatttactattttttagtgatatatttttaacaatttaaaaaaattatttctatataaatgattaaatattgcttttattaatgacaaaaaatttaaaatttaatttctggaattgatttgttttaaaaataagccggtaacaatattttcgaggcaccggcaaaaactggtaatttcctgagttctaaaattcctagaaaattttttatagagcaataattttcgttaaaattgtctattttttttaattccaaaatattcttatagaatttttttgtgttttaacttattgacaaaactttttttgattaaatcgtttttttgaggcgcatctttgccaaaatcttttggggaacattggggggggggggcggcggtgccngataggcgccgcccgggggttaaaatttgaaattttaatgaaatttgttagtagattttgtccaaaacatgtccaatcattggttagtttatggctctatggctgttttaaaaataaataaaaataatttcaatcttattaattaaatttcaactaaaataattcaaaggaaaataaaaactaacaataccaatggggaattgaacccaagtgacaaataataaaagaccaaagtgttaaccactcggctacacacatatgttcactcgttgatttaaatcaatttatttatttaattttcccaccaatatccttcaaaatttttcacttagacccccattcttaccattgttttggaaataaattcacgatctttgatttatttaaaaattattaattaatttcttttaatattacatgattattggcttttaccttattcatcttaaataaaacttttatttgctttttaatttcttacctaaatgaatgtgatttagctatttttctttgtttttttcattttttatgcatgtcgtgattaaaagatttttaatgtttaatttgcgttttataatgcaaaaacataagcatttgtttttcgcattgttttttttatttattttatgtttattattccaattatgcttacttaaacttttaaactttagaaattaaaagatattcgcgttgtaccacaaaacaatggggtttttcacatgcctttgccgatcatgttggcctcgtataacataaaacattgaataaataatatttttcctctttaaccatgttatttataatttttaattgtagcaatacttgatttgtatattatatatgaaaaaattagtattattttatataggaggtataattatatttgtaagttttaattgttatgtttttttcttgtatcaattagtattttttggtaatttataaaaaaaaatttatttatgtatctcctattatgtatcacgcttttcttgttgttaataaatttattttaaattttaaagtataatattttgttgatgtgtttcgtttcagagagtgagaagagagacacaaattttttgcacaaaaatacttttgtcatcaaaatttgcaattttacaatatcgcctgttttttatttagcaatattttcagctgtattttagtcaaattgaaaatttcaaaaaaatatattttttcaagatgcacattgccaaattttgtctaactgttttgaacgaagtgcttcatctccctcagcctgcttgagatgaggag

SEQ ID NO: 27367 - DNA, 1502 bp, Heterodera glycines
aaaaaatgtgtcgcagtcagcaggattcgaaccctgcgcgggcaaagcccaaattgatttcgagtcaatctccttaaccactcggacatgactgcactagcgaacttgacctttttttagaaattataaaataaataaaggcatgttttaggtatggcgcgagacaattacgcgcaccgaaacccaaatttatccgatttggacgttccggacaaaaaatgatacctttcagcagaagtttttcaacagaaactgtaattttactaaataattttctttgaggattaaatgcaaaattaagcagtacggcgacgaagggatcaaccaattggacgcgttggttgatgcggtcgataagctgtatcaatcatcgccagaaattagggcattcaaaactgcgccaaaaagggcacaaaagttcatacgattcggctgatgagagagaatttgacgaggaaaagcggacaatctcagaaaaagttaccagcagacgatctcacaatcccttctcttttctgaacaaataaaataagttttattcgttaattcgaacatttgacaatttaatgtgaattatggcaattagagaaattgtccaaaagagaaagagaggcgagcaaagggcgagcgattgggcagggaaaaagcgccggaagggatcgcccgcggggatgaaaggctaaaagggaagggaaggggagaaaacggacggagggacggaccacggcaaaaagacacagggaaaagtacagcgaaagtgcgcagacgacgaacagacaaaagcgaacgacggaaaggcgaagggacgacgccattgggcagaaggaaagcgaagaaaggtgagaaaagcgaacaaatccgaatagagaggcaattaaccgacaaatgagcatagtcaacgaacactcaatcatctcaatttatacacgagagaaagaaacaaaaagcgaaatggaaaagcgattttcgaaattgagtcatttgtttgtgcttcaaagggaagggacgctccgccgccattcggtggcctctcatcgtttgcctccgtttgtgccgctttccccacaaattcatcgacttaatgggattcgttcgttctgaccgcagatcagctgaaagtgccctccgaaatcattctttgcctctccgatggttcgccccctttccgtctctttccctttgtgcgtcattttcgccactttttcccccttttatggggcggtccaacaaacacttctcattgacttggccaaaaggcattcagcgaatggacaacagtttgaagggtttgacaatttgctgaccataacgaagggagagaaggaaagagtgccaaaatggggacaatttcatgccgcggcagagacccccgaacatttgctgaacaaggttggcccccccccccatgtcaaagtcgaaacacttttaagttgggcgaaatgatttcttctcttggcaaaatgttttcgctacgtttcgacgaattgtctaaggtggggaag

SEQ ID NO: 27368 - DNA, 1937 bp, Heterodera glycines
  unsure (1)..(1937): unsure at all n locations
ttgtaaaattagcaccgtaaaaagtgcattaaaggtaggaactactcagaatttcataatattgtcttataacaaaaatttattaattaattatggaggtggtaaaacaaaaattttatggataattaaaagaaaattggcgttcttatacagtcgggtcagaagtattgcttaaaatttttttattaattagtatttaaataatttaattcttaaaataggcaaaaaaatatttaaattacttaatagcattaaaataacctaaaaaatgtatagagcgtaaaagcggtcatggagtttttgggaaaattcgttaaaaagaaaattcaaaaaccgaaaaactctctagagtggcttgcatgaaaactttgaaaattttcaaaaatgaaaaaattattggatagagcttacggaactcaataaaattttggaataaaaaagaaatttattaagaatcatttctgagaatttgttttaccgactcaagttgactaccaagaaaagtaaaaaatttctgaaaatttttgcggaaaacaccaaaaactacattttagtaagtataaaaattatttttttaatatatataaaaattaattgagggtttgaatacaccctttttgagatgctctttcgaattacaagactgaaattgtaaagtttaggaacaaaatctcagcaagccattttcttgttcgagactttatcgacataatttcaccatatatctggcatttcttaatcggaaatcaatttcaccaaattattatattctcataaattttatttcgattaattcgtagtaattcataaaaaattttctaaaatgttaattagttttttgccagactctgattaacaatttgctgtgaaagttatctgttggtcgatcattagcagagggatggacaaatcatcacatttaacattgggaaaatagaaaatcgaagcaaatgggccaccaccattgatggtcgaaatgattaatcgtagttgggttgggaaatcacaaattcaataggtaatttggccgtacattttcattcattgggtggcttttcccnagagttntacgctcatctctttccccttttctattccgccntaaatcgtggctatgtcgagtgactgtggcctgcataaataccaaattattgtcattgaaaaatcagttttgggattgggctgggatggattttgggctgataattggacggctttttcgttacttctaactttaatagataataaaaactcaacagcaacaaaaaataaaataaattcattcaaaagaccaaatcaaactatgatttggccttttgttttggggctgttaatgtccctcgggcattcggctcccgttgtcaatacccgcaccgaactggcgctgcaccaaagcatcgccaaaggacaaggcaccaccgcatccactgcaaaaagcaccatgactacagcgattgctgtcatcgaacaccattcgaaagtgacttaaaggcttaacaaatgcaagttcgcacactttttttccaaatttaaggaaaacacccgagctctgacggttttcaaacgtgaagaaaagagctggaccagcattttgctgagcttgctcaaaggaattggcgggattgggacatttatcttggatttgggtaaagacattatcaaagacgtgttgaaaaccgtcaccgaaaagttgatcgaccacgcgctgaaggaaggtgttggacaaggggtgataattaagaatatgctataatattagactgcgacacgctccgcaaacggtgctcgtgcggttggggcgcttgccacccaaaccgtggtggagttgccgatgcatgttgtgtggaaggctacagctggaaatgctgcgaaaacgtagtttttacttgttttaactaataatatttttttattgttttttaatattcataggcaaa

SEQ ID NO: 27369 - DNA, 1015 bp, Heterodera glycines
agaaatcagttgacgaaaatttggagaaaaatgggaaccttaagaaacgaataaaaaaagagaaataaatggtaaatattacaaaataaaagaaaaaataagcaaaaaggaaggaaatattcggaaaaagaatggaataaaattgaaagaaaataaagaatacactggggaacaaatcgtacttaattcaaaaatggaaaaagaattgggattaaaacaaatgaattgttacaaaacaattaatgattagcaaaaaattgaaattattcaaaaattcattgaaatgtcaaatgaacataaagaaaattggaagaaaacactcgaaaaaagaatggcaacaaaaggaactcggaattagccatcagtaattagaaaatggaagaagcaatttggaattcgctgtaaattaaccaaaaagaaaaaatgagaaaaattaaaatttattggcaaataaaaagagaaagacgaaaatgagtgacaaagaaattggaaaatattgaaaattcataaatcgaacattttaagatggaagaaacaacttggagaataaatgttttggagaacagcagaaaaaaatgagtgatcttggaattaattaatttgatatataaaaggtttagcgggccaggccgttttcgcctggcccattttcgcgtgggccgttttcgcgtggggcggagtttttggactataacttttttctttgccaaccaaatccaaccattcgaacccctctcgaataaagccacccttctgaggggggttgaacgggcagagacgttttaaataacacaggacatttttgatttttaacttaattgttaacacttaatgaatgtaattttaatggtttggaatgaatgaagtccttttcaatcagtataaatatcaactaatagcatgggatctgaaatttggaaaaaaattgggaccggaacttgccagaataaaaaaactcccaattttataattttttccaatgaaaacatgataaaaaaaataaatttttcttttc

SEQ ID NO: 27370 - DNA, 1045 bp, Heterodera glycines
ccctggttcaatctctctaccgaaattaaaatattttgaattttctttttgtatactcatggctttcctatcgacaaaatatgattcttaattttttttaattgtattttatcattttttaaagaaaatccgtacaaattgagcctagtaatcccaaaaaccagccttttttgttaaaaatctgttaacaaatcttactcaaattttcaaaatttcccccggcggcgcctatcggcaccgccggaccgcttttatttccaaaaggtttttggaaaaagcgcgtcgaaaaaagtgatgttaaaagcaaactgaatttctattaatattcgatcatttggtccaaaaatgattaattgtttgaaataattgaagtaaattcgatttgaaatttttaattaatttaacttagctttaacttttggattttattaaataaatagcaaaataaattaattaattttgtattatttttacttgaaataaataaaatttatttttaaaattttttgaatttttaatatttcccagttggtcccggttcccggtcacggacaaaaatcgaggtcccggtcccggttttgctcaaaattcccggtcccgctctactctatttaaaacattaatgtcgacaataaatttttttgaggatctctttggatgttccgctaaaatataatctctaaatatcagatcaaaatatgctatgaagaaaggggctcaaaaatagcatttctgcgttaaaatttttagatttggtgaaggtttttagtgcatataaaatcatattttgggggttttacgagaataaatgcatattttgccatttttgcgtttttagagcatattttggtcatttttggcaaaatcttcataagaaaaatgcaataaaaatgaaaaatacacccctaagatcgacctttttgggaatttaaaaaagatacccttgaaaaccataaaaatttgaattttttataagaacttttaaaaaaatgttgatataagaaaaatgtaatttggttttagcatgtgaaaagattttaaaaaa

SEQ ID NO: 27371 - DNA, 1647 bp, Heterodera glycines
gtttttgcttctttcacttttacatcaatggcaaatgtcactttgtcctcgcttttgttgaaaagggcttcttccaagtccatcaatttcttaattgtaaattatttaaaattaaaacagtcattttaaatgccacccacagcaaatgtaatgaaattggggaatccccagtcattaaattcattgtttataacatgcgcattaaattctctcctgaaatctgccacaccgaatatttgtgaaacgattcgaatgactgccgaacattcgcagttccaattttctgcccaatgcaaattaattattaaattgttaattaatatttaattttaaccttctgttggagcagtgcacaaaaggaaaatgcccaaccacttctcattgtcattgccttccgacttcattcttatttgtgcaaatattttccatggcaatccctttatataagtgactgtttcgcttttacgttcagtccatttgagttctcgcaaaaattccgacattttttcaatttccaaagaaagtgtccactccgatttgttggattcggaaacgaatttctccattttttcatctttcactgtgatggcatcaatggtcaatgtcactttgtccgcttctctgttgtaaaaaccatttgatgggtccatcaattccttaattgcccataatcgattaataaggaataaaattaaatggccaactcacggcaaaagtaataaaattagggaaaccccaccagctgtttttattgttaaaaatatggtcacaaaaagtcccagtggaattatccgccgctttcttttgcgagacaattcgaaaagtggccgaacgaacacagcagcgccaaattgagtcttaatgccattaattgtcgctgttcattagcactaatgagcagttaattagcaccttcttctgaagcatcgcacaaaaggtaaaagcccaagcatttctcattgtcagtgcttcccatctttgtatttattttggcatatattctccatggaagtccatttatgtacaaagttttgctgtatcgactgctctcaacttcctctcgtgcaaatttggacacttttccaatgtctattattaatgttccaaatgtccaaattcgccagtgtttaggaaattgcactggatacagtaagtcaccggaaatcccacagaaattcggattggtatggtattgttcaatgccgaccacttcttctgttgttaaaatgccgaatggaactggtaaataagagaaaggctgtgaatatactaatttaaatagtcagaaaaagatttgacccaaaaataaatattattttttttaccaatattttcagaaaattcctcttttgagaaaagcggaaagcgaattttgaacaatgccgggccaagcatttgacgacgattctctgcagaacattcaatcccattttcacggcatttttcatcggcccaaagaagtgccgaaaaaaacaaaaaataactattaattattattaattaattattttctattagagcagagcagtaattgtaaaaaaacccggtttggggaacagcggggtccggcggtgccgttaggagcccgcgcgaaaaattttgtaatttttaaatgccgattgtaacagaatttgtcaaaatgacaca

SEQ ID NO: 27372 - DNA, 1003 bp, Heterodera glycines
ccgattttgagctgttttgccgcaagaatccttttagggtgggataaagaaaaaacaattccgagaattctaaagatattgctgcttaaactagggggaagtgaaacaatgccatagtcattttgcttttctgctgtatttagggtgaatttacaattttcgctggcttggaggattgtctgcattttatcaagaacctccatttttcagaatcaggttcgaattcgaaggccttaaatacaaaggagagcttcataatattattttccgcttttgttgcttagatttggagtacattcaacacatcgccttgccctatgctgaatcggcctttttcgattatttgaggagcgaattcaattgcaaaggagtcaaaatttcggcagtccccgaggtgtttttcgtttttccattttcattgccttccccaccctctttttaagggttcaatcgtttttcctcgtgtccctttgattatcgtcgaaggtcccttggcggtctgtcaacttttggagactccgttgctaaacctggtcaattacgccagtttggtgaccacaaatgcggccagattccgattggtctgttttgtttgtttctcctttaagtgttttcggcttaggctgctggcgaatccatcggtctgttcgaatttggccttcgacgtgctcaggggcccgatggcgctttgtcagcgtcgaaatattgctttatcggaggtggggaggcgaggagagatatttataaatgagaaagattttcaggctttgatagcaccagcaatttgttggccggcaaattgtacggcattccggttagtggaacgatggcacattcctttgtcacttccttcgaggtcttacaattagtgtttatttcttatctcattatcatccattttcagcccgatgaaaccaatgaaacgtccaaaatttgctgcttccaaaatgacaaaatggtcgacctattcccactgtcccaaggaccaaacttgacttttttg

SEQ ID NO: 27373 - DNA, 1398 bp, Heterodera glycines
aatttatttccttatttatttcggaatgccatcgtccaaagcctttaatccttttaacatttccatgctaattctctgattttgtgctgattcactcattccgattcgtcaggcgtcccttttagaatccccccccccccatttttttcttcaaaatgccctttcttccgtttggccaattcgagccgtgctgctcctccttcgattactccttcataatgtttggctcccgagttgttggaccagcacattcaaatggacgacaaaaaacggacagaaaacaaacggtccgatggcggggaaagtccgtcggcaattggtcaaatgagtgccaccaccagtcaatgggaacgaattgctcacaaattgttctgtttatggtcagcgccatagctttaatcagcataaatggcggaacgatggcccaaaacaccggtaaaacgggggagggcacggccaagccaactttgacgaatgaatcgaccttcaggcaaatgctattccttctcgcccggcctgaccatccccggggcggactatcggcgcgacttcggactttcgcgcagagaatgtgccgaagtgtgcaaaaggtaaatgtcgttccgttctgtcgggaatgctttgactttgctgcttcagcgatttgtgctgcatggcattcgaatggcgtcgcaacggcggacagtgcactttgaagagcaggtcattgaacggaacggtgacagcagcgacaaaattggaggacaatggcggagaggagcagaagcataacacggagcaggacaaggaccaaaaggatgaaaccaatggcggaggggaagccgacgcgactttcttcgcactttgcttagactacggtgggcccttttttgtaagcggaagacaaaaagcattggagagtgggggagtcataattcagcgaaaggcacaacagaacaatcaattaggctaattggccaggggaaatgcatgtctgatgacaacgagatgagcacagtgaggggcggagagatcaaaagtacaaaaacacgcggaaaatggccaataattttaattgatggtcgacttttataaaactttaatcaggccaacaaatttggagataatgggaggaaatcctctcaaatggaagtgatcttagtaatggcccgaattgggccgagtttttgcaatttccctataaaaagggtgctatgtcgttttataaaaaccatcaataagggcgttatatattgagcaaaattatgccaaacgtacccaaggaaccgggttttcaaacatttttggctataacttttttgaaaccttaagaaattttttgaaattttgcaggctaatagaggacacatagggctatctactaatagcaagaaaaaaaaagaaaaataatttctaaca

SEQ ID NO: 27374 - DNA, 1455 bp, Heterodera glycines
  unsure (1)..(1455): unsure at all n locations
tttcatgggcttcatcatcatccattgctgatcaaccacatcatcaacttgacatcatcaagctcatcgtcctcatcaaacggttattcggtcccacttggtcagttcagttcaattttttggactggaaaaaaggccaattgaaagtgagacagagagagagagagagagaggtgccgccaaatttagtaaatttgggaaataaaattttttcgaagaaattttgacaatttaaaattaaatcgaaaatctccctgaatttttgggcaaaattaaaactcttcctgctgatgaaagcagagattgtgtcaaaaaattgacagaataagcatttcaactcactgatgaaaaaagccttggtgttctaaatgaatcattaaaacaattagcgaaattttttttaattttgggaaaatttttttaaaaattttaattttttaaataggtcatcatcgtcagccggccccgttgcaattcccgcccaacggtttgccaattcagcccgtatttgtgtcaagaggcaacaacaaccaataccagcaccagcagcagtacaactttggctgtccaagtcggttttgtatggttttgttctctttacaatctgtctgtaaattaaaaaataaaaataaaattttattttaataataattaatctcaacattttaacaaataacggaaatatgcaaattaattaactattaaaaacattttgtgaatttttggcttttaagataattctgaaaatggggattaatttatttgggaattatttcaagccctttcgaaaattaaattttttttcacaaattttcacctcttaaacttattcaaaaaatgttcacaattaaaaatatctttgtattatatataattgttgcaaatagatggcatttgttcacgaattggtgcccaactgaacaccttcaacaaccataatgacgacgatacagtaacccagccaccgtgtgctgctcgaaagagttccgacccatgcgccccgcgcattggtacggtaacccgcgttgattaaattacagtattcaaattggatgccatttttttttttttgaaaattttggcaatttataacagggcattttttaggaaattcatcgattaaaaatcaaaattttttgtacaaatttaaggcgaatcaaccgatcgcgaaaagaacaacaatctgtggacagaatggacggaatggacacagtaaaaaaatgcaataaaattataattanaaacaaataanaatcaaaattanaatgtgtttgatttgtcattttttgccagttgttcccgcagttgtggtggaggagacagatgaaacgacggtcatgcaaaagtggtgttgatgaccaatgtgttgggccaccaattgaatcgcgtccatgtaatgatgaacaatgcccctacgtaagtgaacctcttttgattgtgattacagtatgccat

SEQ ID NO: 27375 - DNA, 1180 bp, Heterodera glycines
cccgttgcgattggtgatgattttgagttccaaatgcaacaatttcgctggccaagcattgtccaaatggttgcacacgccgagaaaagatggccaacccaagcgattgcattgcgaagacattaaagaacaaacgaacttcgattggatcaacaatttcaaggaggtgtggcccaacatttttgtgatttttgtttccaaattgtttagcattttctccgtgccaatgccatttcttccgtcagttacgaaattcatttttcttttcgcgtgccgtcaatgccaatgatgccatttgaatgtgtggtgaacgaatcgacaaaggaaaagctgacattgaccaaagcaaatgaaaatgaatgggacatcgattggataatgaagcgttgtaaaattggagagacagcggcggttcagcagcacaaagagggcgattggaacaatgtgttcatttggctttttgctggcactaattgcattgggtgagcaataaaaaaaggcatttaatttttatccgaatttgaattttgcgcttaatttaggccattatctccgccaccaccagcagaagaagatgaagcgggacaaagcatcacaaaagggccgtcttctgctgacaaatgagtgacggacaaacgaacaaaatcaatgatcagacgcagaagaaatgaatattaattgaaaatgaccgagcataattcaaatcagtgatcaaatgtattttatgaagaaaatttttgtttcaaaagttggctaaatatggtgttaaaaattattttagaggaaaaaaacaagacgcagctaatactcatttttagcgaaaaatcaaattgaaaagcgaaattttcgctttttgcttatttttgacataaatttatcaattttaataaaatttaaatttattcaattttacgagaaaattttttttgtgccatcaaaaatattttggtgggcaatttaatattttttattcttcggccttattgaattttcgttgcacttttttcaaaacattttttgatgggttaaggactagcggtgccaaaacgccagttttaccaagaatgtttttaatttggtcgaccttaacaaaagttatgacatttttttgtcgaaaacagtacgagttggagcagtacgagttggagcagtacgagttggagcagtacgagtggagcag

SEQ ID NO: 27376 - DNA, 1136 bp, Heterodera glycines
attaaggtactatacatccacatttatgtgcacccaaattttggaactgtctcgccctcgggtgggacttaaaagaaggtggaggcaaatgtttgaaattttcaattcaaaattttcgttcgttttcgaatcgcggaatcgtgcgggtttaaaatttaaaagctgaaaagtttctatgatttttaacaaaaaaatccatttgtttttttttcattttttagaccctgaaataatgcatgaaaaggggcgggttagacgacgacggaattccttacaaagggacgcaccccatctaatttttgcaattttcagttccattagagcccaaaatcccctacctaaattgactagtgatagtccaattaaggtactattacatccacatttatgtggcacccaaattttggaactgactcccctcgggtgggacttaaaagaaggtggaggcaaatgtttgaaattttcaagtcaaaattttcgttcgttttcgaatcgcggaatcgtgcgggtttaaaatttaaaagctgaaaagtttctatgatttttaacaaaaaaatcatttgtttttttttcattttttagaccctgaaatagtgcatgaaaaggggcgggttagacgacgagggaattccttacaaagggacgcaccccatctaatttttgcaattttcagttccattagagcccaaaatcccccacctaaattgactagtgatagtccaattaaggtactattacatccacatttatgtggcacccaaattttggaactgactcgccctcgggtgggacttaaaagaaggtggaggcaaatgtttgaaattttcaagtcaaaattttcgttcgttttcgaatcgcggaatcgtgcgggtttaaaatttaaaagctgaaaagtttctatgatttttaacaaaaaaatcattttttttttttcattttttagaccctgaaataatgcatgaaaaggggcgggttagacgacgacggaattccttacaaagggacgcaccccatctaatttttgcaattttcagttccattagagcccaaaatcccccacctaaattgactagtgatagtcccattaaggtactattacatcccacattatgtggcacccaaattttggactgtct

SEQ ID NO: 27377 - DNA, 1272 bp, Heterodera glycines
cggaagacaagattcatttaaaataaaaaaaggcttattttgcgttcgcaaaattatcgactaattaataattatataatgaaatcaaaaaaacattaaaataaaatctaagtgaagaattttaatcacaataatactaaaaaatacaattacataataataaaaattttttaataattataccataagttcatttaaattgtgatcctttattaaataattggtcttgtctttatatttatttactttaatttaataaattttaatatcggtgattgttaaaaatgctataaaaacaaaacatatataaattccttggtcagtaaaggaaatggagtgaatttatttattttttctataattttttagattatttttaaagcgatatatattatggtattccatgaataaaattatacataaaaatttaaaaaagataaattttttcatggatttcaaatacactatttaatctaaatttattttattaatttagtaaatttatttttaatgaataattatttaaataaattaaatttgttttaagtgaatcttttttaatgtcatattctcatgatccatgggctcgctggcggcgcgcggcgcttatcataaatgcattttttatttcttaaattcttgataattaaatgcaaatccataaatttgctttgtttaatgccttctaaaagtttaaaaattcgtattttaacttttatgtttttttattctttagcgaaaatgataaattaaatttttattctatatttttatgtattggtgtattaatttcgaaatataaaattttattaggtaatagtatgtaaggtcggtgatattttcatatgtattaataggtaaagtaattgaaatgtaaattatttttattttgaaaaattacaattataaagtgcagtcattattttttactaatatgatatgagtttcattttagcttattaaattttattttaatagaatatataatttaataaccacattaaatatattaaaacacttcaggaaaaaggaaaagttaaacaaattttcttcattttttaaaaaattaaaaattaaaatagggtttacattctgttttattatgtttgtattctgttttgttatgtttgtctgctgtattctactgcattctgctgtattcagctgtattcagctgtattctgctgtattcagctgtattcattttttggcaatcaaattcttggcaaaatgtccccaaaaatgtacagttttttcacttttttgcatttt

SEQ ID NO: 27378 - DNA, 1414 bp, Heterodera glycines
  unsure (1)..(1414): unsure at all n locations
tagcaaaaggggcagattgcgggacgcaatgaaatgctttgtcctgtaaattcaattacgttcaatgaaaaaaatagaaaattataccaaaaggggacacaaaataatntagtcgtaaagaaaaacgaaattatcaccattaaattggaattctgacttacggaatttcattttgttaacaatacgtaaaaggaacttccaaaaaaaatcttagaagattttttcaagaaaattgagagaaaatttttttaaaaaatttcaaaaatttcggtgatttattggaaaattctgatttttttccaaaaattctctaagtttgacaatttatttttaacgttgtgcaccccacctgttcaggatggacacgacgtccttcaccagtgggtaatttgggtctccttcccattgctttttgtgtccgtccactttctccgccctttcttcctctccatggccatctttctccccttccgtctcctccaaattggcatatttctcgttcgttttgctcaaattcgtaaccaatggcttcaaattaggaaaccattcgttaagtgcgcttaaataagcgcgaagtgctttggccaaaatgataattcgcttctgatcactccggtcgagccaaagcaaaagttcggcgacaacacttcgaatttgggggagaataatttggagagaaaaacaccgcgagaccaattcagcgaaaatgagcggaaatcgaggacaaacttgaaaagggagtagcatttatgaaattgtgaagaaacttgagacattaaccggaaaagtcgcgagaatccatggaaagtttgaagacaatttgttcggcatggcattggagtaacagacaaacgttcggatgaccatttaactaaaatttacaacaaagcgatgaactcaaattccgagtttttgaaaattgaacttcagcgaaaagagaaagtgcggattcggcagcatttttgacacaaaagttagaggacgaacaccacttgagaagctcgtaaacaacgtcaatgtgaagctgtgaaacagatttattgggaaaaaagaaatggaaaggcaaactcgagaggaaaacggatgaaaaggaagagaacggaaagtggaaagacagtgcaaaagcaatctgaaacatgacacaaggacaactgcaacaaaaaacagacccgtaatttctgcccgaagctgaaatttaaaaaataggtaatactggagaaaactttttggcgcgaagagcacaaataatttaatttgaattcgcccctccaaaattttttgaaagaaacacatggatggtttaaaagataggtattttgaatgatttacctgttttttaaaaaattattttttccttaggaaataagaacactttttttttgagatttgttttgaaaaatccaaaattctattg

SEQ ID NO: 27379 - DNA, 1304 bp, Heterodera glycines
gaaaaaatcaggacaatttgaattctaatggactgtaaaaataatttaaatatttaattttttatcatagggatggaaaaaatatgtacaaaaaaatggccaaaacatatacataaatatctaaaaaaaattccaaaatatgtatgtcaaatatgtatataaaaaaagattagtttttttttttttttggaaaaattcatcgtaaatggtgaaataggcactaaatcccataaattgtctctcattccataagctgcatcatctacttcttacaaatttttgtttttccaatttctgagggttcgttcggagattttcaagaattcagaaatttgtttgtcactaaatgaagaattcttctcatttttcattttataataaattttcaattttcttgctttttctccattcgaatattgatttcctcctaaaaaataaaaataaaaaatttattaaatttaattaaccccattttatgccaaattcctttttccattttcggaatgttctttcgctaatgcccaattctttcccaaattgtttctgttttccatttactgctgacattcttttaaactcatcaattctttgaataaattcctttcttttcatttcataataattttggtcattttttatttttattcctaattcttttttccatttataaattttatttcgactaattcccaattttttcgcaatttttagctcaattctattccaaattttttgagaatatttcccccttttcttaattcctttttttattgcatgaaatttatgaacaatttcgcgtttttgttgatcatccaattggttgttgttcaaaacattgtttgaatcagcgaaatttaattcattgatcatttttattgttatttgaattttatccattttttcattttcccatccttggccaaatatttcatcaaaagttggccaaacttttgcattaaatccaaaagatttaactaacaaagtttcgtcgattggacttattatgaatgataatgacaatataaaaaataaattataaaattgcatttcttattttgtaaaatttttgtatatattatgaaaatggctgtcaaaaaagcttaggttttatcattggaaatgaataataatttggtaaaaatcattaaaccaatatatattttttttattatattcttacttttgaattaaaattgttttataaaatttattgtttaacgtattatttttggtcagatttttaatgacttcgccccaatgtccgatcacgcacaaaaggcataaaatgtaaaaaagggcacaaa

SEQ ID NO: 27380 - DNA, 940 bp, Heterodera glycines
cgagaattaaaaaatggagaaaattcccctgaaatatgtaggttgaagaaaaaatcatacattttccgaaaacacatacaattttccaaaggaaatcttgattcaaaatgaggcagatataattatacacatatattgtcttgaacattgcataaaaacagagtcgaaacttggacaaaagagaagcgaaatcaacatgaaataattgggctgaaattcaaaaaatttacaattattttttgaaccaagagtcacaatcagtctcaaacaacgaaaaaaataggtaatacggtagtttctcaaaagaatttaaatgtttcactttcataaaaattttcttgtgatcaatgatcacaaatccggcatctatttagagactaattccgaaccctggcccggattcgaaagttctaatttttcaaatttcgtatctatttttcgtctataaacaaacaaacgcacggaaacaaactacagaattaccccccaaaaaaaaattatagcgaatactatataattattttcattatttcccatcatcatcatcatcatgttcctcctccttttcatgttcatcctcagcaacatcgtgtttgttggcattcttttgcgcttggctttgtgtcgcttttgattgaccatcaccagcagcagcagcagcaccaccattattggcatttttgttaccgccgccgccaccgctgctcatcaacatctgcaggagacgtgccgccgcattggtcaccgtctgtgccgggcttggcgagcgcgacgtctgcgtgtgctggtcccgatgggtacgcgtgccgtacggttggaacagacggcgccggtgctccgcatgggccacccgtcgcagcagggtgcacaaccgttccacatagtcctggtgcttgtacatgtactcctttgaaaatgcggggagtgataagaaccaatg

SEQ ID NO: 27381 - DNA, 1346 bp, Heterodera glycines
ccctcccccccccccttactcattttaccattttgccgtttccggggcttttctccatttttggctttttgtttgggtcacattcttttgttcccgccggttttcagtgatttttactcttttttattaaaaaatcgaaattatccaaaaaaacaatttatatttaaatttgcttatttatcaatttttctcccactgaattttcaggctgcagggtggccggacacgtcttataaaaatgaattttacaattacaaataatgaataattaaaaatggaattgcagccatttgctcgcttttggtcctttttcaaaggcccgaaaaacggaaaattattcaaatttaaattattaaatgggaaattaggaaaattgatagagaagaaattcaaatgcaaattctcccaacccattaatgaagaagcagtttaaaacctcaaaataaatatgtgtcatttgcataaattacctttttgtggaaacagttggccatgggaatgaaaaaggcaacgaatattttggacatggaaatttctgattaattaaatgaggaaatgaagagaattcttcttgtaaaaatgtttaaatcaaaataacaaaaaatatataaaaaattaaacaatctaaaaatagttgaacattggaaaattctttcatttttaaatgccctaattaagtaatttgttcttttttgatgagagtattttttaaaatctttttcggggtaataacaaaagacgagcggcgaaaaaagaattatgaaacaaaaaaaaatcgtaatttgtacttatggcacacatgaacgatggactgaattgggttgggtcacgtcgagagtctcgacacttgaaaaacaattgaggaaggaaaagacagacttggaaaatgacaaagagagggaaaatttaatatttttgcaaattaaaaaatgaaaatactcaaagaatttaaacgatcgaaagaatgtaaaataatgaatcgtcaaaaagggagcatcgctttagaaaaacaaagcgaagaaacgcagaaaaaacaaaaccatgcgaacgaattattgagagattgctattgcgaagttcgttagcttaaaaagggctgaccttttacttccaggagcctataaaattgcgataagcactttagaaaatgagcaataaaatagagcataaattttttatttcagaatgcccctataaggtttgaaattcactccttataaatcagaaattcgcattctctgttaaaatttaagttctttttaaggggtgttactataattctagaaaaaggagcagtcacatgtctgatactgctgaagagttacgccctggccgaaaaacaaaga

SEQ ID NO: 27382 - DNA, 1411 bp, Heterodera glycines
  unsure (1)..(1411): unsure at all n locations
agtattgtacaattaattttttgagattgtggtcattagtatggcgggcgcttatcgaaagggcaaaagtctgctgctgaacttctttttggactatttgtacaaaatgcaatacacacagaaaaatgtatgaacaaattaacagagtaattaactgggagtaatgcctaattaagaaattgaactctaattagaaaatgttaaaataattttttagcaagaattggagttggaagaatggataacggacgacgacatcgtcgaggtgacggacggactgacttaaaaaaagcggcgaataccattattaaaatttaaagggttttctgtataagtcgggccaaaagcgttgcacggcgggcatttggatttgggcagagcccattttgatagacacaccaaacggagaacgatacgccgttttgttggtcctcaattagcacccccaatttgtttggggtttaatccaaatttggcacacagatggacacccaagggtgttttgagcagccgagcggaggcaacgcgtgcggaggcaatgggaacggcactcagcacggctcggcattctcaggcaattgtccgacccatttttgatttttaaatttaaattttggcattttctgttgtataattcgccttttcatcatttaggctgctcccccacggcacccgctctgttggcactgtccacgatgctaagctctgtccaatgctacacaatggcggaaggcattccggatgaagcgttggcagtcctttcaagctttgttgactacggcaaattggctagcgcagaggcgaaggaatttggcaaaccgtatcaggcgagattgngggatgatactgtagaggagataaacccccctttactcgctttaatcccgtgactaatttggcatttaaaaaatacttttttgaaatctcantttagcgcttggccttcctcatccgcgattttaagctcaccgatgagatgatttacggcgtggaagggggaaatcgattattggtaaggacaattcagaagtgaaacattggcttcattaagcagggtgccaatctctcttaatgagaaaagagataaataaagtgcagccgccccaaaaataagataaattaatacgtaaaataatataaaaaacggaaaaaataaataaaattctgaattcaggagaaagttttgtcccctccggcggacggtgccactgaccgtaaaatttcggcaaatgggcgaaaaagtgtggcaaacagcgcgccgttggcggaagtgcgacggcacatcagacaatgttttaaggacggcatcagttgctatttgttgccacacccgggcccaaaagtggcggagcccaattcgggattcaggggacaagtgaaaggtgggggaaagacggaggggggggggggg

SEQ ID NO: 27383 - DNA, 689 bp, Heterodera glycines
tttccccggcggcgcctatcggcaccgccgcgcccccaaaactcctattttttcttataaaatggcccaaaatcgcaaaatttggtaatttgatgaaaaactgttctcagcggcgcgccaaaactcttatttctcattagaaaaatgataaaaatcacaaaatttgatcattttttggtgaaaatctgtcaacaaattttaatcaaattttcaaaaattttcccggcggcgcctaccggcgccgcctgccccctcttcccaaaaagtttttttggaaaaagcgcgcctcaaaaaagcgttttattgatttttaaatttggaataaaatttaaaaaaatgatttttgctttatgattttaactattaaaaagttgtagaaaaaatttcgcttttcgcatttcgcattttcgcatattttggcttttcgcatttcgctttttttttcatttcgcatttttcagtttcgcaaatttcgcttttcgcatttcgctttttatttttcaatttggcccatccctgctacatatattagatccgatacattcggtatgccttgatttgtgaagcgaaatgaatttgcaaatgcaaagaattttgaatttttgccgaaatgtttattattgtcataatgtttttgcttatttgaatagaattttctatgtttatggtttttcttttacgagtccgag

SEQ ID NO: 27384 - DNA, 1003 bp, Heterodera glycines
  unsure (1)..(1003): unsure at all n locations
atttttgagaaaaaaaatagtttttagattttgacccatgatcaaaaaaaaggaaatgggaaagcaaaatgcgctaaaaagaattttctcaaagcttttgcattggatgcaaaaaatggacggattcattgaaagtaaaataaaagaaatttaaaaagcattaaaagtagttatggaccggtccataactattactaaaattgaacgcgtgaaaatcctttcttaaactttgaaaaatctttaaaaattaataaaattatcttagaattgaaatagaaaacaaacgaaccaaaaaaagtaaaagaaaaatgccaaaattggcgttaaagtgccataaaagagagaacaaacactttggtcatttgtctttttgcgctttttttattaattatcgcgggaaattaagaacaaattaaactttgtaaatcaatgccaataaattcgcaacaattcagtcatcttcgccaccaatttgtgcagcaattcatgccgatagagagaattattgccttgtaatgtccattcgccgttttacgttcgtccataaatcaatcagtccgaacggactgctcggattgatgacacacggacaaatgcatgtgcgaaagggggggggggagggaactcaaagtgatggagtgagtgagttgcaatcgaccggaggaggggggaagggttattaatcgcgcctgagagttgatgaaaattgatggaaagttatgtgaggatgaagcaataagggaaaagcggcaaagaaaaacaaacggagagaacgccggcagaggaaacgatgggggaaacgattggggcattatgaatgaatggatggatgtgtgggagggggaggagagcagtgtgatggatggcagagaacgggaaaacggaataatgactgaatttggcaatcctncaaattattggatttggtgatgattaccnttacttttggacacaaacaaaagggaggaaaaaggggggagagaaaggagaaaaaagctttgat

SEQ ID NO: 27385 - DNA, 853 bp, Heterodera glycines
atttttgaccgaatggtcaatttgtacaccgatcaaaaggcaccgattttttaaaatgctttttaaacgatcagtgaattaacgattagaagggaaaaggcaaagttcaaaacggacaaagtgaaaaagtgaacaataaaaagcgttgaccgcaaatataattctgaatgtaatagaagcgattgtttccctaaaagggagggagtgaagtggttctcgcccttctgatgacttttttattttttatgaattattattttgctgggggggggggaatcagctggggcaacccagcagagaaatgaactaatctctgaagagaaataaatggtcgaaggaataaagcggaaatggacaaaacgaaggcgaagcggaacagtgaaaagtttgaattcttgggaattttgaccgatttttaaaatttgtagcacaacacaaaaccgagaacttggccacagttggccaagttagacgaacccgaattgttttcgttcggctgaaagttggattcgctaggtcatgcaaatccctccgcgcccgccccatccatcagcggaattctttcccaaacattcacctccaaagctcctcccgcagtccaaacaaacactcttttggcccctcacaatcggcagaccccccccccccctttcggggtcatggattcgctgaagtggccatgaaaaagcaaactcaacaggttttggatgcttttgatttgtgtgctgctccgaatatggatagggtcgacggggggagtgaatgaaaggaaatggaagtgaaggggaaaggaaaagcattcggagcggatttggccatgagagagaggcggggggggggggggggggggggg

SEQ ID NO: 27386 - DNA, 995 bp, Heterodera glycines
  unsure (1)..(995): unsure at all n locations
gtctcaactgtaaccaaaacaattaacaagtgtcacacaaatttgtaagaggtttattattatttgagggaaataaaatgctttatttattaaataagaaaaaatagactgatcactaaaataatccttatttaatggcctaaatggtctgaaaccggaaaatttcaaaaaaaaaaatcctcagggctggaaaaaatttgtttttgggaaacattaaaagcccattagaaagagaacaaatttctcttcttaattgccttttggctgatgggtctacgacaaatacccgctgagttagtgagggtgtcaaaattgagtacagtaaaacgaccaatttttgatcatttcctcttgaaatacggtagaaattagtgatatttacaatcaacaaaattcaaccatctcttgctctgtgtatataagttgtagacctatcattcaaaaggcaatcggtagagaattttgtcctctttctgacaggcctactcaaattttccaaaaaaaatgttcccagccccctagaaattttttttaaatttttccgatattcaatgtacttcggggtttcccgttcgccatcaaagagtggtctgatcaagtaggtgtaaacgacatttttgatcagcatcaaaaatttagcattcagatttttttcacaaaaataatttgaattaaaaatcggaaaaacattttttttttggtcacgtgacctttaagcatttcattcatttccggccaataaattaaatatatttgttattaaaaatcggaaaatgcatttttttaggcttgcgtgacctctaaaatctttcaattcatttccgaccattaaattaaatgtgtatatgtataactgtttatttgcagtttattttttttcattttcaaatcgatttgttttataaatttgcattataaaatcacttttcctacttncataaattcattccaaaatgtttatatttttaaaaatatttttatttgcttccgttaat

SEQ ID NO: 27387 - DNA, 951 bp, Heterodera glycines
  unsure (1)..(951): unsure at all n locations
aatttggagcggcttgtttcttggccaatcttctttccttttatcgttgacaaaattgaaaatttctgtcaataagccacctctgccgaacaatgctttgcttgtttccattctttacctacacattaaaaaaaaaattaaattgctaaaaatgtttttaatattctaacaaataccaattgcctcatgaaatgatggcgctatttcattgagttttgctgtttctgttcgtcgctgttcttctaaatgatcaaattacaccataattagcattatacatttttttaaatttatttattatttcatatttaataatgttttgattttgctgaaaatagacattggcacatctttttaattgccgatttttgtgggttttccaaaatggaaaaatttacaaaattatgtttgggtttatataatgataaattaaaaaaaaacacgggtggcacaacccggaaacccaaacaatgaaattaaaaattttactcgcaattgtcatcggtcgagcatcgatgcttgatataattggtgggtcattagcaaaagaaggacgtcgaatggttggacttcgcacaaaggcagtgttgtcaaaatggttctatgtattaaaacaaaattttacaacttttgttttttttatcattttattatttaaaagtgacagtgatttttgggcgctggccttttggcgctgaattctttaagaaaattaatttttcatagtcagtcaaatacaactttttggttatcgacatggaattccgatttgcaaaaaaatggaagtctggattccgatttccgaaatttttgcaaaaattcggaaatttattttttttaattttttgccaattcaaaatggtttattattgtgaaataattattttgtatgtggctttctacttcgaccatccctgctcntataccgtatatgctctaattatagcccat

SEQ ID NO: 27388 - DNA, 1520 bp, Heterodera glycines
  unsure (1)..(1520): unsure at all n locations
agcatcatgcctctcatcagtgaacaacttcgtcatccgttgccgaatttgtaaactcgaagcgttggagacagaggtgagtgaaaacactcaatttgtcacataaacaatcagttttttgtggtttcagactgaatcggctaactgtccggaagaagacggcgctggctccggttgcaactcccgcagtgtcacctgccaaatgacaaccaaagaaatcgcggaatcggatgacggtcgagtgttcaaagtcgacttgggaaatctcacacaagtgacgtcactgtgcacgaagtggaaggcgcatttcgtgagtttggcatttttacaggcgaatcatctatttctgctttgttgtttcagaccaatgttcgtcaagtgatggaatcaggcggaggcggagaaccgtgtgtgtctactcgtacttcggcggcgggcggtggtggttttccagtttggctgatcgttttgatcgtcgttatcgtgatttggtgagtgctgcctttcattgcttctttcaacctttctcatttttgtgtgttttcagtgttttgggtgctggtgcgggcatcgctgtgtttatggtccgtcgacgaagtgctgaagcagaaggaggagatgcacctgcggatccaatcgggactttcacatcgaaggcggacaaaactgatgaaatggacaacatcccagcgagcaaggatgacgacaccgctcctgccgccagcatgggggtaaaaagaagcggagaagtgatgataaaaatttatcactgcctttttagggaatgcaaatgagctacgccgccatgggagcgtcgacagcgcccgggaaatcgatggtatagagcgaaacggatgcattatgaagtgatgacacaacatatctacgatgacaaatattcgatatatttatatgcgtgctgataccattgtgatgtgtaaattgtcgatatattgtatttgaataaaagttcgaaaaacggatatatggaccaaaccaaattcgaatgatcctgtcactgacgaatcattgtctgcaatttattgacccaaaagaattttttacaccctcagtttaggtgccccgactcaaaaacccctgtaattatggactaaaattttgaaaaagaaaggtttccctctgggttttctgggcccaatctttaaacctgtgaaatggatttcagaattggttgaaatgatgtcaaaatcgtgatcagtgcttctaaaacctctgtgaacgaattttcactctatgacacaactttttttgtaaactaaagttttaatatattttctatttttcggggcatcaaacagcaagtgccaaaaactcactcatgattcaaaaacttatggcataaaagtgggaaaaagtgaagtttagagtccggtaaaaaaaaatttccgggagcgggatcgggagttcaaaattntccgggacgggagtcccgaacgggattcccgtnaaaaatccgctcccngttaaatccgtccatttttaacgggagtcccgggcgg

SEQ ID NO: 27389 - DNA, 1443 bp, Heterodera glycines
acgggaaacaaaatatgtgaacacggaaatggttgaccggctcgaaaaagtcgcgaaatggacgattccccccgactcgtaattctcgaaaccgcccaccctttcccccccccccctcgcattggttgactgacttctctgttcgagttgagcagctgatgcgtcttcgattgggcctccagcctcgcggtcgtttccgtgttcagctgatccctgagcagttggacctgccgcgaaaatgcggtggaattttagcagtaattggcccattaattgtccgattggtgtgttaattgacccaattgatcagtcagtcagtcacactgtctgcccaatctttctttctttactcacttggcatgccgccacttgtgccgattgttgcgcctgctccaactgagaacggatcatcgcccgctgcgcattctgtcaagaagcataaccaggtcaaatgaattggtttggacaagcgttcgaattacatcgcaacttgacggggattggagctgatccgtggaagattggggactggccaaagaggcggcgaagggcggcaattggagggtggcgtaaggactgatcagcaggggcgaggacagagacatggcggtgggagagggaacgaactgcacaaagggggaaagcgagaggggtaattaagggggatttaagagggattaagggttatcaaagggcccatgggacggacggacggacactgaccgaatagaggggatttccgttggcatccaccgactgcacaaattgggcaggcaaaggcggaggggccacggaaggcgtggcgacggaatgcggctgatgggcggaaaaattccaaagtgttgttgcggtggcagaggaagaaaacggaattgctaagggaggctggctaaaattggcaaagaattaaaaaaacacacgaatttggtattctccgcccgacgaaaagcgagagtctcgactcgaaaagcccaatttttacatcagtcaaaatgccataagtcttacaaatgctttggcccctcccgtgtcgagagtctcgacttttgccgttcagtttgtccttctcactttggcatcatcgtcagttgagaggcgatgggctgttgttgctgcatatggtaagccgccgctgctgctggtggattagcggaagtgcctgcgcttgccgggaaggcggtgggccgttgctgcgactgatcgatgcccacgggggcggcgacggagggaatgttcgcggaagacacaacgagggatgctttgtgatggaaaggagcggcggaggaggaggacggacccggctttggctgatgatggtcatgggtatctgaagaggggaggggtggcactcaaaccatggcatttccaattcaaatttttaattttcatcaacgacatctacaaagcgacaacccggttttcctttcaaaaattctgaaaata

SEQ ID NO: 27390 - DNA, 2049 bp, Heterodera glycines
  unsure (1)..(2049): unsure at all n locations
ttcaaaatntagccgttttgatntaatctgttcttcaatcattggtcattcccatcaatcattctcaactttacatntactcgtttaaacaaaattgcccaaatcgaagtaaaattcatttaaatccccttaaaattccattggggatgaactgaggtgggggggggctgattaaaaaagaaggaaatcacgcgatttaccggggagttgtgaagaaattggaggggatggggcaaatgcatgacgaatgaatggacaaattcgtcggacaaaaattatgatttatttttattttagctcaaagttatttatttgaaaaatcgtttaataaatcaattaaatttttcaaaatcaaggcaaaaaatataataatttgctatattttttgatcgaagaaattgcaaaaatatttggttttttgcaaaatgttcttatttttgaaatttttcgaccagacgccttcgcttaaagcaaccaaatttcattacaattgacagttaaaaaatttaaatttttaaaaatttataatatttagtgtttttgacttaaatggaaaggaaatcgcaactcaccgttttgccaatattttcagtgtgatgtgtgtggaaatttcacggaacaaattgctgaccaattcctccgggttgtcagtgattgtctcgaagttgatcggcttccaattgttgatttggatcagacctgaaaaaatcaaatctcttttcaaattgcaatttgattttttttcagtttaattctaacgataatattgtttcaaaatttctatatcttaaaaactacaaatttactgttgtcagtgaacttttttttaattactccctacaaagaattattttaccttttttatttatagttttggcccaattcactccaatgtctttaaaatattcgaattcctttttttttcatttttccccgcgcaaatttctcttttctgtccattttcggcggaggtgcgcgggtgatccaacgagaaattctacaccacaatctgccccagtagatctgtctcaatccaagccggacgaccctttctttgctaataaatatgcaaattcggagggggggaggggaaaggagtcattgcacacgctgagaaaggatggaccactagaggttccaaagccaagtaacaatatgaatgatggattagataaattaatttatttgagtgcccgtgaaaatttctgttttaaattttcacacggatagagaaaatagatagattatggattatatttgcattaaatatgtaaagtctcttccatttgattcgacttccatatctctttgtgccgagtattggcgacccacttctgcgccctctgcgataatagttgtttaattatagctagtgtcataacaaactcacagacatccatatgctgaattatgatgtgtgcccttcgaattgcccgtccaaaaaaagcctttcttaattttacccttttcttcatttgtcatgccatttttggccacaagacaaaccatcgttagcatatttcaatgtttcacatatcaaaacatcccattttcggctcaaatacaccaaaaatgtgactgacaaatgacttaaactaatgacgcaatttgctgattgactctaatgacctccccccccccttcatgtttcttctcttcctccgctgtgatccgctgttccctcacaaattttttcttctcgacggtttgcctagtcgttgacaatccccgcaaaataacacgggggatcggggaggagggctcttccccataaacctgttgctccccccccccctaatttgggcggggggggggggggagacgaacaccgccgccgggcgaaagcgaacacgacgaaaaagaggggaaagggaggggggggggggaagaagataaaatataaattcttcttaaaataaaaataaataaaaaaaacaaagcaaaaaatgatttaaaaaaaaattcaaaaaaaagattaataaaaaaaataattaaaagagaaaaataaacgatgatcccctgctctgctttctctgccggtgctctgtc

SEQ ID NO: 27391 - DNA, 1372 bp, Heterodera glycines
  unsure (1)..(1372): unsure at all n locations
cattagggaattataaaaaaaaattngaaatntaatttttntaagtaatgnccaagtgtttgctgctgttttttgcctatttgcctccagcttggtctattggacatggcaattattttggacatcatgaggggttgggcgtgggcttggcacataattatgtcagcaaatatggcattccgatgaatttgaggtgcttctccattaaaaatttaatatttttttgtgtcttattctcggcatttttttaaatttaagtgaaagacattgctaaaaaattacaacaattacattttaaaagttcgaaaaaatttttatacattagaaatatttataggcacattaaaatgaaatatttttgaaaaacggcggtgggcaagcaaacattcaaacaatatattttcacctattcaagtgacgaacaattggatgaactcaaatggcgccccaaacggcacaccaaattggatggcacccaaatgatcaattcttcagggcagcaaaattgctcagatgagaattttattttgtccacattgttgagggattacgacaaatttcgcatccctggcggcggaaatgtgcgcgtggaggtggaggtaattaagagttaattaaaatttttaaaataaacaagtgtttattttggaaagcttagattgaatgaaattttgaaattttattttaaacatattctgttttacagtgcagattattatttggggttgaccgagaatcgggattttttaaaaataatatatcatttaaatatttttaaataaagaattatttaataattttttaattgcgtcaaattttcgccagatttgggtccaggaagtgtccaaaatcattgagatcaccagcgaatttgaactggacatttatgtcactgaaatgtggacagatccttttcttgcatttgcccatttgaatccgtgcaaaaagttttaaatttttatccgattttcaatttaaattcatttttagaaatatttctgtagacggtccgcgagtgttgccacaaatttggaacccattaggatgttttgtgaacagtaaggtggctttcataataaaaaaacaataaatataagtaatttttggatttattaaccttaaggatgcttttgttcacaaaagtccgttcggcaacatttttttgcaattgtaaatttttatttttttgggggtggggtctatgagacgttactgtaaagaggagggggggggggggggtcgtctgtatttaatttatcatataaaacaataaaattgaatttccatttcaagaattaatgaatttcgaaaatggtaatgattcatgaacagggttctttttaggtttttgcctatttttatggctaattta

SEQ ID NO: 27392 - DNA, 53 bp, Heterodera glycines
ccctgggtactgatggattacaccaccggacagatcctcaccgcgggtaatga

SEQ ID NO: 27393 - DNA, 753 bp, Heterodera glycines
gatcattgttgatgatcaaaaatacgagctttttaactctgaagtccgttgcaattcattcccttttttaatttttttttttttttaaatttttaattttgtttttttccattaaagttttctccggtggacaaaatgcaactgttggaaatcattgtttccgaaaagacgtccaaggaggcactcgccgtggccgccaaactcggcctggaccagaagaagctgattgtcgtggtcaaggtgagcgttgcgttcttttaactagaaattttatggtaaatacagtgagtacaggggatagcacggattccgacttccgacattttggggtcgtaatccgattccgaaaattttttgggcctcgggttatttaatcatttacaatttagcctattaaaaattttagaaaaaaattatcttaaatttgcgaattttccgttatccgaaaatatttgagatctcaaagttccgtttacggcttccgcaaaattttgttctcggaatgccacccctggtacgtattttctacatggtcggtgaccacgaatacggcattcaaccggacaattccattccctgaacacaaatttgaacgggaatgaatattctcttttttcactaatggtttaaaattggaaaaaagaagggggggcgaagggtatcaacggaaaattcatttttttacaactttgaaatttaatttattttccattttcccaggatggccctggctttttcgttgtccgctgcctt

SEQ ID NO: 27394 - DNA, 1442 bp, Heterodera glycines
  unsure (1)..(1442): unsure at all n locations
tttgagccaacagtcggcggagatgaaactgaaaaaaaggaaaacaaaatttaaaaattgaaattggcattttaattttacattgcttgtgccatctcttcctccgcttcatttccattgtctgacattttattgaagcaaattaaataagtaagacagatttagacggatttaaattatctagcaaaactgacaaattatgtgaaatctgcaattcgtctataaaaattccaatttaaaaaactttgtttacatgaaacaaagaaaaagaagaatattttcgatcgtaaattgcgccattctttcgtaaattttgatcattgctacaaaaaaaaaacattttgccaattttattagaatttgagccggctcaaatctctctcaaatggcattgtttcaactgatatatttcaggataaattaaaaaaaaataataatggagattttaagttattttgcccggcgacgttttgtccaaatatttgtctaacgatcccctaagaaatttcggggaattttttgaaagcacaaagcataaagaagctaaaaaatatacaaaatctcagaaaagtcaaactattttaattttcatttgtcgacaaatgatttcattttaaaatttgataaaaaggtaggaggtgtacgggttcactgcgtttgggcgctagctcgtttttacaccatagctttttttcggcatccaaatccaacaatcttggtatcattcgacgaaagctcttaacatgcctctattagctgtacaaaaaacgagcctggaaaaaatttatgaagaaaaaacttcaaaaatttcgacttttttgcaatttcatgttataattttttggtaaatgtctaatcgcgaaacaatagcttagaaaaagcttctaaacatgttaatctttcgaaatgatatcaaaaatgatggatttggatgacattgaaaaaagttatagaaagttgtagtggaaaaacattctggcgcccaaacgagtgggtcccgaggtgtacatcaatcatattatattaaatacttagttacaaaaactttatttattttttttgggaaatttttattttttttcggtagtgcttttaaaaataagcaaagtgatcattccaacaaaaaaagaaaacattttatgagcacggcaaaaatcatttttaaattccttaattcaaaccgatcgtccatttcttaacttccattcacttaagccgagcaatccgttgagaagcctaaaaataaacagaaaaataaatttgaatttttgaataagcattcaatcattcattcactgacccgtccccgattttgtcagaaccagttatgttaatgcgcatttgattgcactgatcacgaatatgccagccaagcgcctccttttcncatttcgcccatttgtccgcgtcacgcacaattggacaacggatcagcagaaaac

SEQ ID NO: 27395 - DNA, 1539 bp, Heterodera glycines
  unsure (1)..(1539): unsure at all n locations
gggtggtcaaaaaaggggttcaagaattcccccccttattcttctcacaatcgttatatggtataatggcaagaataatttctacaagaaaatttaaaaatgaaaaaaagcaaatctaaaaaaaattaaatgataaaacatttcattttttaatttttaagaaaaattattaatgtcaataatctcccaaacggaatgaccctctgtgaattatcaaaacatgtaaagtttttacaattattcatttaaaatatttacgctaaccaaaaatctaaaacatttaatatggtaagaatatttaaaaataatcataaagagtcgcatgtgtgttttgaagctttgatcgataagaagcatgagcaataattggatatgatgaataaatgaaattttatgaaagacaaataaaaaacaaactaaaagataatgtcaataaaatacataattaatttaatttggcataaaaatgtcaaattaaaatttaaaaatttgtatatggtttttaataagaaattttagaaaaacttttgtaatgacaatgctaattttaatgaacgccgaaaaatagtttgaagcgctcaaactaattccaactggtcattatatcctaaaaaggatgctctttgaatgattagaaatattatttaatcataactgatctatcattagaaatgcttttaaaagtctcaacaaccgaagagaaaaataaaataatgtgaattattaaaaataatttatcaaattaaaattggaaatttcttgagtgaagagaaaagatgaagacgagagcatttagcatgtttactgagtacaaaagttatagcatccatcaattatcaaggcatttcttttaacaaaggtgaaaaaataaaataatattaatcaacgaaaattaatgcaaaaatatttattcaattaagtatacagatggaaaagactgcagttgttactcgagattaaaagaattaaatgatgaaaaaataaattaaaatcattaatatgtaaaatgaaaaaacacccaaaaataaaatttgcttcagaatatttttaaaagttattaataaatactcgtgttgtatgttttgttaaataagaaattcaactgaaatagtgacggatagttacataattttcagcaaaaaattcagcaaaaataatttttcattgtttgcgagatacatttagtttctgatattttttaccaaatattgatatttttaaatcaaaaattttttttggaaaaaaattttaagaatgaatttttgagaaaatctttctattcttatggtgtatattagagtagagcgggaccgggaccaaaacacggacaactgagttcaactgagtaccgaggtcccggttttgaccgggaccgggaccagtcccgggttttttcccggttttcccagccaaaattcccggtttttcaacccgaaaaagtcccagtcccggttaagcccaaaattcccggtcccgctctactctagtgtatatgtacagagaatgtggtgagccgaagtgaccaanaagtatgggtgt

SEQ ID NO: 27396 - DNA, 1651 bp, Heterodera glycines
ttgtcattttatttcgattgttttgtaaattttactgtttttaaatgtaaataaaaaatattttgaaaatattaagaattcgtttttgcgtcccttttctcttctctgtgtttgcttttttgtgccatcatttctgcaattttgttctcaatctccgccattgtcctatttttagtttcgggcagtgcgccgtacaaataaattccaatcgctgccaatggcggcagaaaaaacagtgcgtaagcctttggagcaaatggatttaattcatgactgttcaaagaaatgttcaatgcttaccggcccatcaccgcttttgttacgcactgggagataagcagacaaaacaatagaccgactaaaaagggaatccattaatagtgagactttgcatttaaaaaaaatttatttatagtatcccattaaggggggagggggggtttcaagttggtttattaaatgttttggcgagggccaaagtttcccgagttaaacagttcgtgcttttttgttcataagtcaaattttttttcgctttttgtgtctgtgtctcggctcctcccggagtcaattaacattctcgagttccggaaatgaagactctcgaacagagctctacaaagaatcccgggcaatccttgcgattttatatatccaattaaaaactgttcaaccggggttgctttcttcacctgattgcctcgaccattttggaccatccctgcaccgaagaacgggcattttgagcgacgatttcgttggccacaaaaaaactcagcgggaaaacgccacagcacatagcggaggaatggagcacaacaaccaaaaccaaagcaatgttcacgaaaagtgactgaattggatacaaaaaaaaaaaaaatgaaaaatgctataaatacgccgtttcgattttgcccgattttaatatgtacattcatttcaatggtttgttaggtcgtttcgttaaatccgccattttaacgttttttcgacaaaacatagcataactttgcttaaagcaatcacattttacattcttggtattagagaccggacaagagggtcggtttcggttaaaaaccgaccggtccgatctctacttggtatcattcgatagccaagtttttttttctatgtattaatgcatgcaaaattaaaaaaatttggtcaattttaaactttttatatcggaacgtcgcaaatcgaaagggggtgccgccacccataaaaatgtttccatttatttaaattgaacaattaatttttcgaatcaaatgacctggccgtgtaggtacaaaattagcgaaatgaccaaatttgcaaataataataaggaaattgagatgaacagcaaggggcgtctgccaatccgatcgaccaaaagcgaagcaaaaattatggaaaacttaaaaaatgtaaatttaataattaaattaaatataaaatgcttaccaagccaaagatttgaatgccaatgtaaacaaaggaagagggcaaagcggagaagttcattgtctgctgtaacacttccacaatgtaagcatcgatcactaattgaaggcaataaaagaaattaaaaaattgaccaataaatgccctccgatgatcctaaagatgccatgcaaatgcttaggaaaatgccaatccaaag

SEQ ID NO: 27397 - DNA, 1832 bp, Heterodera glycines
tttaattgcccaaattaacgaatcggaataattaagtccaactaaattgccaatcgaatgctttttcactttatttctgacgcttggtaagaggggaccaatcaaaggcaggggaagcacatttttccaattgttgtgtggtttatgcgaagtgaaggaaaaaaagtgatcgacaagggggagtccatccggcggatatgtgaaacgggaaaaatgagaaaattttatcgccgtgggaaatctcgaggatcggccgattcaatgattgtggtgcatgggaaaatgtgtagggagagtgaccaagtattgtggcaatggggtgggagcaagggggacacggacacagaccaaattagggaaattgttcgcagttcgcgacaaaaaaatataatcattcaatcgcctcctctcacctctttccagccttgaaaacttttgtcgatcagcacttgttttgaatgagcaagtgcttggcgtgcaattgccataagttcgtcacgcgtctcggcaaaaccggaaccaagtccaccgagggcgtacgcggcacggaccaacacgggatagccaatctgttggaaaaaatgaggacatataaaaaaatgggatgggattaaaaaaaacaatgacaggaaattagatttttttcaaagatttttttcctattataaaaactaaaattttcttaacattttttatacgatttttaaacccccatcaatttcgttattttttaagaattttcaaaaaaatttttatatttaaaagaatttttcttcggtttttaatttctttgcttacaaacaaatagaaaatttttttagaaaatttatttatttttttctttcgaaaatatttctcgagggagggggatgaatttgtttttggttcctcgcctgttcagctgccttttcagcctcctcaattgtgttcgctgcacgacaatcggctactttttcgccaattttcagcacaaattccttaaaaaaacaaaatttttaaaaatggttttatattttttaattttaatttttcaaaagtcttttggacatgccttgaacaattctctgtcctccgtgcgcataatcgtctcaatcgacgtgccgagaacagtgacacctcaagaaaaaaaattaataaaataaaaaaaaagattttggcacccaaaatttttttttttggaacatttaatatgaaatatggtaatgaattgccaatatggggattactatgacgaaatatttgaatactgtaaagccaattaattgtaaaagtaccgtattccgacagtacgccactgttgtgcaaatcgacggcacagttcagcgccgtttggcctccaaaagtgcacaaaattccggtgggacgttcctttttgatcacctacaattcaatcaaatttcaaaggatgggcccatttgtcctgtccgatacttcggtcacatattccttgatgatgggcaagaaatagacacggtccgcaaaacctttcgttgtttgcacagtggcaacatttgggttgaccaaaacggtgcgcaggcccatctccttcagcgctttgatggcctaaaaacagaggggaatttttaaattgccggatccagaccacaaaatcaaggagttcaatagaaaggaaccaaaagccttcggtacaaatttttaaaatttcaaaaaaaaattattcgacccaactgatttggaagcgtaaaaaatcgtaaacttttagcaagtgacagagttccatgatttcggattttaggggtggttaggtaatacatcacttaaaaacaataaagggtctacggcttatttaaagtaggtttccccaacttggg

SEQ ID NO: 27398 - DNA, 1044 bp, Heterodera glycines
aaaatttttctaagatttttttcttgaaaaaattctaattttgaaaaatttttaaaaaatttctagcggcgtgattttgtctgtttccatatatttttgaaattaaggaaataaaatttataaaaaggaaacgacaatatttaaatattaaaacggacaacaaatcaatgcttgaacgagaatattggaatttaaatagttgttttttaggactatgccgttgttgaatttaattaaccaatttaatcatcgtaggaattctcagaacatcaaaaaaacagacagccaaaattgattaattgactgacctgtcattgtgctgctctgtccggccgccattatgccaacgccccacacgtatagcgcgaacatgccgaactgacagccgaggaaaatgccgcccttgtaaatgtccgcctccaccaggtccgtgttgttcgggaacagttgcctgtcgggcaccagcggctgattctcgcaagttttgaactgtttgggaaatttcaatccatttgaggaagagagtaagtaaaaagtggcttaatttcatccaaaatatgaaatctggcattttattgttcgattcccatttttatggcttctctttcttccataagttatttgataatttttaaatttaaagccatttaaaataattacttaaaacggaccaaaaatcaaaaaattaacaatttttaaagaaattccattaaatttggcgttagcaagaatgagatttaaaaagtaactttcagaagaagtaattttttctttaaaaaataaaaataattttctaaagaattaaaaataaacaaaaaaataaaattccctgtggttagattttgagaaatataaaatttgtggtacaattaatttttatttaatttattgatacaataattgcgcacaatgtcagcgttcgttttgccgaacagtccgtgcgcaaacaccgcaaccacaaacaaattgatgaagaagctgcagcataacgcaattgcgcactcaacaaagtagtaaaagttggcctcgaccactgcaaaaagc

SEQ ID NO: 27399 - DNA, 965 bp, Heterodera glycines
  unsure (1)..(965): unsure at all n locations
aaaaatcgcatcccaaagaatttatcgaattgtcgattcggatttatttcacttttcattaccgtattctttcctcttttttcgtattgtatttattctacgatgggttttgcctttgttcttttgctttcactttctctatcattcgttttctgacttttttaaatttttgatgataaattctttgcaatggaactgaatttcgttttggctacatttaaatattacaagcgaataacccgtcacaattcaaaaaaaacaatttaatttcccatcgaattttcgccatttagaaacaaaaaaaacgctttgaaattttttagaaattcaaaaaattaatggcagaagaaattatgaaattttttatagcttttcgcatttcatagagattttattagcaattaaacagctcaaacgcaactggacccacgaaattgtttttattggctcccggatatgtgtcaatgaaaaatgcgtcagtctacagtagttataaaataaagtactgtatcattcgtgctgattgtgagacgaaccgcaaaaagtctcggtggagcgaaccgcaaaaaatgatcagtgtcaataaaaataattattctgaccacttagtaaaaaattatgtggaatctaagtttcaataataagccttaagaaataaacatattaaaaaatatataaaaatttggaaaatttattattaatcactctttttgagaatataagcaagcaccaacagattgccttattacgccttattaacatgtaaataaatttggtgctccgagcacttctctcaggggtgtgacttgtctcagaaaagacgagagcgagagtttggcgagaggcgagagttcccaaaaagacgagagcgagagtttttcaatttttctgtagccgtattttttacttcaaaaacttcaaaatcgtatattanattagggttacgggtcccgggtattggggca

SEQ ID NO: 27400 - DNA, 1718 bp, Heterodera glycines
tgctgttgggtcagatggggctgctaaatttccataactttttgtttttaaatttcgatctaaaatttattaatttttatttccactcacagctcttcgaacaccgctgaattggccattgttgaactttggcctcttctgctggttgaaattgttgttgccaaagttttgcggaggcggtggcggcaaattattgttggactaattagcagaattgtttttaattatttgcatttttgtttcctaattgttttttggtgccaacctgctggtgctgtactcccgccacttgtcctcctccgttttgaaatgctgcttcaatgtcttcgccgcttttcaaatttgggtgatgaagcatgtgtggcaactgttcctgtacaaagcccttacaggcaagcaaattaaacttttgagctatttatttattttttaatttacgggatttattggccctccaaatggcaatggtgcattaagcgctcctccttggccgccaaaattttgtgcttcagttaaaactgcaagcagaacaggaagagcgacgacaaagaaggcagacattgtcaagaataatttgtttttttcttttaatgaaggaaaattttaaaattaaaaatcaaaagataattaataaataaattataaaattatatatagcctattaacttcctagacacgatttaattaacttttcagtattacaactttcataatgacaaaaataataaaagatttttctgtttatctaatgactataaattttgaaagtaaatttttatttaattggaatatttaataaatttattaatgaaaggaatgatttctgatcagaatctaggtagcttttatatggaattgttgaattggaatatccagtttttgtttgtgcttttccactatcgtggcgccgctgtgcgtgcagctgaacacaattttcggatgaagcacaacttaacccgtcttcagctgctgttcaacagtggacacataatgtcatcgaatataacctgattgtttagcccaatttttggggttaattaatttggctcaattggctaattgttggaatttgatgactttcttaatggctgttgaagcggcggacggacaaatgatttattttttcatgacaagttttccattaacaaaaggattaaccaactgatcagcagaaactgatcaattttgcctaattaaataagggaaaaagttggacaataaagtgaagagatctgttaaccagtttaattagaacaatttatgaaagagcattttagccacgatttttttgacttctagttttttattgcaacacagaaaagcggattgtaaaaaattcaaattttactaaacgattgtcccccagaacgcctaatcgggaacgaaatgccggccctcattttaaatgattggcaaaatactgctataattttttctttatttaaccgttttttaataaactaaattaattttaaaaatttgtctaaaatttatgggcaaatttagaaattatagttttggtaattttcaaaacagaatcaaaaatattcagtggatgggcaatttttgcattatttcgaacgaatatttgaggctgctggttgtgagtctttactcaaaaaccatcaaaatgaaaattattcataactagggactggaattttagggacgaaaatttttcaaataggcacctaaaataggcacgaaaaatgagaaaa

SEQ ID NO: 27401 - DNA, 986 bp, Heterodera glycines
taaaaaacgggcgcgaagcgcccgtctgaggccgcgaagcggccttaatagcccaacaaatttagaaacgggcgcgaagcgcccgtccgaggccaacaaaaattgaaaaaccggcgcgaagcgcccgactgaggccgcgaagcggcctaacaagctaaaaaacgggcgcgaagcgcccgtctgaggccgcgaagcggccttaatagcccaacaaatttagaaacgggcgcaaagcgcccgttcgaggacgcgaagggcgcgaagagcccatcttgagcctcgatgtggactaaaaacccataataattttttaaaaattcaaaaaaaaatctccaaccaattcgatcaatttgaatcgcttcacagtctaggtagcgaagctcccaaagcgcgaagcgcttttgcccagctaaatagccgacggttcacgcacccgctagttaatatatacgttatattgacaaggagtttcgttgctaaaaccattttctcccggccgaaggccgggagcgccctgaaagtagtggaagggtcttacaactttttgaggagcatccgggaaaactatagagaaaaattcagcgcggacgactgagtcccggggaccgatttttcactttttcttgcagtttagggcccctaactttttttctaaaacccgaatcaaaaagtgcccgctgtgagggcactccccacaactgtcctctacatgctggtattttttatttttttattagagccaccccctggcctgcacgcttggctaactgaagtgtgctcaaaaagtacacttcagtaccaggcgaataactcgccaggggttgctttgaccgaaaaattgtttctgagcaaaaatgtgtagtatttgaaaggctatcaaaccaagttttaaaatttcgaaaattttcaaaatttttcgagttaggcctaaaaaacggttttcgggtttttgaattttaggattttttaacgatttttcccagaga

SEQ ID NO: 27402 - DNA, 1076 bp, Heterodera glycines
  unsure (1)..(1076): unsure at all n locations
cttaaaaaaattgcaagaataattaagtccaaaaaagatatctcgtgctttatcattgcaatattcataatcttgacacatattaactttaaatgtataattattaattataaaataggaaatatttaacagtagaaactgcattaaaaataaaggtgtataaatttatggttatgttattcggcaatacccatatggaataatctcccgaatccgttccttttgattctttttttaaacggggcttatattcatatggtaattcggggagatagaatcatactgtctcgcgacggtagctaatgtttccacataggagagatataccatcaaagtaaagcgataatgtatgataataagatattatcgttatcctctatggttgataagcataagaaaattttcgcctaaatattggatctttgcataaaattaaaaggttttaaaactatattaaaaaaaacaatattccaactttgttttttcaaaatttaaaaaatgaatgaaacaatgccaaaccaaatccctgaaagtatttaatcccggtgtttttatgcccctatttccaatcttcaggcaagttttgctttttatcattaaatataattgtttatttttgtcaattaacccttgacagacttggacatcgaaatgaaattatggtagaaatgagccaaaaattcggaaacgcaaagcaacagttggaaaatgcacttagcgaagaaaaagccgaaaaacagctcaatgaagcagcacagaaaggatttgaagaggcgcaacggcgatttgaaattgcaaaacaagagaaagagacggcagaagcggcactaaagaaggcggaagagaaacggaagcaattggaagtgagtgccatttgtgggtaaaaatattgggtatataaaaaatgtatatttgaatttgtgtctaatttgcaagactccaaaaaatttctgacataaaaaattctttcacttaaggtatcagcataganaaaccgattttgcgcaaaaaatttaaattaaattgaaaaacttaaacagattcacgacttataaattatcgctgacccacaaaat

SEQ ID NO: 27403 - DNA, 975 bp, Heterodera glycines
  unsure (1)..(975): unsure at all n locations
cagggaatgaatggcaacaaacaaatgaaaatttaaatggaataataaaagaaaattttaataaaaatttggagcaaatgttcaaaaaagcggaagaaagggcaatagaaagatgcccatggtttggtcatgaaacagataaacaatggataattgtgaattcaaaattcgatgatgaatgcacatggtgagagatttaaaattgggcaaccctaaatccgaatcccggaccatttacatccaattaaatagttattaaatgaattagatgcttttaacccaaaaaaatatgtacatccttgggaaatttttttttaaagtttttgttgaatccaggtcggtcctgagttcgagttgggcaaatccgagttaaggttcgtaatcagcaccctggagaacccctatttactggttttgagcccaaaactaaaaaagtttcaaattagggacacccattctttaggattgcctaaaattcaatgaaaattatatcaattcaaattttagatcgaagattccctattttcttaatttgtaaaagggttagcgacaaattttgagaaattttttaagctggataaagaatattcgaactatttaatgcgatttaaagaaacacgaaatttttatgggaatgaaggaaaaatgatcaattttgggttatatgaaaataagaaaatgaaagagtatttggcgcacaaatatgcagtatatcttggcattgtgtatttgctgaaaaagaattggcaatgtgaaaaaattggaaaaaaatttaaagaaatatgccaaagaaatctaaaatatttgcgcattttatatgaatatttgttccaactttatattgaaggtttattggaattataatgatttattanaaaacatattttaaggtaaagcacaaaattggcaaataaattttcggcaattaagccaatatttatggatcattttgaaaataatcaaacgatgttaatt

SEQ ID NO: 27404 - DNA, 1462 bp, Heterodera glycines
ttatcctttggacacagcgtcgggaaatgagctctgtaccaaaaaagatttgcatgtgtggctcagtgtttttgtaggaaagtcaagggacaaaggcgggaggttcgagtccgttgtgctacatgaatattttcatttatttttgtgcaaaaaattaaaaaatgacgatttttgggaattatttttggaggtttttaccaaccaaattggtccatcatggtatcattcgaaagctcctggtgaggagaagctttttctaagcggatgctaaccattttgaagcattagaaaaaagttatgggcgtttgaaattttgttttttgaataacttttctaatcgacccattttcaaattaatctgacctatcattagatgcagaaaatttttctctatcgatatataaaatttggttggatttaacaagtagaaaaaattttaaacaggatgaagcaaattcggtttttctctattaatagagatgaagaaatagtatgccaaaaagagagatatctttttctctgcactctctatttattggtacacatctcgctttttcggacggtgtgggaggaatcatatcattcttaaaaaatcaaaattcccaggtccgtgtgctgatcgcttgtgatgtcctttcacggggcatcgatgttttggacgtcgattgcgtgatcaattacgacctgccgataaacgaacgcattttcgttcaccgagctggtcgtactgccagagcaatgaaagaaggactactcgtttcactgacaacaaaagaagaagtgtgctaagtgactacattttcacattttactttcccacatttttttccctttagaaaatgaaacttaaaaagttgctgtctccgcacaacctttgggagagcattcaagaaacaaagtccaatgactcggactttaacgaagaatgcatgcaattatatgaaaacgcgctaagaaagttgaaaaaacgatttgaacaaaaataaatgattttttaaataaacggctttttccctgttgttttttagttgtctcatatcgttcctgttattacccacacatctcaattttcgttttccctcgtcttgttattttggttataaatttgtttaaactaaatttgatatacatattttggaaattaataataaacgagtcctaatcggttttgggtcaattttttattgtcctcatttgtgtgcgtacactcaataaaggcaaactgtctcctcattttgtagttcgggctgactaataatttgtttgttttttttttttttgattttctgtcagatggatggccgtaaccataaccatgcccatcatcacgaatcccacgttcaaatttcgaccaattcgctgccgccggccaacccaatcgacggaattgtaaattctcttccggatttgaatggtaaattttgtctggcgatagtcatgaaaaatataacgtcttttttgg

SEQ ID NO: 27405 - DNA, 1693 bp, Heterodera glycines
  unsure (1)..(1693): unsure at all n locations
gagcatcacactgtgcatccaccagctgcgcgtggtcaacattgtcggtgttcaaaccttgcnccagcgaatcagtgtagagcgactccaaaacaccctgggtggtatctatgacccaacaattttcccagcccttcgttgtaaattgtcgaatggagtcacgtgcctagtttatatttcggggaaggtcattgtcactggggccaagtctcttgatattttgcaccagtcatttaccaatttgtctaatattataccaaagtattttcgtaaataatttattttcatttgtacaaatttaaataaacaaaatagtaaactaacaaaaaaatcacaacatcagaaccacccagagtgtccgggctgtgtgggatcttgctccacaaaatttctctttcgtcggtgcgtccgttgtccttcgttcggctgtccatcatcctccagatagccaaagggacgcgtctgcatcccaggccgaacgcgccccttggcatagaagggcctgtagtctttgtgggcctcatgcgtgtagagatcggcgtacacattgcgatcaatttgcgggaagttgacgcgtatggcacgatgttcgccgcctccgtacacgtaaaggtcgcattgtccaaagcatcatcgctaaaattcaattttttttaatattatgtaaaagaatgatatgttaaaaactcacattgggccgtcaatgttgtaagtggccagcgtcaggtctttcatcgcctcaaaggtgagcagctgctgcgcagtataggacaggcggaagctgcggattttgaggttggcgcgctcgtcggtgccgtcccgcgcagtgtggcggatgccgtagttcttggggccacccgcaacgaactcgacgatccgtcggtcggtgtgttcgcgcttcatctgccccagcgcctcgccctctgctacacaaggaccacccatcttgttgacgtagtagatggagtcggtgtctaaaacatagcgttgtccacccaaaaaacatttcgtgacaaacataccgcagtagagcagctccgcaccgtcgatggccgacacttgctccatgtagtcgtaaagatgaagtcgaccgtacgaggtgacaaacgcagcgaccggaaggcagttggtcggtggtgccctggcgaattcgtatttctatgcctaaaattagggtagcaattgttgtcgattcgagcaatcaaataataccaataaatgaaaaatggaatcaaaaaagaatctatttttgagttctcataaagttgtgaagcattatattttccaaaatgttctattagtttaatgtgatcttttgatgattaattaatttattaacaaaaaaagattttaacagtaatttaaagcaattcgcatcataaaataagtcccaattaatctttacttttgtgctacagaaagcataaaatagacatattaatatgcaaaatcaacaaatgacgggacacaaagcaatattttccggtaatatttaagtaaaaaaattttttcccttaatttcttattccaactcttcgtccgggaattgctcatcaatatatttacgcaggaaacacagcaaaagctttatgttggaacagatttggggaaagtcagcaaaaagcgcactgactccagacactttgtaggacagcaccaagacaacgtgttcccttaagattgttaaaatgct

SEQ ID NO: 27406 - DNA, 1310 bp, Heterodera glycines
  unsure (1)..(1310): unsure at all n locations
tataaaaantcttgaaattaattaaaacattaaaaatatcctaaaaatacaaagaaaaataatgtacaccgcccgggtccgaacttcgcctatatgaaattctttaatcaaacaaaaaattaattttaaaaaatttttcacaaaaaaataatttaatttaaattaaaaaattaattaaataatttataaaaatcttgaaatgaattaaaaacattaaaaataaccaaaaatgcatagcaaaaataatgtacaccgcccggattcgaacttgccccccccctcaaaatgatgcctcagaatccccaatcacacagggattctgatgtctgaacgatgtcaaaagtaaaatctgatcacgtattcgtgatcagcgtcataaaatacccctaaagacatgtttttggaagatttttgtcgaaaaagtttttcactcaaaaatcctggtcacccccctttggtcccgaaaccaaaaatcacttttatttttataacaattcgcaaaaaagagataaaaatgtaaaataaaatttatattatagagaaaaaaattgcggatttttgtagtattttacttttacagaatgacttttcagaagggagttctgattttttttctgaaaaatctaaaatttccagaatttctggaataactttttttctttagaagatagaaatcccaaataaatcccataaaattctcccgattttttgctatttttataatataattacatgaaaatttatccacccttcgatttgttatgaattttcgaaaattaacccaaaatcccgtgggccaaaaaattggaaaatattttcgaatttttaaaaaattccaaaaattttgaaacgaaaaataaacatcatattcgtgctcagcacatcaaaataccccagaaaaatatttttgacccccattttcaacccaaaaaaaatttccgaaaatttctagggggcctagctcgaaaatttttgaaaatttccggccatatgacacaccattcgatagagcttaaaaaactctacaattttgccccaaggagttttttcgataaaaccaacccctgacgagttatggacccgggactcaaatgtcccgctcaggccaaattttttttctatttccgggaaaaaatcgaaatttttccgaaaaaaataccagtcgatagagctcgaaaaactatgttttggaagtggtctccgtttctctgggaaaaatcgttaaaaaatcctaaaattcaaaaacccgaaaacctacttttaggcctaactcgaaaaattttgaaaattttcgaaattttaaaatttgg

SEQ ID NO: 27407 - DNA, 1374 bp, Heterodera glycines
agaaaaggttggagccgaagcgtcaaactcattagcgggagctcaagggtcactaatcatttatgggttcagcccaatgtttggaatgcatccaatgcgacagacagacgctttggtattcgccggaggaaaacgaacggcacattgggagatgccaacgcggactgatcccgccaagtcaatgtgccaacagttcacacacccactgcatatttagctacttcaagcagggagggggtaagcggcaccataggcaattagcattggctaatttacactaattggaaaatttaatggaaaatcaaatcaccgttttgtgtgaaggtcatacagagggataattgagacagaacataaaaagagggcgtaagtgagggatgggatggaagaggaagtgcccacccgcaaaaatgatccaaaataatccaatccatcgttaatttctcggcggcatttttgataaacaaagggagccagcgggagagatgaagtgaacaatgaaaaaataagttggattgggaagacaataggaaggggagaggggaaacaaagaacacagagaatagggaggggacagagaaattagagagagtgattagggaaagtgccatggtgagagagagaggggggagacagagaaagtgggagggggacagagaaattagagagagtgattagggaaagtgccatggtgagagagagaggggggagacagagaaagtgggagggggacagagaaattagagagagtgattagggaaagtgccatggtgagagagagaggggggagacagagaaagtgggagggggacagagaaattagagttgccatttgcccacttctcccccaatttttgttagatttttttgtgcctattcagtgattacaatcactgaacgacgctgtggcactgccgatcaaatcagcggctgcactctgtacaaatcgatgatgcgggccaaaaggcatctgatcgcgggctcagcgattgacgtggaaccaacgaaactgtggagagtgggaaatgtgggacaaagtccgccaagtcatcgcagacgcgagacgaatccattggtggtggaagtgtgcacgggcggatgcaaagagaacggatgtgtgaacggagtgggaggaggaggagaagcgaagtggacgatggcatggattgtggtcatcggatgggtggcatggtggacgagcacacggacgaggacagtcggcggaaggacacggcaaacgcacgacggacgcgtgggcgggtgacaaatggagggaatggaggaccatctcactcaagtttatcagcagcggagcaaaacactgatcgatcggaggactgaccgaacagagacaggccaacaaagcctttccct

SEQ ID NO: 27408 - DNA, 807 bp, Heterodera glycines
agttatggccagaaggaactcaaaaacccagtaattcgaactttttttgctctgatttttttgtgcataaataaaaatttttgaaaatttgcaggctaatagcatttttcgaatgctttcgaataataccaagaatgtttaatttggttgagaaagaaaaaagttatggtcgaaaaattcgttcgacgacgtttcggctgacgacgttttgtcctactccggcccgggcccccccccccccccccgaaatcagaattttctgaaaaaaaaatttttttttgaaacatcgccggcataattttatttttaaatatcgcgtttatgcaaaggaaacataaaataatgcaatcaattcaatttaaaaaaaaaacacgaaaatacacccctaaaaatagaggtttacaaaaacgaaaaaatacaccctaagaatcgactttttgagttgcccccccccccgaaacgaaggtcctggctacgcccttggcgtatgcaatttattgatgagaaggaatttcgagtaaataaattagagcaattttggtttcattttgaagagaaaattctgaagaacatgtctaactatcgttttttacgtgtaaataccattttttgctggaaaaggaaagaaatttattgaaaatttcacccagttgaaaaatttttccctatgttcaaattttcttgaaattttgcataggcccatattttgaccttctctatcgaatcacagtttattttttagctgtctagtttttaaatcgagatcggctcttccatttttacaagggaaaatctcggtaaaatttt

SEQ ID NO: 27409 - DNA, 1236 bp, Heterodera glycines
taattaattgccaacttcgattcggcattggccatgcacacaaggattatggccacgctcgcaaggggacgaaagatgggcacactgttggccgggagcacattcacaggtcaatgagctgaaaaggcaacatttttgattataatttgcttaattatccaaaaaattacttatagtcatttgtcggtgtgcaaattgtcccctcggggcacggtttaaattcgcaggggtcgggcttttcgctgcaataattgtgtttttagataataagaaggcaatccgtataatattttaaattaaatttaatatttcttcatattacccaaaatattttaatatagatattttaaagtgattaatttaattattttcctttgtttacatttcgcacaaaatgccgccaaattttggcggacattcgcactgttctgacgaagcattttggcaggtggccccattctgacagtccaattcgcatttgttcgcgctttcttcatgttgaaactcgcaatttttgccagaaaatcctaaaacaaatatttaaaaacaattttaaattattttaaaaattatttttttccaaaatattaccaaatttgcatcggcattcgtagtggcccaattggtcgtgacaaatgcctccgttttgacacggttgttcatcatcacaataactgatccgtgacgcgcacatgtcgccggtgtaaccaaacttaaaatgattaaaaatgcataaaattttaaatttattttccctaaaaaatataaaatattaaaaaatgaataaaatttatcgaaaataaacgctgacactcacctcgcattcgcatttgtaactgccgaccaaattgacgcatttgccattgaaacaacgcgtcatctcatccgaacattcgtccacgtcatccgtgcaattttggcccttaaaaattcatttagattgcaatttgaaatcataattttctgtttttccaccttccatccctcatcgcataagcatgtgtagcttccgttgaacggattcgtaaaacaatggccatgttcgcacagattttcgtggatattgcaaatgttttgaaattcgcacagcgctccttaattgattagaagttaattattgtaaatttctggcattttgtaccaattcggtccggcgcacaacggcaatcgtaccgagcaatgccatccacgcatgttgagccggcgtaacacaaattatccacacagtcgtcaatg

SEQ ID NO: 27410 - DNA, 1119 bp, Heterodera glycines
gagtggttgggacagatgggcgcgaggggcgaggcacgtcgttaatggttacgacgaatgtcgttgtagggcttggtgtttggcgaggctcggaagaaaatgaggaatacacagtcagcggggaatttgagcgggatttagtaggagcaatggggagggatgactcgagagtcggcgaggaagacttaagagggggatcagcgggggcggggtccaattccatttgattaatattggataaaataactgaaggtgcaattaggtcaaatttcaagtgtttgtgaatgtcgttaattgcagaaatggcaagtcttggatttttgcgattcatgaaccacggggtgggttggttcgctgcacaatttcctgtaaagtgctttgaatttcgccaagttccaatgattctggcacggaaagaggagggggagaaaggaggttgatacgcaaataattacgaatcagttgcaaaatttttgccaagacaaggagaaaaattccaataagacaggagatggtggccacaattaacgaagtgtgtgggtgggggtcgtctgttgggctttcagaaagtaaagaatcgagcccaaaatacacgagagagggagcaatgacggaaaaagaacttttggccaaagattttgggttaatttttactttgggctttgcgtcggccaaacccggttgaaggataattaccagaataaaaacaaaaaccaccgttgggattgctaagggggaaagagggtgttcttcaattgggccactttgtgattgggttggacgatcagaaatggaaggcagggtgggtggagtgaccgagatggattgctgtttgaagatttttgcccaccaaaaaggattggcacataatcatactgaacacaggaaaaaaagacacataaaaaagggagggggacggggaaaagctgatcgttcggcgataagagaaattcatctttgcggggcgaaaggtgatgagaaagcgaaaaacggctggaggggagggaatctgaggattacgttgggaggaaaaatagggacattaggctggggttgtggggcaatggcgtgaaattgtccggcatgtacgggttgtgaaataacagggggggcgggggg

SEQ ID NO: 27411 - DNA, 959 bp, Heterodera glycines
atgaataattgctttatagaaacctacccagcatggaattgtatatcagattcgaatttttttgtatttaagcttttcttgcgaagtatctttaaagggtgatggcatttaatgggctagaataggtgagtaattaagagtggatgaatatttgctttatagaaaactacacagcatggaattgtataacagattcgaattttttgttatttaagcttttcttgcgaagtatctttaaagggtgatggcatttaatgggctagaataggtgagtaattaagagtggatgaataattgctttatagaaaactacacagcatggaattgtataacagattcgaattttttgttatttaagcttttcttgcgaagtatctttaaagggtgatggcatttaatgggctagaataggtgagtaattaagagtggatgaataattgctttatagaatactacacagcatggaattgtataacagatttgaattttttgttatttaagcttttcttgcgaagtatctttaaagggtgatggcatttaatgggctagaataggtgagtaattaagagtggatgaataattgctttatagaaaactacacagcatggaattgtataacagattcgaattttttgttatttaagcttttcttgcgaagtatctttaaagggtgatggcatttaatgggctagaataggtgagtaattaagagtggatgaataattgctttatagaaaactacacagcatggaattgtataacagattcgaattttttgttatttaagcttttcttgcgaagtatctttaaagggtgatggcatttaatgggctagaataggtgagtaattaagagtggatgaataattgctttatagaaaactacacagcatggaattgtataacagattcgaattttttgttatttaagcttttcttgcgaagtatctttaaagggtg

SEQ ID NO: 27412 - DNA, 1114 bp, Heterodera glycines
tttaaatttccttccccttttttggaattttaaattttttttggtattttttttttgcgggccattttgaatttttgaaaaaaaaaattcattaattttttttgaggagggtttggaaacgccccaaattttattttcaagttaacaaagccctctgatgttttttctatcaaaaagggggatgaataaaaattctaaaaatttttactttctttttaaacgagcgaaaaactttaggcttagcttttttagtgaaaattcaagcactcatagtttttcgcgttctgatcagaaatgcaccaaattttgcagggtaacagctgagaagaagaggtaattaggtttaaatttccttcccattttgtggaatttgaaattttttcggtattcttattttgcgtacatttcaaattttgaaaaaaataaattcattaatattttttcagagagtgatctgaaacgcaccaaattttattttcaagttaacaaagccctctgatgcttttactatcaaaaagggcgatgaataaaatttctaaaaatttttaattgctttttaaacgagcgaaaaactttaggcttagcttttttagtgaaaattcaagcactcatagtttttcgcgttctgttcagaaatgcaccaaattttgcagggtaacagctgagaagaagaggtaattaggtttaaatttccttcccattttgtggaatttgaaattttttcggtattcttattttgcgtacatttcgaatttttgaaaaaataaattcattaatattttttcagagagttatctgaaacgcaccaaattttattttcaagttaacaaagccctctgatgcttttactatcaaaaagggcgatgaataaaaattctaaaaatttttacttgctttttaaacgagcgaaaaactttaggcttagcttttttagtgaaaattcaagcactcatagtttttcgcgttctgatcagaaatgcaccaaattttgcagggtaacagctgagaagaagagggtaataggtttaaatttccttcccattttgtggaatttgaaattttttcggtatctttattttgcgtacatttcaaatttttgaaaaaaataaattca

SEQ ID NO: 27413 - DNA, 706 bp, Heterodera glycines
tgtagtgtgcttgcccgactgcttggtcgtcccatcggcagcagtgccgtgatggccgctgccggtgccatcgtcgacgcgtcgtcgtcgtccgctgctggctgttgccgcctttgcttgttgcgcgacgtgcggccccgcctcttttgccacggttgcctgaggccctcgtaggtgatgtgagtccacatgtacaaactgtccaccggttggccccaccggtttagctccaccgccgatgccgtgctgttgctggcgttgtcgtcctcaccgaagtcgtcgtcgtcattggcggcactaacgctttgttgttgtgccccctccgccgttgtgccagcggtgtccctcgtgggcaaaaggcggggcgacgagatgccactcggacactccgatgaggaaagaagcggcggcgcttcaaaggaaattgtgcagttatttttaatttttcagagaaattttaatgttgaaattaaagcaaggaatttttttaaatggccgggaccgggaataaaattcaaccggggcgggagggtccagggaccaggactaccatttgttttccgagatctccggttgcggtgctaaagacatatttgtatacaaaaaaatttttaatatgacattgatgcagattcataaattgcaatgctgcaaatgtgagtgagatggttttatgaaaatttagataatttttttataagaatat

SEQ ID NO: 27414 - DNA, 549 bp, Heterodera glycines
tgttccaaaaagttttttggaaaaacattgccaaaaaccattgagcttagcaaaaaatttaaaagattgttaatttatttaaaaaaatacagaattttgggactcagaaaattccaagaaccccccccccctgaaaacaaaatttttaaaaattttcctcgaactcgtcccccaaaacgtaaatacaaaattttatgggtacatttttgaatattggaaattttcgtaacaaagtgcacttaaattttcaatttttttcaaaaaaaattttctctgggaaaagtcccggttggtcccggtcccgggttttttcgcggtcccggtcgaaaaacttggtcccggtcccgacttttctggtcccggtaagccccggtcccggtttttgtcaaatttcccggtcccgctcaactctagaattttttaaaaaccaacactgggcgcacatcatgtttctcattggcataaatccaattgaggaaatcttagctcaaattgtggcatttatgcccatgatataattccgacgcttagtttttgcaattcttcgct

SEQ ID NO: 27415 - DNA, 906 bp, Heterodera glycines
atcacgaggatgtttaaaaaaaaaaaattttccaatgtgtcggtcggcaccaccggctgaaaaaatatacatttttatctttctaatttgatccaaaaatacataaaaactgctcatttaatttcgaataattttaaggaaattgcatttttttaatggaaactgagaaaaaaacaaacaaaaaatagacaattttgcaattagcgccgaaaattctttaaaaaaagtcatcgatcagcgcccttcaaaaaaaaaaaaaggtttttcatgaaaaacaaaaattgcaatttaaagactactataattaattatactataattgccgctacctacctccttctgtcgctgtcggttcttcaacttgcgaatgggtgccacaaattcgcgtcgtttctgcttcagctcgtcaaccccaacatcgtccggcatgtcgtccaaccaatccttcagctttgccgtctgttcacggatcaataccagctcttcatcggtgccaaaactgttgaaggcctcctcttccagcttggcactgtagtcgtacacggccgactcgagcaagttcagcgccaacgcatgttccgccttggccctctccttgcgctcaaagtcgttgagactgaaaacagggggcaagaattttcgatttcatttttcaaaaaatgaaaataaattcccaacctccaagttaatttttttttcaattgaaattttcctttctctcaacattggatgttaagttgataacgaattaataagtttttcaaaaaattttcaaaaaatcgtcaatttttcaattatgaattttcctacaaataattttttttttctaaaaataaaatttttggaaaattctcgtttgaatttttttttggggggggggcgagctgctcatgcttaagttcacac

SEQ ID NO: 27416 - DNA, 998 bp, Heterodera glycines
  unsure (1)..(998): unsure at all n locations
ataaaagtgatacaaaaaccaaaaccgctaaaataacgaagcggaaattaattcacatagaaggatatttaaattatgactacatatcctattcaataaaaaatagctggggtaccatccattctattaccgtttaaatcacgaatgaacaacaaatgaggtaaaaactttaactggaaaaataaatagacaaaaatagcaattagataagtgatttaacaatcattttccgttgcgcatcaaattggaaattgtttgcagtaaattgacaacttttatagaatttatttgccgaatcgatcttcaattgttgggcctaaattatttgaaatgcttatgaaaaaaacagaacagatgatttatttggttaccttttcaaggaactcgctttccgggatggcgattgtgtcaatgtcagcactttccgaaataccgcccccgtgtcgaacacgttcgtacacaatgtgttcgttgactaattgtttaagcaaaaagagcagcaagtcattattgtcacgtttataactcagttgtttccagaatttcttaatttgtttttgcttttcgatattaaattttgccattacctttttcatttggcgcatgaccgatgcctaaaaacattaatttaaacactgttcatacacatttttgtggacctcatcacacatattttctgcttttcggttttttaattcgaggtaccgcacaaataaaaaatgcctaacataagtttttgaaaccaaccttttgtgtgctgataaaacattgcaataaaattttcatcgccacactgacgtcgtcatcgttcacaaagttccgcaaatgcattttggcatgagcctcggccattcggattattgactcgacattccgaatggttatcgcaacagacccagtctcctggagggaaccaacattgaaatggtgtnnttcgtcggtcatcatacgtccgcctcttttcgcagatcactgtacacttttgagatgcgttcatt

SEQ ID NO: 27417 - DNA, 1514 bp, Heterodera glycines
  unsure (1)..(1514): unsure at all n locations
tttaaatgtaaaaatcttttnagaagaatttttataaataaaaaataaaaattaaattntaagtaacaaaaaactacaataattaagtataatgttaattgagtaaacatttatttgaaagtttgaaataaatttgaaaatgatttctataaattataaatttgaaattttgaaatttaaatttgggtcactcgaaattaataatgaagaaattatggaaaattgacatctggctttggacaacaacattaatttgaaaataaaatatccatgaaaaattaatgcgttgcgaaatgattgaggaaaaattaataaattatgcaaaatgtgccgcataaataaagagtctttcaaattagtgaaatgtgaatgaccttcttaagaaatatggaatttgaatgaaaaataatggaataaataaatcattttaatttaaatttaaatatttatgctttaaaaaattattattttaatatgaacttaaaaatatatttttttttttcaaaatttcagagttcaattcaaaattctgatattcttttatattttttcatttcgaatgaacgatttaaatgagaatttttttttaataataaatgaatttaaaatgcttatttttcatttaagtttttgtcaaatttccgcaaataatccaaattttgtgaaattttggccggacagaccgaccaatccattttgctgaagcaaattgaatcgtcttcccctgcctcaaattagaggccaaaatgctgcaacagaaaaagcggaaaattccattcccccaattgctcggctcattcctttgcaatgcttcaactatttattagccatggggaaaagcggcggcccaaattgggggcccctggggggacacgaggaatgaaaagtggggaagaagtaatgtttaaaattggattgaacatgagagttgcatatgaattgtttttcgaattaaaagttggtttcaaatgaaatctaattttttttttcaatttttaagtgaaatttaaagtcaatttaatacaaacgtcacaaaagtcttcatctgacttcaaaaaaatttatttgcttttgtaaatttttgaagaaggcaatcaatttggaatttaattatattcaaatgaaaacgtaattgaaaaaatttaaataattcattgtcattataaactttctttaattaattttttttttactgggatatcatttttaacaaaagaatgaaaacggaaacgattatttttccattgaacattgggaaaaatgccaattaattaaaattaaaaataattgggcattaattttttttaattaaaaaagagagaaagaattcatggcgacagacacagaattaaaaattttttaaatacttttgttttgcttttaaatatcaaaagaacaatacaaattaaaaaaaaaattaattaaaaaagatttttttgttttatatgtactttcattaattttttgaattgatattcaaaaattcattggtttggatcataaatacaccaaaa

SEQ ID NO: 27418 - DNA, 1049 bp, Heterodera glycines
  unsure (1)..(1049): unsure at all n locations
ctcaaatgcatttctgctaatggacaaaataaggacgacgacgacgatgatggtaatggaaaaagctttatctgctttaaaaatgtgcttaaattntagtatcaaaaaacatgcaattaataattgttgcaaaaattcaattttcagaaacatttgataatctgccatatttaataattggtaaattactgggtccaataaaacaacgcccatacttttgttgtttaaaatgcagttcagtaacattttaacgaaggaaattaacatttttttagttttaaaaatttggaaatatttcaaaattattgcctctggtaccgtattttctcattttgtaaatttatattaaaaaagttttcaattgaatttttattaattattatctaaaattcagtttcttaatattttaacgaagtaattactattataattttatttggaaatttataaatttttaaaaccaaggcttacctatagcgtattttctcattttgtcaaactttttgtcgtatggtgtcgaattttacgtttcatggactgtacctatacattaatttaagacacaaatcgtcgtcggagacgccgtaagcggcgcaatgctccgccgccgggatacgccgaatggaatcaggaagcaaataacccacgaactttggcaaaaattatgttgttcgttgtagtgatgactgtttttacgctggtggttaaccatttttgtaccaatcgctctggaaacaatcaaagccaatggcagacagcaaccattgtaaccaccatagaaagctcgaaacgatgtgagaggaattatactgtagattgtgcttcaaattataaacaagaaaaatcacaaaaaagtcttaaaatcggttttatggatacatttgcaacaaaaacattgattttttgagagaaattttttaaaaatgctaaaaagctttaaatattttaaattacgaaatttttgggattaagaagtgattctttaaaaactactanaaattgcacaatatgtaaatgggaaaatgtaaataaaaatattttacatacct

SEQ ID NO: 27419 - DNA, 1422 bp, Heterodera glycines
ctattttctatttttaatccatcagcacgctttaacatctccttttatagatttaacacaaaatacaaactgggcaaaaaattcattccatttgctgggagggtaacaaaattgtggaatcaactagataaagaactaataaaaacaaattctttaaatcaatttaaaataaaacttaaagtagggtaatatgtaagaccgggaaagctagaatgtaacaaatttctaagtgatttggtatttcgacctcatttgactttgacctcaatttatttattatttattttcacatatttttgtctttttttaattcctgtgatcatccatatattttgtcacttactctacgacacatttaccggaatagtcgtcagagtaagtggttttcgcccttctgatgacttttttattttttatgaataaacaataaacaataaaaaaaaaaaaaaaaaaaaaaaaatcttattcattgaatacagttgcaaataagatacatttcaaaattttcaggggtaaagggtcgattcttaggggtgtatttttctgaaatttttttggtcaattcttatgggtattttttttgaaattttttaggtcgattcttaggggtgtatttttctgaaatttttttggtcaattcttatgggtgtatttttttgaaattttttaggtcgattcttaggggtgtatttttctgaaatttttttggtcaattcttatgggtgtatttttttgaaattttttaggtcgattcttaggggtgtatttttctgaaatttttttggtcaattcttatggatgtatttttttgaaattttttaggtcgattcttaggggtgtatttttcgtttttttattgcattcttgttgataaatttcccaaaattcgcaaaataagtgcgaaaataagggcgaagcgccaaaataagggcaaaaacttattttaagggcgaagatgtaaaataaggatttttaagggcgaacacccagaataaggatttccaaggtcgaataagggcgttaaaacgcaaaattttcaaacaaaaaaaaatgtgtttttcgtgcatttctcgtcgacttaaagccgcagaaaaaataaggaaaaacttataaatccgggccctagtaatgatacatatatatgctccgttaagaaattataaggtcaagaatttttgtgccacttcacctacttccaatggaccaatcgagctgaaattttaccaatcgaacctcttctgtgaatattaagaaacatacaaaaaaattggaaattgtaaaaaaatttgttatgaatgattttcgaaaattgccccaatatgagtgttaagaaattataagttcaaaactttgaatttatgggggaccaggtcgttttggcgccgacgttttggcgccagggtcgttttggcgccgacgttt

SEQ ID NO: 27420 - DNA, 1114 bp, Heterodera glycines
tctaatctttgcatatatttcgaaggttttatatgtttttcttaaattttctagaataatcaattggttggtccaatcgttccatttttgcttatttgtttgttttttcgatgtaataatatgaccatttgaaccagttctctctccatggcttccctcattttgctgcttttaccgctgttcgtctgctccttccttttcgtttttcgccacctcaaacttcgtcgccagttcagttccgtcccttcccctcgctcctatcccttcataggacacatgctcatcaccaaaccggacattgaggagacaatcggtcaaataatggccatggcttacctttacccgtcccatccgcggatgaccgccttttggattgggcccactcctaccattatgatttactctgccacgctgctcgagtcaatcaccggcaacacggaccatctgaacaaaggattttcatacgaatttttgaggccgtggctcggcaatgggctgttgaccaggtggggctgcactgtttccaataggaaattcccacctttttcagttgtgccgaacaatggaggcccaggcggaaattactcaccccgacatttcattacgacattctgaagcttttcttgcacattttcaaccatcagtcgagcattctcgtacagaaattgcacaaaattagtcaagagaacaagttggtagcgaatggcgaacaaacattttaaattatgccaacatctaggggattagttgcagacgtttcgccgttggtcagtctttgtgcgttggatatcatttgtgagacttcgatgggtcagtcggtcaatgcgcagtttgagtccgactctgaatacgttcgtgcggtgctcagaatcaacgacatcatccaacgtcggcagtgcaacccgttgatgtggctggacacacttttcaattggttcggtgacggaaaagagcactcatgggctttggaggtgctgcactcattcactcataaggtgcagtcaaatcgccaatttgccaaatcaaacgaatgatttgttaggttattgttgaacgaagggaaatgcgaaaaataaatggaaatggaacacggactgaacgattggcctttttg

SEQ ID NO: 27421 - DNA, 1034 bp, Heterodera glycines
tttagcaaagcggagtcaattataaaaacaacaatttgtcctttgtcgcttaccgtcccgcggttgtttggatgggctcgtagaggaacaacaatgttggttcataataaccatgcaaaaagcacatgtccagcacattgtccaaccgttcgtccaacaaacgcattttgatggtgtaactttgcaacaacatttgttgctgttgttgctgctggttgtacagcttggcctcctccctgctgctgactgcagacggttgttggcgcaccaattcgacgatgttaaacggcacaacagccaaatgacgtccatacactgaacagggagatgtaagttaggagtatacgaaaaaacgtatccaatcatgtccaattagtccatgaaatttatagagatgagactgggggttgacaaaacaccaaaaacgaacaccccaaaaaatttggaaaatgatgatatttgaaattttagcaaaataaaccttggaaatcaaggttcggacgaatcttggattgaaaattttatattcgtaaagaacccatgtattcaaataatgtgaaaagccagaattttggaatttgtcagtcaatacggattaaaaaaacgatgaaaagattagtatttcataattgaattcgaatttgttcgaatgttgacacatttattaaaccgtcgtcccctaaaagcctctagacatttcagttttgaaaaacacaataatttaagcacccgtaaatgcacaacaccgatgttcagggtcggcacgaagttcgggctgatgaatgttctcatcggtgtaaccgtcgcgcaaaaattcgtcctcaatggaatgcagcgaaatggttgtcagtgccattgtggccgggttcacgccaacaattgacagtttggcatcatcaaaagtcatcgccaacgagtcgtaacaatcggcactgactaaaaacaaaaaatgaatgaaattttctgaagacctgtaacaaattccaacttttccaatatccaaaacgaattctatgaatttggccgccatttaa

SEQ ID NO: 27422 - DNA, 521 bp, Heterodera glycines
aaaaaaaaaaaaaattattttttttttttttttttttttttgggggggggggggggggggggggggcgccgccccccgcagaaaaaaaggggaagggggggcgggccccaccccccccccccccgcggggggggggggggggggggggaggggggggtttttttttttttttttttttttttttttaaaaaaaaaaaaaaaaaaaaaaaaaaaaaaatttttttttggggggggggggggggggccccccctttttttttttttgttttaaattttttttttttttttgggggcgccccccccccccccccccccgggggggggggggggggggggcacattttttttttttttttttttttttatataaaaaaaaaaaaaaaaaaaaaaaaaaaaattttttttttttttttgtttgccaccacccccccccccccccctctttttttttttttttgggcgggggggggggggggggtttttttttttttttttttttttttttttggtggtgggggggg

SEQ ID NO: 27423 - DNA, 963 bp, Heterodera glycines
  unsure (1)..(963): unsure at all n locations
agtgcggaaaaacggagaggggggcattttgcatttggtaccaaggtctgcggttgttttttttaggaaaatcactgtcattttagggttccgattcactcgcagaaagggaaggtggttccgctgctccaaccgggactgtgaggcaactgcagcattgagtaaagaaggcggaactaatggtgtgctcggaagaaaagagcacaaccatctgccggacccagcgtgcttccacgcggaggtaaaacgcaacggaattaagacgacaacgatggaaaacccgcgccaaaagccatcaaaagtattggcagaaatccgtgcaaacaccaaggacgaaacctttgtttccatgggcactgacctcgcactggtggcagtaatgagaaggtacttctcttttgatacgtgtattcctctttcactcttatttcaaaatttttaggcagaaaaggaagatttacggcaacatggaccgtgtcaaccctttgagtgttgtcttacccgatgccctgcttattaaggatggcgaaagcacattgttgtatgacagccgagcgcatcgccaaggagaatcggatgtggtcttggtctttgcacacccgaagttaagttcattcatttcatgttcaatttttcgcttttgttttcagctgttggacgttttgaagcgggcgaggaaaatttcagttgatggaacattcaaagtgtcaccagccgcatggacgcagtgtttcgtgatcggcgcttttgtcaaccggcggctcgcattatgtgtgcatgctctgttgcctggaaagcaacgaaaatactacgaagaggcgctcaatgcggtcaaagcggtgatggcacccaacaccccagcacatagtaagtgatcatttttcctaactttatttcatnccaaaatttaagtcatcagtgactttgaaaccgcaacgattcggccatgcgagaaacgtttcc

SEQ ID NO: 27424 - DNA, 1135 bp, Heterodera glycines
ttttgctgcttgccttaattattatttgtttgatttttttattaactatttccaaattgccgtggcattgttcggcaccgcaattggccatgtgctttaagcggaaggatgaaaaagaaggaagagcaaaaggatgagctcgaaaaaatggcccagagaaaaaaaaaccaaaaacaagcaatccatttaaaaaaaataagaaaatttgttttctaaaaaactaaaaattaattttacttaatcatttccccaaaattttttaatttacataatcctaattttaaaatattttgttgtctacattaattgaaaatattaatcttttttaactgccatggcattgttcggcaccgcaattggccatggccatgtgctttaagcggaaggatgaaaaagaaggaaaagcaaaagatgtgctcgaaaaagcatcccgataaaacaagaaataaccaaaaacaaaaatccattcaaatataatccatttaaaacatctttcccccaacataatccaaatttatttatttgaatttgaaatttgcattatttatttttcattaaaattttttaaaaatagtttttaattattaattattgcataaaacattttgttgtttttttcacaagccgaacattatgtgaccgtttacgcatgcaccagtttaattacgataagcaacaataaggacacttttatcaaaaaatatggcaattaccggtgcgaacagtgccaattaggcaaagaaaatgaagagaatggcaacgcgaatttcccggtatacaagccaaaaggtagagataataaaattttaatatgttttttagtcatttaggttacaagttaaattatatatttttacaaaaaaaattaagaaaaatttattattagcgacccagtgattagacatttaaagatctttcccctaacataatccaatttaatttatctgaaattcgcatttatttattttgcattaaaattgaaaaaaattatgtctattaacaatgctgacaaaaaaaacacaagctatttatttttttaatgtagagatctccgaattttacatatacgaaaagcgatcatgacttgttaaaagtgatatttgttacaaactttacttcgaaattcgaaaaactc

SEQ ID NO: 27425 - DNA, 822 bp, Heterodera glycines
tttgaattactcaatttgaagggatttaaagcgaattttgttgtgtagcgaatggtcgggcaacggaaatggcacaaaattggcaccaatccccacaaataggtttgattctgtgcctgatgtgcccttgcaaatttttatccatttccaaattgtcaattcgcttttgccatcgaaatgcgtgtctactaaagcatcgaaacgtggcgaaagaagtgccaatttgaggccgagttgagcatggtcaaaaagagggaaaaggtccatccaaacgtcgttgcacacccagctgaaacaagcaaaacatggccgagaattcactacttcggcacccatcgaatattgcaagagacggaacaacagacaaatgtcaatgacatggctctattcaagattttgaatctatttccgcaatttttgaaaatttctaaacgaaaaatggaataaaataaaaactagagctcgacctggaccttggtccaggcctggatttttcctgggcctggatttttcctgggcctggatttttgtccaggtaatccagctccaacatggaatccaggtccaggcttttttcaaaaaaaaactgagtaaatttttcaatgccaaacgctcattaattgccacaaaatagccgttttttaagtttttacgagagtgcggcgcgggacgggatcctgcgcggaattttgcgggatcccagtccgcaatcccgcatttgttgggaaatgcgggtttgcgagattttgagggatttatacctgcgggatcccgtcctgcaaaattttgagttcaaatcccgcagcggaatccgcaaatttg

SEQ ID NO: 27426 - DNA, 1505 bp, Heterodera glycines
ttgttgtgtctcaatgtctggacacacaataaaataataaaacacaatttatgtcggaggtcaaatgcagtacaaatgtaaaatagcaaaacgaatgttagaaggaacaatgtggggaaggaaggattgcttaaataaacaaaatgaataagggggagggatgacacgtcacaaaattaatcaataatcgatgcgcgccaaattcaaattctttaacactccaacacctcccttctttaagctgaaccctcaggggtttggcgagaagcggaccggcgctttccgttggcgttgcgatcgacgctggaccaaaggaggactcggagatcgtcgctttgcctgagtccgtcgaattggtgccggttgcggaggaggctcgcggattggcgatgggtcccggtcttggatacgtcggggacttttccaatctttcgatgaacgttccatttagccaaaatctctttccacggttgaaattcaaaagcaaaacgggaacagctgagttcgaagccttcgaccgaagaacaattgatcgggcgaaagtccgttgagtgccgaattcagggttgtcctgtaggcgagaagcatcttttctgcccaaaattttccatctttggcgcatttcttcatggccctttgaacgtatcgacgaatctctccgcttggccattcgattgcgggtgatacggcggggtgaaggtatgcttgatgccaaattcgtcgcaaaattccttaaattctgcggcatggaattgagttccattgtctgacacgatttcttctggaaatccgagtcggtagacaattgatcggaggacatggagcgttgctggtgtcgaaattcggtccattcggtataattcaggccattttgaaaatgagtcaatcaaaatcaaataggagtggccatctgagcagggaccggcgaaatcaatgtgaatgcgttggaatggtcgtgagcaagacgtccatggagcgagcggtgctttgggtggactcttttgggcgctctggcaatcttcgcattgcctgaccatacgctcgatttccaagtccaatccgggccagtacacgtgctgacgggcgagggctttcatgcgcacgattccggggtgtgccattgtaaagccttgatgatgcgttcacgaagttgggacggaacgatcactcgctttccgtagagcaaaactccatcaatctctaaaatttcctttcgcttaggaaaataaggtgagagatctggttcggtgcacttttgaggccagccgtttttggtgtaatcagaaatttttcggaggacttcgtcttttggcgttcattctgaaatttctgcttccgtaatcggcaattgatcagttgcagtttggaggatgacgtttatgtagcaatctgtctctgtgcagatatttgctatcaaaatgtcttcttcgggccggggataattggcgattaagcgggacagtacatcggcttgtctaaaggatgacgtgttgatgtactttatg

SEQ ID NO: 27427 - DNA, 2238 bp, Heterodera glycines
  unsure (1)..(2238): unsure at all n locations
cattttgatcatttaaagtatttttagaccaaaactttgaaatttgaatttttgactttttgttcgaatttggctccaggattcagaattggtcgaaattgatgccggattcgtgaccagcgttactctgaaaacccttagaaacatgttcccatggtttttgaatacaaattttttttcaaaaatgttcgaattcgggttaggggttcgtaattggccaaaaaggaggccggattcatactctgcagccaaaaacacccctagaaccgtgtttttggaatttacagaaaagtttcaaaaagaaaaatttcgggaccagtaaaaccatatgattgccgaatttttcattttattatacaatgtccaaaacaaaatgcaaagttttcagcattcatgagaagtgcggccgagtccgagcggttggtttcgcgccggacatgcaaattgtcagcattcaacaggaggacagtgtcattgtaaggggaagtgccaatgaataattgtcatttttattcagccaaaaagccaatttattcatttcgaatgtcattctttttattaaaatgaccaataaacgaagtgctgtttttacaggaatttgtgctgctgcaggagggcaaagttgtgggcacttttcggcacaattgcaccgcaaaaggcgccgttgtgctcggcgtccattggctgtccaactcccaagtcgcttttgtcaccgacttgggctgcgagttcttttgtgtgtacgcgtacaaacgcacgctgaaaatgacccaacggttagccatggccatccattggttcagcttttatgtgagcacaccgaacttttgtttttggatccataatttaaaaatgggccatcataagcacatcataattttgaacaactttttctgtttcggatgggtcacacttaatctcactccttcctatcgtttctccccagaaaactaaaaaattggtaaaactgaattttcaaattatttatataattttcttgaaaaacgttagaaaaaattatgtttttttaaaagaccgctaaaaaatgtcttataattttcttagaaaatgacgggcgaatgacttcatcccaactttaggtcttgaaattccaattataaagtacatattgccacatttttccaggctccctcaaatttgtttgtttgtgccagcggtgtacagaacaacctttttagtttcgtaacttttcaggtgggacaaaacggagaggctaaaattgaaagcatttcaatttagcaaaatgttccgcacactttgggcacggctgaggttgattttggctactcttccgcaaagccccgtctgtggagcgggacattgccattgcctcaatgtttgtgagcaaccccgagagaatgtctttntaaaaataaatcactgttttaaaccccagttatggcaaactgtgcattttggtgctcaactttgagtccgtccacgggttcgccactggactcagtgtgtacgaattggtgccgtcggggccacagaagctgctgaaactgaactgtttgctgggtttgcacttggtcggcctggttgggctgcacgttgttgacaatttggtgctggtccatcataaagtgagctgaaagtctttattctcccatgacacattcctactttttataaatcctaaaaagcatattgtttatttgtttggagtaatgtccgatttgttcattgtcagaatgtccaatccactctgatctttgatctaaaactgtgcaccgatcgtccaatttgttcaacaaaactttgtctcccatctgtgccaaatgcgttgtccagtgacagtgtcaatgccgacgatggcaatgaaaacaaaagtgctggtgatttgccacacaatcaacagcatgcaaatcgtgttttatcaatcggtgatgcttttctgtacaattcggcttggaaaatgtgcatgccggacgttgtggtggatttgcaatacgaattgttcacccgtgtacagcttcaactggagagtgccgaacatgcattgacgggcgaaggagggcacgacttggtaagataaactcatgttgtaattacacgccaatttcaaggattttctcatacgctttttaattaatcggaggaatggcgagaaagtgctgcttgaattgcttcagcgtgccattttgcacaaatctctccaattttctcgaattacgcaaatattccgtcaaattcttccggaaatccaaccgaaaa

SEQ ID NO: 27428 - DNA, 1418 bp, Heterodera glycines
tgtcacatggtcagcgccagcctggaactccaactgtttgaccctttcgtaaatgccggccaacatgtttctgaaggtattttaacgtatttttgaattactggaaaatttgttagtgtaaataccgacaattgtaaaaatttattgttttgcctctaaaatcattttaagtcgttcggcgtcaagaaatgcgccaatttgcatgaaaaaaacctgtccatatgtcgtgcctcctcaagtcggtacaaattctgcacaaattcgtccaatttcatccgtctcgagtccttaagtgacggcgtgtgcaaatccgtgttcagcatgatgacagcaaatgccaaaatgtacatcgagtccggcgtgtccaatgcgcacagtctgttccggttgcacgcaacgtaatgttgtgcaaaggcctaaagatgaagaatgtcaaagataaaaaaaatgagactgtatttaattaatgcgagattttgttgtgaatttgacaaaaaaaaacaaaaattgaagcaagaaaacaacaatcccaagctgaaacagcaaaatgttttttaggttaaacattttaaaattgatcaaaagttttgattttgagagaaccctcaaaattcatatctccaaaattgcaataaaaaaagcatttgcctgaataatgtggtcaattttttgcgcttccaatggaagtcgaatgtgtttgagcaattgccgaagtgcaatgtcaatttccatgtcgtacattgaaatttgttcgatgaaacaactttaaatgtgcaaaaatttattggattctaaattagttcgcaattttcctcatttcgccaagagttttttttaaactaactatggttactgaaaaaaatttgtaaaaatgtactttagcacggcggtatggaattgtgagcgcaatgtgccgaggtactcgccgatcatttgtttgctgatcccgcgccgttccatgaacaacagtgccaactcccggggactgttccgtacaaagccccaactgatcagcagctgaacgccaaggtccggcgttctataaaaaaatagattttaattcaaaaagactattgaaccctcatttatgggaaatttattgtaaattagtgaattgcacattaattaaacggggggggggggggtcaattcctcctctctaatagaatttttacttgttaaaaaagttgagcgcaattcggtagagtcgacgccgttgctgttcattccattcgacacgcatttgcatattcgcgggaataaatctctgcaaaattaaagtgaaattattacattgtaaatgaagtggtgagaaaatttcaaattttggttattttaaattccattcaattcgacaacccttaaaccgttgaaagacagttttaaaatatagataaaattgttttatgttttattct

SEQ ID NO: 27429 - DNA, 2201 bp, Heterodera glycines
agtagcgccttgctaaaagcttcttttttaacaaaaacctttatttttctatgaaattttttctacgtgagcaaaaaagtaaaatttttgaaaaccccaaaaaattaaaatttttataaattatttggttttaaaatttcttagaattttcctcattacaaaagctttttaatttggtttatattgacagggtttctttcacaaaaattttttgttttagtaaattttttgaaaaattttcttcgggggagggggaaggctgaagtgtacctaaattgaggtgtcaatattcacgtaacttcacaggtttcccgttgacttggaatgggacaaactcttcttcgcctcctcctctgatgccattgtccgtctccgttgcaatttctggcagaggcaccgaaaaatgtgtggtggtggtggcccgagtgccgtggtccatccgccgtgcaattactatgccatttttgtgccatcgagcggcgccgttctccacaaatttcctcacaaccatccacaagaaaaagtgcggaagaaaaaaccattcccagtgttggtctccgtttccctagtttttgtccaattttccggattccattttttatcaccccatacatttcgcgcaaaatttaaagttttcttttcaggaaaatacacagaaattggacggcgattgtttcgcagcaaagcattctgatcagcagcatgtggactttgatcggatgctgaattggtggttgcccgacggttggttggtgctcgcccatttgcacaatttgtcggatttggttggtctgtgcctccgtcacacacttcggcacgtacagcccaatgatcaccaccatctccgcttttggcatgcgcttcaatcgttgtcttcaacgccaatggacaacaatttcggctctgattacattgctcacttggaatgcattttcaacaatgtcgaaaacagctcggcattgcaggtgccgcaaaagacgacgacgacggcatcattacggtgctcatttcgcgcgttattttcgcgcagacggcaaacggttggtgaggcatcgattagtccaacattttgaaaacggcactgagtcctcgcaaatttattagaatttttgtatttcacaaaaatacattaaatgattgcttactttactttttcaccaatttttatttatttatgggtgactcaccgtaatcaatttcacttcttcacccgtgtttactgtatgtaaaatctctcattattgtgtttttgttttgcaggtgtactgtagtgcagtgggccataatcatccgctgatttgtcataatggagcagcgcaacttagaaagaaaaaagattttacaccgcaaccgccgattaaggtgtgtgacagtgacggattctgttccgtgatttttagcagtttctatgtcccattatggtacttaaaaaaacaattttgctatcccgttaattctcagaaagatgatttgagaaagctctttttccaataatttaacttttttatttactggctttttggtctcgattaagaagcctggataaataacagcagttcaaataatttaaaatattttcaacagcttgaacgtagcgaatttgacgaggaaaatgaaatttcgccattcaaccgccagcaacagttagcgcctgaagcgttcgcttcggttgcgcgtccgtgccacaacaccttgcgcgtgcggcatgcgttggctgatgcgcgcgcattggaatgtgccggaatgtcgcacaaaaaggcggaagtttgggtcagcgttcacgcgttcaaacggatgatgagaaaagcggaaaagaatttgaaagtgaagaaagaggagacgaacgcaaaacaattcgccaaatgaatcaattaaaatggcaacaaaaagcatgtgattgattctccttttgtccaattaaaaatgccaatacccaacttaaatcatttaaataattatattcagcattgaaaaataattgaaaaaataaaataaattatgataaaaaccgagatttatcaatgatggaaaataatatttaatcatcataggaaaagctaaattattatttttttcttagtaattttatgtttaataagtatgtcttttaaggcttaaatttattcccaaaaaatttttattaaaaatcttttgaatcaaattagggttttacttcttttctgcttttatctttttaaatt

SEQ ID NO: 27430 - DNA, 1660 bp, Heterodera glycines
  unsure (1)..(1660): unsure at all n locations
cacactggtctgaccgcatgcnagcgcaaanagcggcacactcgtcctcaacaaatatttgttgcgatgaaacggccgaggcattttttgacgcaattttgacgcatgacaaacttcaacaaccgcagcagcaaccgcttcagcgtacgtgcacgacaacgtcaacaacaacgacagcaaagaggcagttgacggaggacgagcgacagctgttagccgacgtgatcgtctccagcatgtttggcacgtcgagcaatcaaacgaacggcgaagacgctgcaacaaattcagctgcagcggaccatgctggtggcagcaacagcacaatacgtcaggcggagattgacgagcagcagcattacgctgcaagcacaacttcatcatcgtacgcctgcacagtctcttccacgtccaaacaagctgatgatgcggttggtccaggtcaattgtccactcatactagtgctttcactgctgctgcatgcacttcgtcaaaaattcaatgcagcgctggctttacacttcgtgcttcaggtgctgtgaagggcgcttttattttttttttgaaattacacgtacgggcatgcttttcgcaggtggcgtgtcacgccgtttttcggacccattgttgcgtcagcgtggtgcaagcagggacgaagagcgtgaatgcaggggaaagtcagttttttaacaaattaattttaattttttcaataaaatagtgttttttataaacatttgttcaatatttccaattttttgttaactaataatcacaaatgcctcaaatcaagaccataatttgtgtgaatttttataggctaactaacggcttaaaattcaaataaaaatgcactaaaaatgatcatttttatgcgaaatcttttttctatcggtattaaaaaaaaattttatttggcttccctttttgctgttttttccatgatactctttcaatttgtttttaccataaattattaatgccaatcttccatataaattaattaaagcgcaacaatttaaatctttttttttgtggtaaattccaattaaattttaacagtgacatcgctgcaaatgccagccaattttcggcggcaattttggcacaaaatgccgacacgctgctggaggcaggcaacaaccgcatgagatgggaggaaacggacgacgaggagggcgaggaaattgagacactcggcgacgatcggagcataatttttggtgatcagggtgagtgtgacgagcacccattacttttgttgtttgaataactaatgattgttttttcaagaatcacttgtctatctaattatcagacacaatcactttcaatcgcttatttaatgctgcttaggctatttgggattgaaaaaacttaagtttgaaacccgattttggacattggcgcaaatgtcgggtaacagtgagcacaacggcaattaatcaataaattcaaaaaactcgtcccccgaatttattanaaatttccaaacagaaattttgcaaaaaaaaaaaaaatactttatacaaaaaattttcatgaaaaaatgtttttgcaatttttctaacgatttttcaaaattttattataaagtacttatttttagaagaaattttcaaaaaaaacgggtgaaaatttttttcaactttttttccc

SEQ ID NO: 27431 - DNA, 831 bp, Heterodera glycines
cgcccttgtattttggttaccccttgaaatcacatagggcgctgggatttttaacacaaattttttcccggacccgtgtaactccagtcggagctgtctgaccttcactagcttgccctgctttccgtaatggtccaccacgggttttgttgactccacaaatgtgtgcagtctgtttttgattgtctccacgttgtcatcacttcgtccacgccccatcagccgcttgaccagcgtttcatcgttggcctcgaaataaatgaccaaaacgggcgattggatccaaaaaatttggcattttgtagaaaattggcattttgggagaaatttatgggccaacctcttgctcaaagcgttctccttgtgtcacttcacgaggataccctaaaaggttaacatctatgtacttgttgaggagaagtgacaaaagtatgggcgtggggatagactggggttgggtcatttctgtcccaaaaatgaaaaactaattattttaaaataaaaatatttacacaaattttgtctttagaattatttatatttatgttattttaaataatttttaaaaatttaataatcataattatggccttttgccatatttatacaatttttttttacaatcaatgagaaaaccattcgatgattctcgctttttgagcatggccgccttcacaatggcaaaaactgtgccctaaatgcatttctttattaattatacaaggacgtgggtataattataaattatataaaataattacacaaaatgtatgtttaaatgatcgaaatttaatttttttaaaacttattttagaaatatattcacgaata

SEQ ID NO: 27432 - DNA, 1017 bp, Heterodera glycines
ccatttgtccattttttggcacttttgtccccttttgttgtccatttgtccccatgtgtcatccatttgtccattttagtggcactttcgtcctcttttattgtccatctgtcaattttttgtggcattttcgtttcgcttttgtcgtccatttgtccccttggcgactctcccccaattgtccgccatcatttcctattcagtcatcagtcattgtgtgttctgtcctctctccatttcacttcactacggagtagtacaacaacagacgcagcaacagaggcgggatcacaacaacggccgaagtggagccggcagcagtgaatcggtgagacatttgttggcatgacactttggggagtcaatggcaacacgtataatgggaactcgtacaataaaaatttgacagaataaagccttaagcctaagccaaaaaatgtgggagttcggactggaatcctgctaaatcccgtatgggatcccttccgctccgggctctactaattaacccttcccatttgtccaaatttgccatgtaaataattccaaaagcagcaacagtctggacgaatcatttgtatatagcaaatatataatagacgacgatgatgtatatcaaatcaaatacattcgaaattaaagctatgctgtggtgggtaataataataatataaatcctaaaggaccattataatcgggaaaccatccaataatcacattcataatcacagagcaattagtcgtcctcactgttgatcggcttcttcagaatggcatccatcatcttcaccgtttcgtgatagagcgtttgttcgttgccggcggcgggcgacgcacggcccgcgtaagtgaggccccggggctgacgcttcaggaagaaaaggaagcgccggtcctcatgcttcagcaaggagaggaagcgcggctgcacaaacgtccaggcgcccatgttctgttttgtggtggcaaaaagaaaatgaatgtgggacggacaatgagagggaagggggggggggg

SEQ ID NO: 27433 - DNA, 1719 bp, Heterodera glycines
aggaaaagaaactaacgaggattcccgtagtaacggcgagtgaactggggaagagtccagcgctgaatcgcagctcctctgggttgcgaggtgtagcgtatagaccgtgagcttgggttggcccgcttgttcaagtttcccttgaccggggctccagagaaggtgcaagacctgtccaactggcggtgcctatccatctttacgtgtcttggagtcgggttgtttgggatcgcagcccaaatcaggtggtaaacttcatctaagactaaatacggccacgagtccgatagcgaacaagtaccgtgagggaaagttgcaaagcactttgaagagagagttaaagaggacgtgaaaccgatgaggtggaaacggacagagctggcgtatctggtctgcattcacccgtttgttgctgtacgttgtactgctagcctccagactggggtttgctgtccttctgttcagtggcgaatggggcatttgcaggcggagtgcgctgagatgctcggagtagctgcgtgagctcggtcttgaggccagccttttggggtctggtacccggatcgggggagtgctgtttactctgggtgaattgtgcaatggtttcgggtccgtgttgactcgagctgggggtcggtggcggtcgcgtgcgacacgtaccagcaaccagttcggtccagctcgggctctcacttgtgcgttctcggtgtaaaagccggtcatctgttcgacccgtcttgaaacacggaccaaggagtttagcgtatgcgcaagtcattgggtgttcaaaaccccaaaggcgcaatgaaagtgaaggcttcttacggagctgatgtgtgatccctggcactgcggtgttggggcgcaacatagtcccgtctcgatcgcatgcgatggggcggagacagagcgtatgcgctgagacccgaaagatggtgaactattcctgagcaggatgaagccagaggaaactctggtggaagtccgaagcgattctgacgtgcaaatcgatcgtctgacttgggtataggggcgaaagactaatcgaaccatctagtagctggttccctccgaagtttcccccaggatagctggagctcgttaagcagttatactcggtaaagcgaatgattagaggacttggggacgaaatgtccttaacctattctcaaactctaaatgggtatgaagccagggttgctttactctgaacccaggcgttgaatgtttgagctccaagtgggccatttttggtaagcagaactggcgatgtgggatgaaccaaacgtggagttaaggtgccaaagtgcccgctcattagaccccataaaaggtgttggttgatatagacagcaggacggtggccatggaagtcggaatccgctaaggagtgtgtaacaactcacctgccgaatcaactagccctgaaaatggatggcgctggagcgggccacctatactccaccgtcattggcttgtacacgtgcttgtcgcgtagtctggccatgacgtgtaggagggtcgtggtggttgcgttgaaggctttgggcgtgggcccggccggagcttccaccagtgcagatcttggtggtagtagcaaatattcaagtgagatccttgaagactgaagtggagaagggttccacgtgaacagcagttgaatgtgggtcagccgatcctaaggcaccggctaacgccgtaacacactacggatgacga

SEQ ID NO: 27434 - DNA, 1176 bp, Heterodera glycines
aaaagggcgatgaacggcgtggaaagaatgacttgctttccacaaatttaaaattgaatttttgtctttaaattttcaaaaaaataaaaatattcctcccatgccaaatgatctattaattaattaattaaattatttaattaattgctctgatttggtttggtttggcttcaccctgcttcttccgctccttcttctgtctctgcttttgctccttccctttcctccgatccctcgggctcttccattggcaaaatgaatctgatcaggtccatgaatgcctttgtgtgtccgtctgcggactccactgaatttgcctcctttttccacgcatttgcgctgttggcaaaaagtgcgaacaaaaaaatggcaacaaacggaagagagggaaaaatggtggacatttctttaattgcactaatttattattaaattgcttgaaatgtgaaaaatattagtttttggatttggttcgcccattgtgccgtatccgtcgcttttccgtctcacaaatgccctccttcccccctttcctttccccttttatacccccgtccctcccacttttccttcccccctttttgttttgaccttgaaccatccgaccggacaatgaattcagtccattcgccttttccttccttccgttttacttctccaattcatttcacccaattttttgcgctattttcagcaaagaatggaaattaatgaaataaaagcaaatgacagacgaatggggggaaaagcgcagccgaaaattggggtcggacgtaaagcgaagcgacaaaagcacaattaatcacaacacaaaacaaatacaaaacaataaatatattaatggattggaaatgaattaatcgctcttttgttggaggtaacacggcattttaaaatgggcaccaaacaatgctttaagagaagacaacgtggcacaaatgccaatgagcagagcaaaagctaaagtttggaatgggcagattatcatatgtttatttgggttttattttatgtactcacttattactgtaccgtacagtatcccttttgcccacagaatgaatttgctgaaattgaaatttacaaaagtcattccaaccattttttgatgagaaatgcaaacctttgcctttgttcgttcatttcgtgagaaaaatggaaagaacaaaatgaaaa

SEQ ID NO: 27435 - DNA, 1270 bp, Heterodera glycines
ctcctttctgctcacccaatgtcatcgtaaaggcggaagaacactttgttcaaattggcatccgaattttcgtccttcttctgctgctgtttctgaaccgccgccgcagtctccccaataattgggcatctctccaacagccaattgaattcaccagtgccatccttcgtcagtgtcagcttctcatttgtcacttcgttcaccaattcaaatggttcaattggcattggttccacacgaagataaaattgaatattgtaactgacagaagtggtggcacggcgaaatgtctaaacaagggtccatcgtcagcaattccatcggggaacagaccaacagaatcgattgaattcaattgatcaagatcagtgagaattgtcggtgaaatgcggcgacgcaatttgtccaaatcatcgccatacaaaaagctcaaatgccgaatgcttttcgcaaaaagtggccaaattatttgcttgttggaacgaagaaatgtgagcacagaatggtcaatgtaactgaagaaatataaaaattgctttaatatatacaaaagtctaaaattacttacttaatccaaaggctattaaagcgaattttggtgggcagcggacggtcgggaaatggaaatgccacgcatttgtcatcgatcagaacagacagtttcgcttttggtccttcgtccttgcgaattgtgattgttctccaaattgtcaattcgctttttccatcgaaatgtttgtccaccaaaacatcgaaacggtcggaaagcaatgccattttgaggccgagttgagcatggtcaaacgatggcataatgtccatccacacgtcgctacaaagccaactgagattcgtaaaaaaatgtatgggtaaatgaaaattttgtaattttaaaaaattccttaccgtcgattcatttttgtggctcaattttccctttttccaattgattggtgtgtcaaaaaaggcaaggcaaaactctgttgttatgtaacttaaaaagagagagttgggaaaaatgagagagcaaaaagaacgcaaaaacaattttgaaacagaaataaattcatcacattttttggcaaaaaacagacggagtatttgtaaaaaatattatttttttcaatttatccgctcaatcatttttatgcgtccaattatgtaccgtatatgctctaattatggcccagtctctattaataccgcagtctccaattatcccccccccccttgaagaacattggccccgaatgattgaattaaactgata

SEQ ID NO: 27436 - DNA, 1716 bp, Heterodera glycines
ccgacaaaattatgcaagatcacaaaagatgaaagtgaaaatgaagaaattaaatttaatatagactattattttattgacttcatcttctgaaacaaaacaaaaaaaaattactatttctgcgtttctgatttttggcgccgaaacgaccctggcgccgaaacggcggcgccgaaacgaccctggcgccgaaacggcggcgccgaaacgaccctggcgccgaaacggcggcgccgaaacgaccctggcgccgaaacggcggcgccgaaacgacccgttcccatttccttcaacttcacttcgccaacatttgctcgcgtacatacatacacatattgattttcattcacatttttcttctcgacaatattcctttgtttttccgtaattttaaattaaaaaaaacatttttaatcatttatttttaaaatttataaattaaatttatatgcattcattaattaatagggattccttttttaggcacaaaaaacgcaaataggcaaataaaaatttttattttgtctatatttcattgcaaatgaaagtaatttaaatatttcaacttttttttgaataaggccaatttttaaataaaaaattttatcaagaaaaaatttctaaatttagaggatcaatttcttggaaaacttttttacttcttaggcgtttattgtaaatcttaaaattattttatgatatatacgcgacgcattttacaataatagatttcaattaaattaacctgaaaatggagcaactttccgaaatttatgcaattcgcgcacttttgcgtcattattggaagaagggcaccaatgccgaggagacagtgcgcaaaatttgtgccgtcgaaggaccaaatgttgttgacattgaaacggcacacaattggttcagtcggtttgagtctggccacctaacacttgaaccaaagaaaacaatgtaaaattaaaatttatttttacgaatttgtacagaattttgggtaaatgtcaaattttttggcagcctatatctggattccatgttggacctggacctagatttcctggacaaaaaccctggaaacgccaggtccaggaaaaatccaggcttttcgaggcatggacctgattttttaaaattttttttgaaaaagcaaacaaatgttaaaaaaaaatcaattaattgctttggaacatataaaaatatttaattgaaaataacattttgtttttaaattttttaataattttttgaaaaacttaaaaatacatcggtcagatgaaataaaaattctaaaactttgcccaggaaatcaagcttttttcatatttgacatggatctggatatcctggataaaaatccctgaaaatccaggtccagaaaaaatctaggatgccgaaaaaaagttatccattgcagttggcttcccagcgaaacttgggacgaggtgttcaaatttgtgccattctctgacttgcaccaacacatccaaatgacttgccaacgtttctgggcactgtctgaacccattctcaacagactgtgcccacgtgtcgcaaaacccataaaaatttgttgggaaagcgaagtatgaaaaataataaaaaattattattatttttttaattggctaccaatcagtcgttaagttaaagatcaagcttttttagttagctaaggcagctagaggatttataaaacaataaaaaaggaatattattaacttt

SEQ ID NO: 27437 - DNA, 1576 bp, Heterodera glycines
cagttaaatagtaatttttgtctttcggcctcgtatgggtctgggttttcagtaccggtctcaggtctcgagaaattcggtctcgagcatcacattacggcattcatttcccaatacccaaaatgcttaagtggtccaaatttggattcaatcgccttagattaatttcgaatccaccgaaaaatttgtttctcagctcaacggtttattttatgtttggccaacgctttttttgcatcgagaattgagataagggggaaattgtgtgagaacgaagcggagacggcttgtggagggtgaatcgaatgaaagaatgaataaatggaagtgaatcatcgccaacgccaaagcggggaggggggggggggaaggcttatcgatggaaaatatttttaaaagaatttccaattttgtattgattttaggatttaaaaaaaaaattatgtccacttccccgggcttgggtttacgggtggctcagcaggaatactatgtatgtgagaaatgattaagctgaggaaaatcgagaaaatgcgtcggaaaaccgagactgagaaatgagtaaagaaagacgagaatccatagagattttcaacacgagagtcgagcagagattcaattttcagttgataaaattcaacaaaatggtacgatttggcaaccatttactcatcataaacagttttgattgattctgtcatttatttaaagcagcaggtattgttagtctatttgtatgtaatttttgtctatttttggtgtttttttgtgaaaatggacacaaaaaaccttgcaaaattggacacggaagaaagaaaggacaaacaaaaagcctaaaacataaaatatgcaaatttttttgtgcaaaaggacgcaccataaaagggagaggggggggggacgaaacggaagagagagaacaaaatttggggggggggggggggttttattttgttaatagctttacaatttttaatttgcttttcccaactgattgacaattagcacaaaatggatgaaacttttcaattttatgcaaaaggccgttgattttatttactgtgaaaaggcaaaacgaaaaatacctgttaatttatttaatgagtttttgggtcttttaattaattgacaagagattaaatgaaaaaaaacaaattaattttttatttaaaaaacaaaatattccaaccattcttaaacaataatgtctgcttcatcgacattttttctgcttttttccttttggtgccaactctaaacggttaattcattaataactagtgttgctctcggggtttttttttgggtcttggtctcgaatctcgggaaaattttcgttcttagcagcagcactgtttctgcaaaaataaatgaatttgagaaagaattgttgtatattatcaatttagtttttattttgtacatttcagcgcttagatgctatgacggcactgaataagatggccgcggggtaataaaaaaggtgtactgcccccccccccccctcaacaaccatgtgcatgaaatatgcgtgtgtgttgacaggtaaaattcaaagttttttttgaacacagaa

SEQ ID NO: 27438 - DNA, 1313 bp, Heterodera glycines
ttttttgggattttctagaaaaaaattgtataaaaaataagaaaaaaatgttttaaaaaattggggaggggtgaacagaaggtaaccgttattattttttacattataaatggttgataaaataagctgaagcacttactgatttgtccagcgcttgcttggcattttctcgggtgaaccgatccacaaaaatgcaatttgactgaaatagaaacggtccaattttatttaattagggcaattagaccaaaataaacggaccaaagtggcaccgatgttgaagaatggcacatattgcaacgatttcttcatcatcacagtgcatttagatggccaaaacatggagagaacgtacaggtccaaagtgctctgaaaagcatgcattttgaaattaaaaggaatatttaatgtcgggtacacttccttccccccaaatttttttttaaaattttcaacctagaaaatttcaaaaaaaaaattcttttgaaaatttctcaaccgattatttcataattttaagatgaactactagaagggtgatggggatacggatacttttcaacaaaaattgccaattttgtggattttcgaaaaaatttagccaaattttttggaaaatttgtttaacaaaaaacacgctttgtctggagagatctttgggcgaggggggagaggggtggggggattagagttttcttagagattaataataatgtcccacctgatggttggaaatgatcaccagtgggttctgttccgtgccgccgctggcgcgctcaatgcgttccgcgccgcgcacttccaccgtcacgtccagccaaaaggagcagaagaagttgaacgcggagaaggcgaacacacagccctttgaaccgaaaaaattggataatttttcagtgctggagaaaatttattttttatttttttgaaatttgaagaattaattcggtcccggatttgtgaatagaccaaaatgaatgcaatattaatagccaatattcgcgacccgtgtcccaaaaaaaccaaccagaaattatagtagcaaaaaatttttttttttttttttgccaaaaaagaggaggtggacggacctcaccgcgtcgattcacccttttttaataagaaaattaaaaaaaaattaactagaaaaaaaactagtagtatttcatcataaaattcgaaggacaacatttttttttcataaatttgtttaaaaaaattaaaaatttttcgagggggtgatgaagtaatcacacgcattaataacaataaaaacatgaaaccctatacttcgttggcccagaaagtgaaca

SEQ ID NO: 27439 - DNA, 1883 bp, Heterodera glycines
attttaccagttttatccggtccccggattcttaaattggatcgagaattttttccccgaatttacaattggcccgaaaattaggaagtaagacccggatttaactattcaaatttaaccccagcaggtactgtaagaacccttagtccctaaagctccgggattttgagcccggttttgggtttcccggaagttgcggaatttggtttaaacctatttttggctcggttcaaaattcgaaaaattcaaagatttgacacttctaactttttttaaaacgatcgaatcctgataaatttggtatcatccgaaagcttttggggagctaagtctaaaaagtagtgaaaaattttcttggatgttttaatttcactgtctattaatatttatacttttggtacggaaatggctggtatggaaacggcggcatggaattgaccccaacccgtatgtttggttatttttttgggttttaggctttttaaaaaggaagaaaaatataatgttttaagctgaaagattactagagattaagttttaatcgaattctaaccatcaagctaaatgtacacatgaattcgaattaaagaaaataaaataattttgttttccttcccccccaatttctgtcattaatttttcattcaaaaatcagagccccacactcttcagtgtttttccgagttttaagaaaagaaaatggcagagattaaaattccgcaaataaaaaattatcatcgcaaaaattgtcataccgtctgtatcaaaattataaaatctttaatttcttattgtgtccaatttccgaaccaaattaagatgggactaattagaatttcctcttaaatgccgaacattttcttgaagaaaactcagttctggtcgtttgaaataaaattgattatttcaataacaaatataaattagcacagcaaatcatagcatcagtttctcgcaaatttgggccctcttaactttgggtcgccattctccgcgttctccattttgaccatccgtgtgcctgaaatagaaagtgcattttaaaattcaacttaaattaaatttaaaaaatggctgacattacaaaaaactgaccaaattgcatcgcacgcttaggccgctgcacaaaacattccggcacgcccaaagagcggagggcgttgcgcaacaaaaatttgttggcggtgccgtcattggtcggcagtccgaagccggtcttcaacgcggtcggcaaagtgttcagccagcagaccaacggctcctcaaggaacggtgccctgaacgaagatgatgatcgtttattgaaagcagcaaaagggcatataaaaggctaactcacagaaggcttttgccattcactgtgccaattcggtcgtccctgccaaaattgcgtgctccgatccgatgcatttccatggacaattcctccgcaactccgtccaatcctttgctaaagaattttcagtaaatctgcacatttttagtggacgaacaacaaacaccttttgaaaacagtttggtgccgagcatagccacctttataataacaaaaataataattaataataataataataaatttccaacgaaaaatagatttaaaaagagcgaaaaaatcttttttcattaaaagatttaagtgattttatttgaatgcaccgagttgttcatcagagccggagccaaccaaagcaaattgagaagggcaaaggctaaacgaatagacgaagaattaatgaataatttaaaaaataaattaattaattttcgtgaactataattttggtgagctattaatcacatttgttgcccagtttcgaaatcgatgcctttcattcgcgaaacgaaccacaaaacacagccaatggagtcgtccaacacct

SEQ ID NO: 27440 - DNA, 1288 bp, Heterodera glycines
acgatgaccgtgtcgaatgtgctggtgttgctggacacacgctcaaaatgcaccaactccacttcgtcaagtgtgacaacaaatggaggctaaaacggaaatgaaaatgccaaattctgttctcaatattcagaaaatgaacccattctgtgaggtgcaccaaacatgacgaggtcggtttcagagaaacggtggaccgatggggggcaccgatgaacgacaagtcattgaacggcgtgtcaaagtccacctgctcattggtcatccgaaacactttgtcacagaagttctggaaggccatgttcagcttcttgcgcatttcgcgttccatcttaagcatttattaaaaattaaattcaaaacgtaagattttgcaattaaatattaaattaaattgcctgctcgctctgaatgtcgtccctgtcttgcatgtgatggtacttgcccaagtcggtggtgatctcgccaacttcagtgaagaattgcacatccgaatatttctttttgccccacagcaccggattctgtgtgaccaatcgaattgatcaaaaatcaaaaagaaagaccttcaaatggaagtgcaacagaatgatcatttcgttgtcacacggctggaagaaggcgtgcttgatgttgttgtacatcacctcaattttgtcgccgcgcaacgacgtgtaacggaaaccgttgacatgtgcctcaagcgtgccactgatgcgttttgcgatgatgttcggtcgcacgtacaaatcctgaacaaagtcttggatgtgcatttcaacaatcatttctcaaatccccccgttcccggatgtcacacctttagcttcgggtttcccttgccgttggttgaaatgatcagtttgtcctgtttgaccgcgccctccttctcccgctcctccgcttcctgggtgcggaatcgcttttgcatctccttgatcagtcgagcggccgtctgcaaatttacgctgggcgtctcgcgttcgcccggctcgcgcacattgcgacttttgaaagtgctgaaattggacagacaattaaactgaagaacacacacacaaaaccacgtacagttccttcaaatatttggcgaatgcgttgggaaactgtgcgctctctttgccaatttgggagccggggtgggtgaaattgatacgcaaataggtgaagtcgccctcattggtcggctgactgatgtttttgatcatcgaaatgtgaaagggcgtcggaatgccaaaaatgggcacaatcactgtgtcgtggcgtttatctgtggaaattggcaatg

SEQ ID NO: 27441 - DNA, 1034 bp, Heterodera glycines
ttctctttagaaagagttacattttttaaatgacagattttcgcatgaaaagaagattcttaggggcgtattttccgtttttggtagtagagggaaataattcaaatatttgcaattccctctcttgagctctttgaccccatattgattttttccccattcattcatgccctcccttcttccatcctcattcattgtgttattttccttcctattttgtgcttccccaatttgctccgtccctccgacaaactctacgacatgcgaaggatatcagacgcgccttagcatgaaataaaatttgataatcaattgaaataatagtgaatgaaaatatcaaatattttatacgaattaatggtaatagtttagatggtatgacaccttttttgaaaaatttttcaaaattttcaaaagtcttaaaaacatgtttctaggggtttataggtacgctgagcacgaatctgacatccatttcgaccaattcccaaccccggacccgaattcgaacaaaaagtcgaaaattcatttttcatcaaaattcacattcatgcaactaaagcaatacaaatgcacgaaaagacgcataaagatatattttgcgttctcttttatgtttccagcttattaattaatatggctgcgttggaagcgtttcggaatttctcgctgaaaaaattgcacgaaaaatttttcaaaaaaggtgtcataccatctaaactattacccgcgtcgctttgtgcggagtgtcgccgccttttatttggtcggagttctgctctgcctctttctgtccgttcttttcttcggctttttgctgcaacggattattccccttccgagcgtaaaaccaataaaaaaaaaacaaaggaaaatgccatcggagttttgtcggctttaggtcgccaaattgccgcttttcttcggcgtatggcctttgtctttctacgtttattatttgctgtggacaaatttcggtttgattttgcgccaatacaaattttacgccataatttatttgctgagttttaatt

SEQ ID NO: 27442 - DNA, 1593 bp, Heterodera glycines
cctctctctctcccaatctctctctctcttactctctcttacctctctctttatctcttactctctctttcctctctctctctcccagtctctctctctctcttactctctcttacctctctctctctctctcctagtctccttctcgctctttgtcgaaagtcatagcaatacaagaaaatatcacagaatccgctccccattgacggttactgtctctaagatggcatatggggaaatggtggatacggtggtgcatttgatgcagccggcgcctgaattatcccaccgattgattgggttggatgagagggattaattggaatccaagcggacgaacaaaccgaccagtgcccccccccccctcctgcaaattggttgttgtggcgttgctcttccgtttttagtttatttttttttgaatttttgtccaaattaaactcgtcccctttcggcttttcctatgatgaaatccctgtttccgagtctcgacatccctgatatttcccactccaaacaaaatctcgacgacaaaatctcgacgaaagggatgtctctctctctctctcccccattctctccaactttgtcctcaccactcacttttgccattcgtcgccgcttttcgccgccaaatgccccccaggggacacatttttgggtgtggccaagtgcgaagaatggcaaagatgggaatggatgggctgctggatgtgtcaccaagggcatccatttggacggcgtaaaaagaaaagtcgcctcggggggggggggggggcaaagattgcatttgtttttggtgcgctgcgcgttcattggacgaattgtactggtcaattttgctccattcgttcttaagaccccggatggttttcagtagtaagtggatgaaaacttaaaaatgcaaattcaaaaacggcgtcaaaaagtcgaaccaatacctgtaaatttatgatttaataaataggggtcaattggtttaacatttattatgccaatatttcaaatttgtccacaaatttctctgggaaaattaatgtcacccgacaataccgtaagccacgggaaaagagacttgcccccccccgcaatcccctccccccaatgtataaaaccccaagtcgacgattttgccactttttgacggtaaaaagtgccgtgcgacactttgaagggattttagcgccaaaatttgcaagtcattgccgggaaatgacaaattacccgtcaccggagggcatgccgataaaatctccgcagaaagagtggccaaaggcacatttcaaggaggaagggagccgcaattataataatgggatgggaaattgagaaaaataatgcaaaaaattacaaaattaataaaaggaaacattggttctattgtaaaattttaaccatttttgccaaatgagcttctatgccgagatatgacgtgccaaactttttggcattttataattagaaaagatatacctaattatttcaattttcataagaagccattggtgcagaggttgtgagttagtcaaatcctttttaagtcataggttagaatcctctgcgtgcatgtatatattttataattttgatttt

SEQ ID NO: 27443 - DNA, 994 bp, Heterodera glycines
tttttttgcgttttcggggcagtccccctgaaccgatgcgcccagatttatggggagaccgaatccttccggaatagcttcactatagcctgtactttaattctgcgttggatttttgctccccataattgtttgagtaccccaaacggacacttgaaaaaatcgatttatttttgttttcggggcagtccccccgaaccgatgcgcccagatttatggggagaccgaatccttcgggaatagcttccctatagcctgtactttaattctgcgttggatttttgctccccataattgtttgagtaccccaaacggacacttgaaaaaatcgatttttttgttttcggggcagtccccccgaaccgatgcgcccagatttatggggagaccgaatccttcgggaatagcttccctatagcctgtactttaattctgcgttggatttttgctccccataattgtttgagtaccccaaacggacacttgaaaaaatcgatttttttgttttcggggcagtccccccgagccgatgcgcccagatttatggggagaccgaatccttccggaatagcttccctatagcctgtactttaattctgcgttggatttttgctccccataattgtttgagtaccccaaacggacacttgaaaaaatcgatttttttgttttcggggcagtccccccgaaccgatgcgcccagatttatggggagaccgaatccttccggaatagcttccctatagcctgtactttaattctgcgttggatttttgctccccataattgtttgagtaccccaaacggacacttgaaaaaatcgatttttttgttttcggggcagtccccccgaaccgatgcgcccagatttatggggagaccgaatccttccgaatagcttcctatagcctgtactttattctgcgttggatttttgctccccattaattgttgagtaccccaacggacacttgaaaaatcgatttttttgttt

SEQ ID NO: 27444 - DNA, 1334 bp, Heterodera glycines
  unsure (1)..(1334): unsure at all n locations
gctttttctccatcgctccgacttatccttgacgcgtcaccgataattgggtgtcatgtgaatgggcttttcctcaggtggcaaatcgacacggccaatggcaaaagaaagtggaggaaggaattggatgcggaagcggaggagggggcgaagtgggaggaggaggagaagccgtgggatgtactcgacttaccaatcattggaaaattggaggtgggcaccagggactggacgttcccaggatttcggcttggggggggggtaccccactttttagcttgcttttcgcaccactttttttgcggcgcactttttaacaaaaatatgtggtgatcaagggggtccgcggtgccgataggtgctgctaggagggaaaatatttacccgtgcctagaaggcattttgctgccaacctctaaataaatgtgtcataaatttcagatttggattaatgaccaaacgtccagaaaactgctgcaaaagtgtctgatcagtgccgtcaacaatttgatcaaaacattggaaatcccttttaatgcgacgaaacaattcgccttccgcgtccgagtttatggcgatgaatattttgacaacaaatataccgcaagtctgaagatgtgcagcatcaaaacattcaaagcgcttaacccctagattaatgaagaaaacattttgaaatttcgttatcattttcatattaaatttgtaattttattttagtaataatattattggctttgaatcataaataaattattaataaaataataattattttcttaaatttgcttaaaacaaacactttattctttaccgctaacaaaacaaccagatttttgaaagaaatgttggtaccataaaaaactgttaattgccaaatgaataattactatagcagaccaattgacctgtcatataacttgaacgaaaattaatgtgcataaataatatcgaaaaattgattaattaattaaatttattttttcttttttaattttcaaattttgttaaaattatgtatgctaattgacaaaataacaaacaaaaccctagttggaaaaccaaaaaataaataaaacgaataaaagcagagcagtagcaatttttgtttgtgatattcttttaggaaatgataataaattgaaaatcccttcgaatattttataactacaagataaacttaattctattagtagagctcgcaaaaaaaggcaccaaaaatcgcgaaaaaggcactaaaataggcaccaaaaaattgaaaaaaggcatatgcctcaaaatgcgagctctatctattagatataattttaagataaaaaaaatanataaaacat

SEQ ID NO: 27445 - DNA, 988 bp, Heterodera glycines
cgacagaaacaaatggagagacggacacctgctgagaatggacggagaaaggacaaaattatgaaaaaaaacttcataaaaaacgccaatttattaagtaagaaaaatgttttgtactaagaaaccgtggatggtcattaattggacttaacattaattgttggacgcataaaaatcgattagacgcataaattaataatagaattattgatccattccactgttcagagaaaagtaccatctctttttacaaacatttttcggttttttattctcctcatttatagatacataatattcccttttagttaatctaatttaatcctaattggcaacaaatgtcagacaatccctgcaaagtcgaaaaacaaatggcaaaagcaatgtaattttgagtctgtatttttatgtttaaattcatcatttttccgtttttcagcttcatctccggcgacggttggctggcggtgttccatttgctcccgccttctcaacttggccttggaatcgcactgatcagcccccgatttgaccactttgtggacgaacatttcaaaacgcgaaaatgggcattgggcaatatacgaattcgaagcaaaattggacagaatggcacaaaagaaatggaaattataaattccgatttgaaattgctgccaattgcgcaaaatccgccgccaaaaaaagtcattggattcaacagaatttcgataaggtaaaattgaggaaatgaaatgattgttgggtaatagtttttttgctagttaaaaaaaaaatctattttagaacataaaaatggattttgaaaaattcaaatttttgacttttgtcccgaattcgggtccgggggttctaaataggccaaaatgaatggcatattttatgatcagtgaccccaaaaatccttagaaatatgttcccacgacatttttaaacaaaaaaaaaagaattttgccaaaaaagggggggagcatctaaaaaattactg

SEQ ID NO: 27446 - DNA, 1185 bp, Heterodera glycines
ttgtgctttcctccgtctgatcagcggataaaatgtgataggtgcacacctgcactttgcacccgtcctccggatcaatttcttcgctctgtcggcattttttttttaatttttggcattttatttgccattttcaaattcaaaaatgggcacctcctccacactgagcaacgtgccaccgtccatgtccatgtcggcgaggaggcgaccattcaaagaacagctcgaatttgtcggcatcagcagcacattctgatgcgactcggtagaatgaatggggggcggaggctaaaaaaataaaatcaaaatcaaaatatttttgatttaaaataattttaaataaaataatttaaaaaattttaatatttatttactttctctttgtcgtcattgttcagcccattggaatgttttgcagcagccacaagcatttttgttgagaaaatattttgtggtaaagcttttttaaaatcattttaaattaattttaaataaaataaattaaaaattattttaaatgcatttaaatgaaatgtttttattcatttgtgtgggaaggaatgtaaaaaaacaaagtgaaaaaatgagtgagtcattcgcttctcttcactttacataaacacatcgaaacatttatttattgaatgaatgaaattgtgacgacaaaacagtgatcagaccggaaacaaaacgaatttgtaagaccatttttcgaatagcggaattttcagtccgtccaattccgggaagcaaacgaagtccaaatcatgatcatggactttgtgtcatgatttcgagattcgattgggcatctcgtttaatagggggatgctcgtgatttttgagacgacaaattcatcggatttttaggatatcggtctcgactttcagggataatatttctcgcttctcaaatgagaaattcctcggattttcggggaccttggtcctaaatctcgggaatcaattctcgatctctgtcttgtaggattttttggggttttcagtaccgattcgcgggatcaatttgtcggcttcagtttttcagtcggataaaattttgactctatgacaaacgctagtgtgtttatctacaaatcagatggccgtgaactgctcgaatttgatctcggacatgcactgacagtcagtccatcatcaaatttaaatcataaaatggaaaaa

SEQ ID NO: 27447 - DNA, 850 bp, Heterodera glycines
ttgctaaactttgcacagtcaattttccatttttgtaaattcattaaatcgtcaatttttccttttttaaaaaattccttaactatatttccttttttctaaaaattctttaaatcgtcaatttttccttttttaatttctttaaatcgtcaatttttccattttgttttttgccagaaattaaattaaatgcatcaataaatgtccgtggggaaaaacatgagagcaaagaaattcatttttaatgcatatgtatgcaaaaaatcaaaatttaatggcaaaaacattgctaaaaagctgtctctctttgcttggtatttatttatatacaaaaagctgtttttacaaataaatttttttactaactcgagactgaagatttgcgcccaaatactcgagagcgagaaattaaaaaaaaatttcaactaaaaaacgacctctcaaatttggcttttcacaaaatttactcatttttgaaatgaaaggtgtcaaaaaactccgattttgagattacatccaagattgaatgaggcattaaaacatccatccattagtactctcggcattacattttcgagacttggactctcgaagaaaacgggtcacatggtcagcgtaatctttggcctgctgatcattggcataatatttttcatttccaccaatacatcagtcaagtcagtttcacactttaatccattccttcaccgtttcacaaacttaacaacacaccgccgcacaaaaacaacaaaaaatgcaattcccaacctcatcatcatcatcattaataattcatcataaactaaacataagtgattacatatgtatcccaatttaatatatttttgtg

SEQ ID NO: 27448 - DNA, 709 bp, Heterodera glycines
tttggccctgacctttttgaatggtcatagcgaatgcctttcttgttgggaactgcaaacgctcatattttatgccgccaggcgatttgtcttcatagacatttcgtgttctttcaagaaagaatctcacttggccgccaatagcattgctattgataacacgaccaatgaggcgatcatcgccaagttcttccagaactatgcgtgtgccattgatcagtccttccttatcacttttattgataagaaggacgacgacgcatccgactttaagccggagactgtgcgggggcatgcccgagtctgtgcgccggttcaacgcagccacttcggactcgatctcatcgatgtccagtgggcggtcgtcaaggggcttatccgtggacaagtattcccgcacttgacctggcacattcgccatcatgatctcgttgacttcatcacacgtgtcaatgtgcggagcgagaatcaaacgattgagcaactctttgtcattgccaaggagttgttggaagttaggatagacataatctatcagctcttccttgctcttaacgaggaactgcggaggaatccagaagtgctctccggtttctccgagcccgatttggcggcacatttgcaagtacgcttgctgaccttggcccagtctctggttgatggtcaatttcatcgtggtgaattgaccaaacaacggagacgtttgaaa

SEQ ID NO: 27449 - DNA, 1836 bp, Heterodera glycines
  unsure (1)..(1836): unsure at all n locations
gataatttttctagatgttgtttcatatctcaatacattatttatcgcttttaaatgaatgggaaatgaattgtcagtaacaaaaaaaatatnttgtgaacatttataacaaaaatttttttagcattttctaaagaggctttttgacttcaatcataattatattgtcaattgtttgaaacgcatctgttgccgttggaaaaggccgatggaaaatttttcggcttttcgcgaaaaagttttcccagaaaatggcgtgggacaaataaaaattgtacttttattatgagcaatatatatttcctatcaatttcgggtttgctttacacgtttgccaatgaaaaaatggagttttgtgaatgcaaattttaacagattttctttcgaagtgtcataagcgggttgtttcgggacaaatgcaaaccaatttgatgctattcgaatgagctaggcgcgctctaccctttcatttgtatcaacaaagggtctaccgccactccctggcgagatatggccagtcaaagcagagtgggtctaataaaacaagaatttttaaaattttcggcatttgcccttatttcgagcctgctctacgtgtgcttcttttgccaatatggccctgctatagaaatcttgtaatggttcacgactaagtgatgaaatatttttagcccatttcttttctatccaagcatgcgaattgtttattgcattttatagcattctggaaaaagatagtcagtaaaaataaagcttgttttaggaatatttgagtatatttacaacaacaatttttgggcaatttctaaagatgaaggaaaataatttttttatcaatattttatattaagttatgtttttgaattgattgaccctatcaaatgaacagtgatgcagttgtaaaatttttcggcttctcgcgcaaagtttttcctggactgtttctgacagattgttgagataatttttctagatgtttgttcatatctcaatacattatttatcgcttttaaattgaatggaaatgaattgtcagtaacaaaaaaaatattttgtgaacatttataacaaaatttttttaagcattttctaaagaggctttttgacttcaatcataattatattgtcaattgtttggaacgcatctgttgccgttggaagaggccgatggaaatttttcggcttttcgcggaaaagttttcccagaaaatggcgtgggacaaataaaaattgtacttttattatgagcaatatatatttcctatcaatttcgggtttgctttacacgtttgccaatgaaaaaatggagtttgtgaatgcaaattttaacggattttctttagacgtgtcatgagcgggttgtttcgggacaaatgcaaaccaatttgatgctattcgaatgagctaggcgcgctctaccctttcaaatgtatcaacaaagggtctaccgccactccctggcgagatatggccagtcaaagcagagtggggctaataaaacaagaatttttaaaattttcggcatttgcccttatttcgagcctgctctacgtgtgcttcttttgccaatatggccctgctatagaaatcttgtaatggttcacgactaagtgatgaaatatttttagcccatttcttttctatccaagcatgcgaattgtttattgcattttatagccttctggaaaaagatagtcagtaaaaataaagcttgttttaggaatatttgagtatatttacaacaacaatttttgtgcaatttctaaagatgaaggaaaaaaatttttttatacatattttatattaagttatgttttttgaaatgattgaccctat

SEQ ID NO: 27450 - DNA, 814 bp, Heterodera glycines
cagcgtctgcatgacgatcttcaaaggacaatttttgaaagaaaaacaactagccatcgtacctgaatgtggttatgagcgaaacgaccgggccagtgtttttgccataaagtaccttgattggcgctcaaaaaaagacggaacacgcatacagcacgcaggaaatggacttgaaaagcgttggcggcaatttaggctggacggatggattgaggagcagaataagtgcattgaagtgttaggctgttactggcacggatgcgaacgatgtttcaaacctgacgaccggctggtggacggaaaaacatgcagagagctcaacgaattaacccagcttcgcctactaaagttgtgtgaacctgggtcaccagacgatgcgcaaactggattgaccattgaggcaatttgggagtgtcagatccgagaacagctctcaagggatccggagatgagagatttttttgacgatctgggaacggatcggggaccaattgatccacggcaggcttattacggcggcaggaccgggccattgcagctgattgttgagccaaaagaggatgaaaaaatatctgttttcgacattatatcgttatatccgtgggtcaattattccactaactatccggttggcgttccgtcaataatccacccgaccgctgaggagatgattgttgactggacacgagctgaacaattacaatttcgtggaatttaccgggtccgcgtgatccctccgcggggacttcgaatacccgttttaccgctcaaaattgacgaccgcctcctgttctgctgctgccaccgttgtgcc

SEQ ID NO: 27451 - DNA, 1336 bp, Heterodera glycines
ggggttaaaacttaaaaatgcatatttttattgtgttcgttgtatcaaaaacacctccaagttttgcaaatttcgaaaaattctcattaaaaaaaaagaaatgttcgcaaaaaaatgacgaaaatatttattgaaaatgccaaaatgacgacgaaaactcaaatttttcgtgttttttggggtgtaatttttaaaaatttccaaaaagttgatctttaggggtgtatttttcgtttttttttcatttttcttgtgaaaatttccaaaaaatggccaaaatatggactaaaaacccaaaaatggcgaaatatggatttattcccgaaaacccccaaaatatggatttatatggactaaaaaccttcaccaaatcaaaaaattttaacgcagaaatgctatttttaagcccctttcttcatagcatatgcgcagaaaaaatatgttaatccatataatttacaaccctattcattaaacttggctcagactaaaccggccagactaaactgtcccccaccccatcataggtcgtctgaaattccattttcacaaattccattatccattttaaatttttttggctatgacgcagcatggacatgcaaaaggcagccaagttcaagccgagaaacagcctcaagagctggacgattcttctcgaatggaattgtagtggagaagcgcaaccgtcggaacacatgaacaaggataatcttcagctccaaagtggcaaatcgattacctgcaaatttaattattaatagtttcgagaatttatttttatgatttatcccattaaaaattttaaattttcatatttttgacagttttgaggagtttatttgtttgttcggacctgttcaaaagtgccatttactaatcgagttttggggatttcggtaaaaatcagttacggtaattaccggtttttaccgttactgtaacagtaaattaaggactttttcatgttttagctcctccacaccagggatgggctttcgcgtttcgctttcgcatatttcgcttttttttttgtactttcgctttcgcgtttcacattttggcacgaaacgcgaatattacacccctaagaatgagggatgagttgccctaaaattttcagaatttgataaataaattgactaattttcagtgaaaacatgtttaaaaatggtcaaaatttccaatttctcccccggcggcccttatcggcacagccgcgccccaaaatctcctatttttaatagtaaaatgacacaaaaacgcaaaatttggtaatttttttagtgaaaatctgttaaaaaattatattcaaattttcaaaatttttcccggc

SEQ ID NO: 27452 - DNA, 912 bp, Heterodera glycines
agagagtgggatttatttcgtggctattgacttttattattgccatggcatatagaatatgcgaatacgtaagaattggcagagattgggttttatttcgtggctattgacttttattattgccatgacatatagaatatgcgaatacgtaagaattggcatagagtgggatttatttcgtggctattgactttattattgccatggcatatagaatatgcgaatacgtaagaattggcagagagtgggatttatttcgtggctattgacttttattattgccatggcatatagaatatgcgaatacgtaagaattggcagagagtgggatttatttcgtggctattgacttttattattgccatggcatatagaatatgcgaatacgtaagaattggcagagagtgggttttatttcgtggctattgacttttattattgccatgacatatagaatatgcgaatacgtaagaattggcatagagtgggatttatttcgtggctattgactttattattgccatggcatatagaatatgcgaatacgtaagaattggcagagagtgggatttatttcgtggctattgacttttattattgccatggcatatagaatatgcgaatacgtaagaattggcagagagtgggatttatttcgtggctattgacttttattattgccatggcatatagaatatgcgaatacgtaagaattggcagagagtgggttttatttcgtggctattgacttttattattgccatgacatatagaatatgcgaatacgtaagaattggcatagagtgggttttatttcgtggctattgacttttattattgccatgacatatagaatatgcgaatacgtaagaattggcatagagtgggatttatttcgtggctattgacttt

SEQ ID NO: 27453 - DNA, 1005 bp, Heterodera glycines
gaaaaatttttttccttctctttagaaagtgtcaaaaaatttttgtgtttaatattcagaaaacgtgtttttttagtgacaattttttttcaagagaaggggatatgaacaatcacttataaggctcatgcttggagataaaggaatcggaaaaaaaattatctcaacaatcagtcgtgaaacagttcaataattcggaagcagtgccatattgggaaaagatgcacaagtagagtaggctcgaaataaaggcaactgccgaagattaacaaaaattcaaatttattggccccgttctgctttgacaggccatatctcgccagggagtggcggtagaccctttgttgatacatttgaaaatgtagagcgcgtctagctcattcgaatagcatcaaactggtttgtttttgtcacgaaacaacccgctgatggccacgtcgaagaaaagtcccaaaatttgacatccataaaactccattttttcataggccagcgtgtttaaagcaaacccgaaactgataggaaatttaaattgatcataatagaagtttaatttttatttgtcccatgcattttctgggaaatcttttcgcgaaaagttgaaaaatttcaaaacggcagacaacagatgcatttcaaacaattcaacaatataatataaaatttaggcaaaaatttttgttccttcctctttggaaatggtcttaaattttgcttgtaaatattcagataacaagttttttttactgaaaattttttacacactacaggatgaaacgcaataaataatgtttgtagacaaaagaaattggcgaaaaaaattgcctcaacaatcagtggtgaaactgaaagaaaaaaacttccccaaaaaatcggagcttttccgacggcatcagctgcatttccaacagttcaacagtataaataaatattaggcaaatgaaaaatttttttccttcctctttagaaactgtctaaaaatttttgttgttaatattcagaaaa

SEQ ID NO: 27454 - DNA, 1378 bp, Heterodera glycines
  unsure (1)..(1378): unsure at all n locations
aaaaaggaaaaaaatgncagtcaaaaattatcgattttctccaatttgtttccatanttcngaaagtattcggtatcatatgccaaaacaaaacgaantcgttttanatatcctttctgactgactggttttcttgatatcgaagctgtttctacgctattctaaaacggttataccaaaccccagattttgaatccggttttcagaaaaaatgccttgtggtgaaaacaatatttcacatttcactccataactttgtgagttcggcacggatcgagaccgggataagaccattggaaagagcagctcgagctctacaagaaggtatggaaagaaaaaatagttatttctgggactttttcagaaatcagaattaattctccaatgtggcccaaattttaggcccccagccacagccccttgcttctcccagttttaagtcttggatttgtcaaataaattcaagacttcaaattaataatcaaaaattctcttaaaatttttttgaacccaattcaaaaaaggaaaaaaatttgcagtcaaaaaattattcgaatttctccaattttgtttccataatttccgaaagttattcggtatcataatgccaaaacaaaacgaaatcgttttaaaatattcctttctggacttgacttggtttcttgatatcgaagctgttttctacgctatttctaaaacggttataccaaaccccagatttttgaatccggttttcagaaaaaatgccttgtggtgaaaacaatatttcacatttcactccataactttgtgagttcggcacggatcgagaccgggataagaccattggaaagagcagctcgagctctacaagaaggtatggaaagaaaaaatagttatttctgggactttttcagaaatcagaattaattctccaatgtggcccaaattttaggcccccagccacagccccttgcttctcccagttttaagtcttggatttgtcaaataaattcaagacttcaaaataataatcaaaaattctcttaaaatttttttgaacccaattcaaaaaaggaaaaaaatttgcagtcaaaaaattattcgaatttctccaattttgtttccataatttccgaaagttattcggtatcataatgccaaaacaaaacgaaatcgttttaaaatattcctttctggacttgacttggtttcttgatatcgaagctgttttctacgctatttctaaaacggttataccaaaccccagatttttgaatccggttttcagaaaaaatgccttgtggtgaaacaatatttcacatttcactccataactttgtgangtcggcacggatcgagaccgggataagacattggaaagagcagctcgagctct

SEQ ID NO: 27455 - DNA, 1228 bp, Heterodera glycines
  unsure (1)..(1228): unsure at all n locations
atggacaacgacaattggaggaagcggaaaacgaagagtctgtggacgacctcgaccagtttctacacgactgtgtggcgattgacgatagcgatgttaattttgatgagacagatgcaagagatgcggaagaccaaatggaaattgacgaagaggacgacgatgaggagggagagagagaaacgaacaaccaattggacaatggccaaagagcgacgaaatcgaccgctaaagtcgttgctaacccggacaacctcaacaaactctttatgccgttgcccaaacttaacgaacagcttttacgtgatgaagttgacgtggaccaattggaacatcaattgacggagttggaaaagcggaagcggaaacaatctgttgccaacctgacattggtgctcgacttcttcgctaaggttgacggactgacacgtaaatgtgtaagactcattttagttgaaaaaataccaaactgagttcaaagaactcgccgccatcactgagcaacgcgatttacaccgggcctttcatgatcggctgaagaagcaacgcttgcacgaatttatggaaggattccgagagattgcgacagaattgcggatcacttatcagatgatcaccatccaaggagatgtatcacttggtaacgttcctccttttatttatttttttactgtttttcatccagaattggttgattcgcttgatccattcgccgaaggcattgccttcaatgttcgtccccccaaaaagtcatggaagcagatcaccaacctttcgggtggtgagaagaccctcgcctctctttcactggtgttcggtttgcacaagtataaaccgactccattatacgtaatggacgaaattgacgcggctttggacttccgaaacgtttccatcatcgccaattatcttctggtaaatcttcccactgtagcacattttttaaaattaaatttaatccgccgtcatttattaaggagcgtactcggaatgcccagtttattgtgatttcattgcgcaatcaaatgtacgaaaaggccaaccgactgatcggcatttacaaagtgcgtgactgcactaagaatgtggtcgtcaatccgtctgccatgagcaaggcttttgaacaggacaagaaacggaanagcaacccttaaccgataaaccattttccgatctcacttatttaactctttggttctctctttgcaaataaataatttttgacttt

SEQ ID NO: 27456 - DNA, 920 bp, Heterodera glycines
ccccccccccaactcatttgtacctattagtccccacccccttatggtcacactccttcgccctccccttagccattcccctcaaactctccccctcccccctccctccccgcgctgtccatctctccaaaactgctccaccgaaatgcaaataatcccacaccttcagctcccctccccccgccaattcgtttcgccaaatccaaaactcgtcttccatttatacgcccctcaatatcaatgcatttgaagcaatttcgcaccattaaattcggcaataaagcacgtgcatgtattgtacatacaataaaatgcagtgaatcagtgattgatggtcgaatgaacgaattgaattggatgaatgcttcgattggcaacacgcgcataacaaaattcgaaactataggaactgcttacaaatcagcagaagcaaatatttatccaaataatgaacaaaatttaatagtctttatttgctttttaaattatttgcaattatttaatcaacgcccctttttgccgttatcacagagtaccgccgagtcggcatgtccttttcatgctctgctttctgtaactgttgtccatccgttacgccaattatcactcatttatcatttccaattatctctcatctgtcgtgtccgtccctttttgctgctatttttggtgcgttcgttccgcacttttcttcgtccgtccgtccgtccgtttgccgtcatccattttctcacgccattgtttttgccgatccgtcgttgatcgcctcgaaaatcaaaatccgccgtcctcagttgttttattacaacaccacaacaacagcacataactctctatctctcccacctcttttttacaacccgacaaccattttatcttctgcgtctccccctccctccgaccgaatttccatccaatcc

SEQ ID NO: 27457 - DNA, 997 bp, Heterodera glycines
tccaagacttaaaactgggagaagcaaggggctgtggctgggggcctaaaatttggggccacattgggagaattaattctgatttctgaaaaagtcccagaaataactattttttctttccataccttcttgtagagctcgagctgctctttccaatggtcttatcccggtctcgatccgtgccgaactcacaaagttatggagtgaaatgtgaaatattgttttcaccacaaggcattttttctgaaaaccggattcaaaaatctggggtttggtataaccgttttagaaatagcgtagaaaacagcttcgatatcaagaaaccaagtcaagtccagaaaggaatattttaaaacgatttcgttttgttttggcattatgataccgaataactttcggaaattatggaaacaaaattggagaaattcgaataattttttgactgcaaatttttttccttttttgaattgggttcaaaaaaattttaagagaatttttgattattaatttgaagtcttgaatttatttgacaaatccaagacttaaaactgggagaagcaaggggctgtggctgggggcctaaaatttgggccacattggagaattaattctgatttctgaaaaagtcccagaaataactattttttctttccataccttcttgtagagctcgagctgctctttccaatggtcttatcccggtctcgatccgtgccgaactcacaaagttatggagtgaaatgtgaaatattgttttcaccacaaggcattttttctgaaaaccggattcaaaaatctggggtttggtataaccgttttagaaatagcgtagaaaacagcttcgatatcaagaaaccaagtcaagtccagaaaggaatattttaaaacgatttcgttttgttttggcattatgataccgaataactttcggaaattatggaaacaaaatttgggagaattcgaataattttttgactgcaaattttttttctttttt

SEQ ID NO: 27458 - DNA, 1676 bp, Heterodera glycines
tctcacccatccccggcgtggccatgccaatccgactgacgaccacttgcggaattgcccaccatgccaatttgcgactttggcccaacggcacaccatttgaatcaaccacttggacaccgtcaacaaactccctgcaaaaaagatgaaattcaaaaatgcatgcattttttttgtgccgcactttcgtcgcatcatcggaatgttgacacaatttgcaaatgcaacggccgcgaatggcacaaggcgaccccaaattggtggcattttctgtagaggaaaaaatttttcaaaaaatttgtaggcatcgctaaacaccgaccgtcgctgcatgattcagtcccaacgcaacgcccatcgctccacctacaatttgagaatcatagaacagacaggacaatcaaaaactggaaatttttttcgaaaaattttttttaattttcccacccgttgccatcagatacgcctgcaaaagttgtgcgccgctcaacgcatcgcccgaacggttagagtaattgacagtggcattgtacgtcttgaaaatgtgccaaaaaatttgggggaaaatgagaaattccgggcacttttgctgttggggccccaagaaaaaaaatcagaaaggactcttttgcttttttgttaaaataattcggaaaatttgtttgaatgcggtttccgaggttgctggctgatcacaatctgacatatattccaacaaatcattagcccgaactcgaacaaacagtcgaattgaaaaaatttcaaagtacaccctttggttttttcctggggcgccacaacagcaaaagtcgaaatttgttaagttttttttccacctggttaatgaattgccaccctacaaccgcaggagtagacctgtgaaaaattaacaattataaaatgcatcatgacaaaaaaaaacgggcgttgaaccgacttgtagaagctgagcatgccgccggtactaaaaaattttcaacaaattttggaaaaatggttgcaaaaatgggacggacatgatcgtattagctggcacttgtgcactcatccgtccgatcagcaacagtttttcgcccgtttgcggatggaatgccgagtcgtacagatgtttggcacgccataactcatcgacggacaaattgtcggagtatttgcctttcctggaaaaaaaatgggagaaaaatttatgtaattaatgtcatttttaatggagctttttggattaaaacaacagaggattttatgaaggaaagaagaaagttgacggataacaaatgaaatctcaattcccataagcgaatttcaatagtcaaaatttttgagagggttcgtccgcctaaaaacgaaggaattcatccagcgaagtaacaaaaattcttaaggattgaactcaaattcaatagagttttcaacgaaattttcaaggtagggttggcctgattaaaaaatccggtcatagaaaccttagtgtgcttttttcaaagtattttcgatgaaaactttttttggtacttttccattatgcggccacaccccaaaattgtaaagcgccagttttgtgcaaaaaattatttaggaggcataaaagccgcaattttagctaaaatgtcatcgaatgtatcgtcatcgtcctttaaagcacgcaaaaaatatttaggaggcataaaagcggggcg

SEQ ID NO: 27459 - DNA, 846 bp, Heterodera glycines
tttttatttgttcaaattttattatttcatttaaaaacattatctaaaagaaaaatggaagtgattaatgtgttacattaatataaggacaccttattttttgttagttcccatgaaccgatcgagttgaaattttaactgtacgtagcgattctgaaaatattaagattctaacagtgacaagacgaaaggatttcggaaaaaaattttatggatttttttttcaaaaaaggggtgttacataaatataaggacactttggaatactgagaaaagcctcaacaactacaaaaaagaaactgataaaacaagctaaataataaagaataaatcttttttcacatttctgtttattttgcgaacagaaatatatcttttagggagagttatgttgaattttctaagttttcaggagaaattaagggccaaaaggcttaaatcgcctctaacatttgcctaaccgaatcaaactaacagcaaccaacactaagataacgtacagacatcctataagcatttttattcactttatgccagaaaaaattcattaaacacaaaatttttgcgggtgaaaaaatacgaaaatctgagtaaattcgaaaaaaattctagggggttgggaaaaagtttccgtagaagatgaatatgacgaacagaaagagcacaaaattctctacaaaatggcctttggatgattgctctatggcaagtattcgctgacaaatgaggagcgtttggttaaacacgaatgtcgcaaaaagtaaggaaaatggctaaaaattggtcatttttgtggttgttgatatttagccaaatgctcctcagcggaaacgcggcatagtgccc

SEQ ID NO: 27460 - DNA, 1325 bp, Heterodera glycines
  unsure (1)..(1325): unsure at all n locations
tcaaagtatgctttatatgcatacagagagttagagcataaatctcgcgtcatgggacgctaatttttagttctttatccaagtcgaaccaatcatattgattgtagccacttgttcgtatttttgagcgtaacatatttattggtagcagagtcgaactttttaatggacatttcggtcaaagatagcatttatttaaatcaataaaatttgaacttgtatgaattntaaagtggaaatggatatcgcataacggattaagcggtaaatattcacgcacactagagctacttatagaaacattggtaggtggtaaggtaaaaatgggcaaggctgatgttatcgaattcacggactcttggtcgattttctttaaaaccatttttaatataaaccgccaaatatatctgatctctttgtctttttaatagctcttttaggaatagtttttcctacaattgtttttcttttaatactttttcttcttacacgagttccatattgccttcaatcccaccattttccgttaaattatgaattcctttcttgacttgactaattagagcgctctttggagattccccattcttgctggtgtctaaaacacgggaacctgttgccagtgcttctttacccaacaatgttccaatagattttattttagggagaatggctctccataaatatcgtaaaacatcacctacaccgccacctcgctggcgaccataacctcgttgataaggaggtactccatgaaaatggttaaaattctctcccataccaatctgctctaatattataaaatcatcgaattttacggtatttggatcagatatttgatgtaccatatttatacacttaaaattacagtattattattatcaaaaaatttcattcgcacgcttagattattttatctctatagatttcatcaattcattatgatttatacttttgttaaatgtcattttgattcatttgattgttcgacacactccaaagcaattgcgcatttacagcaaagtaaatttaaaatttaatttatgtaattttttaatttattaattcttatattaaaaaacagggcccgtatttatatttgctaaaatacgccaaatattgaatttttattttctaaaaaaaccttaaataattgcatttttaaatttaattgttctaatattaattaataagattctattgcaaatatgtgtgactgacattttattattaatgatgacacttctcttctgtccggtataatttatattaaataattagttcaatattcattaatattttagtatgcaattacgacgggaaaa

SEQ ID NO: 27461 - DNA, 1109 bp, Heterodera glycines
tctgggtttttttttcaaaaaattttttttgccaatttattattttaatagttagctttgggtattttgggcactttggtttcccctcctctgccccttcagggttggtccccattctttgcccccctggtcttgggggtccaaattttttttaaattaatttggtgtttatttgttacttcggacaaaagaatttaatagaaataaaaaaaattatttcgaatatttttttggtgattaaattgtgagaatgtttcaaaaatttaaaattttcaaataaaaataaatatggcattgtataaaatttgaaaatgagaaaaattcgtaatttagaagcagagaggaatcgattggtatatatattgtcgaaattccatgcgtttttatctgttggacggttcagtcccaaagccatttgcccatttcagtatcgggtctgtaactcttcagggattggttgccgcaaaaaaattctttcggattcttccattacagaccgagagctattgattgatatatatatcagaaaagaaccggtagccctaacaaaggagaggtacccaaatgacggtgggacttgcgaaccaaattttcagggaagaaaaaaaaatgcccattctgcaggaagggggggagggaccaatgaatgaatgcatcatcaaatgaacatgtgatttgtaatggaacagagaacaaaatgtgtgctaactcggtttattcatcaaaaaagcatgaaatgaatgaatgccttttgagaaaagaaaagcacccgcgcataagtcgaaaattcagatttttggtttccagattattggtcaaccattgtttaaatacatggaaacgaactgaaagtcatcagtgcttcaatgaaaaatcatttaatgtcagattcggatcacccaatgcaattagtgccatcataaagccaaatgaacacattgttacaattgttgttccaattttcatctttcttctgctgtagcttaaccgccgtggtctccgcaattttatggacataaaatagcaaaaatatggacataaattctccgaattgaggggtaaattttcaaaaatattcttcaaattcattaaattctattagaatacat

SEQ ID NO: 27462 - DNA, 852 bp, Heterodera glycines
aaaaatgtaacaaaacccaacacgcggcgtgcgagttcataaaatgcaactatttttagtcagtttaaaaattaaataggcataaaaccaaaaattttggttttgaaattttaatgaattttttaagaattgaacccatttgaattaatggaatgaccatgcaaaatcccaaaaatgcggcaaaaaccccaaaacgcgaaaacgccgcttttacacggcaaacaaaaaccatggcatggaataagcttacacatggcgggcactgtctgtgaatattgttaagtttcttcctgctcatgatcaatgaattgtatttttttttgtcaattaaattaaattaaattcaaaggcattctcaaaaagcattggtgtccaattaacggtaacaagtgcaatggaacaaaaatcaaatgaaacaaaaaaacgaattgttttttggccaatttggcccgagggcaatcttccgaatccgcgcaattcgcaattccatccgcccaaatatccccattctgaacaacctgtttccccccaaatgattgcgtgtgaaattagagtcctgtaattgttaaaaatcggggatgggattgggaatcaggccgggatgtgatttaaaatccaatttttggtccgggaaaatccacacgtcctatcccatccgggccctattactcataattggttagaatttctcaattggtgattttgatgtgatccgcgatttcaaccaattaatatgataaataaactaaatttatcatctacgccaattttttcattagaattctaagcgaaaacacaaaaaagatctgctaattaacaggattattacaaagatttttaccaacctagtcc

SEQ ID NO: 27463 - DNA, 1855 bp, Heterodera glycines
tgagttggacgtgagtaggggtgtaaatgtcaggtcaaaaaatcggaaaaaagggggcggtcgaaacgtcgcggaaaattttgacgaaaattaatatctgacaattgtttaacttaggaaagctcttaccaattcttaaaatatcgaatgttttaaagacacaatttcaggacgcgaccgaaatgaatacaattaacaaccgacagattgcgccaattccccaaactttgtcagaggcgcgtcagaaattgcgccagcgcccgcgcgtcaaattcaacgaggaggaggaggtgatcaacccgggtaagtggctgatcagtgattggattgacatttgatggctccgttgagtttagaagaagtcgacccgaacatcggccggttcaggtaacaaaagcattggacaaatggccaaacgatttacaattagtgaagggattaaataagttttgagttttattttcggaattacttattttgtcataaatacaccactgaatatgcaaaataaacctaaaaggcatggacaatcagtttttttggcccaaaatccgccgcttcaaataatgccttttgcgtctattcgaagttgaacttttccatccctctcttttgcaacttcattcatttgttcatgttttgaccatttgcctccttcccccagaaatatggttcggactgcggtcattccctcgtccaattcgaaccgccgtcagagggacgtggaggaccaattgttcgacttttacacgcccagcgagccgaaaaagaaaaaggtggaatttctgccctcttttttctgccgtgggtttgttgtgagatgaatcccctcttttcagctcctccaccatccgttgaccgccgcttcgcccgtcggtgcgcgttcctccctctccggcactcgcattggttcacttgcgctcggttcgctgactctcaacgcggcgcccgacttggaattgttggcgaaggagcctttttcgttttttaaacaatgcttcgtcagatattctcccgctttgccaccctccgcttctttgaacgccgttgcgccatcgaaatacggtccctcgcccgcagcgaactcttcggcacggcaattgctcggaggaggggcaaggggcggagattctggtatattcctgatacaatccaatggaaataagagcagctcgtcccctctcatcccccgatttttttttaatttactaaaaaatttcacaaaaaattaacatttttctagcgattttttaaaatgatgaattactgtttggggtggtgacgtaatgcacccactggactgattttgctatttgcaacttttcgcagttggcactgttccgtcggcagttgcgcctgacgaatgtccgctgaagaagaaatacgcgaaggaagcgtggccagcggaaatgagaaggcgttcgggcagcattctctgagcaaataagcaaatgaactcgaataaaactgcaaagtttctgcgaaacaccccattttcttctgttgttaaaattgtccgttttatccctcccttttcatctcattcattcccttcgctcattcttctccatttgtgtgtattttgtttgctatttttgtttgtttgttccattttcgttcgaataatttttgccgattaaattttcttttaaaattatttttttacagttcatttagaaatatttcagctccccccctgaaattttttttaaaagttgtcaagcttagagaatttctcgaaagaatcttaaattgtccaaaaaatcgcagaaaattttttcaattttttttttataggagtttgtctaccatttgtttttttagggaattctctcctatttttggatttttgagc

SEQ ID NO: 27464 - DNA, 1015 bp, Heterodera glycines
ttcggttttaattatgctgtacatgcttttaagccccgccgtgcggcggctccccgttttgtgcactattttagtttttaaaattggttccggactttttggctttttgaaataaattgtgaaaaatatacgaaaattattttagcttttaattatgcagtacaatgcttttaagccccgccgtgaggcgggacagttccaaaattttgtaccacattttactgtggaaagtccaagtaccttattggacaactacgtgtcaatgagcacagtcgcctttggccagttgtggaacggaaaaatgggaatatcagatgggggcgctcttttctaaaaattcctcttttcgtctaaccatccctcccttttgtgcactatttcgtttcaaaattgaatcattttttttggctttttgaaataaattgtgaaaaatatacgaaaattattttagcttttaattatgcagtacaatgcttttaagccccgccgtgaggcgggacagttccaaaattttgtaccacattttactgtggaaagtccaagtaccttattggacaactacgtgtcaatgagcacagtcgcctttggccagttgtggaacggaaaaatgggaatatcagatgggggcgctcttttctaaaaattcctcttttcgtctaaccatccctcccttttgtgcactatttcgtttcaaaattgaatcattttttttggcttttgaaataaattgtgaaaaatatacgaaaattattttcggttttaattatgctgtacaatgcttttaagccccgccgtgcggcggctccccttttgtgcactattttagtttttaaaattggttccggactttttggctttttgaaataaattgtgaaaaatatacgaaaattattttagcttttaattacgctgtacaatgcttttaagccccgccgtgaggcgggacagttccaaaattttgtaccacattttactgtggaaagtccaagtaccttattggacaactacgtgtcaa

SEQ ID NO: 27465 - DNA, 994 bp, Heterodera glycines
aagtgttcttaaagtgccatttaccgggttttaccatactctgaccgattaaaataccttaatatttccagtcttgaaaataggagaaaatatttagatctgatcacagccttcaaaattattaaacaagaaactcacctaaaccctctaaaattatataacatatctcaaagaagaaattcaccttttcccagattaatcactaaatctaaaattactaaaactgaacattcttttaccaatcgtaccacaaaaaatttacaagaattaagcaaaacaatcgacctttcatcaataaactcaattcaaagttacaggaccaaacttaaaaaactgttggagatctaggacatttccatatgtgtaagcggcttttgtccttcatttggattcttttatttgaataaatttgaatacataattcgcaaattttcttacataaaattagcatccctaatcattttatctacgcaatcgaaatgccttcctgttactaattatttatcataaaaaagattctccaaaaaattaacatttataatttattgaatttagcaaatgaaataaagtgaattaaataaaaatgccagtgataataaatcaattgaaatgggtagaattcatttcattccccgccaccctctctttcatttcccagaaaaataaaattttcttaaaaaaatagacaaacgattgaaaataaatgaaaaattttaatttttataaaaaaaacctataaattattattaatttattttattaaaaagggttaaaaggatcttaaacttttaatatataaactttctagttttagaactataagtttttcctattaagagcataccccattaagaaaaaaataatttcctccccctggaaaaaaactagaggtgtgccgtgactgaaaaaacccgtgaatcgtgatcgtgatccaacccgtgaaattcacggtaaccgtgaccgtgaccgtgaatcagggcacacctctaaaaaa

SEQ ID NO: 27466 - DNA, 1771 bp, Heterodera glycines
ataatttaaaggcaattaatgacattctcctcttaccactgtatctctccccaaaatgccgatgaatttttcgtacgtttcatcctccagcataatgccattgcggaaaaagcatccctccttcgtcacttcaatcttttttcgttcatcggcactcatttgctgttcattctcatcataaaggtccaaataacggaacatcggatgtttgctggcatttcgttttttggccgacaacttaaaaatttaatttaaaaataataattatattttacaaactaattaatttaccttttggtggtccagcgatcctttaacatcaaatttgtaagtgaaatccaatgcaaattgttgctgctgctcatttttaccactattcttttcatctttgtacttttctgggaacaaatttttggtcagaagaaaaaagcgttcttcacccggcacaccgtaactgttgtcctaatgaaattaaattttaaaaaaccttattttaaaaattaaatttagctaattagtgataaatccgctttcatttgcgttgcggcccaaaaatttgatgcactgtataaaaggagtaattttagtccatgaattttactccaaaaatgatcgataaatatatatatttaaaagaatttataaaaaatttgtctataaatataattttaaatattttgccctaaaaatatatagagataagcaactaattgttaacaatcggggccaacttttaatattttcatgcaaaagaacatttataaattggcatgaaattttatgaattttgatgcagttaaaaattattaaaatttgtttaaaaattattaaaatttgtttaaacacactttgatgccaaaaaatgcaaaatattttggcagaagagattgttggtgttccatttcaaatttcttcctccattctggcaaaatatgcccaaaaatgcttttcaaaaaagtcaatctccgccctttggccttgtttttttgagtgcttttctctgcttattcttcaacgtctccatgcccgtcttgacgtctttgatgaagaattgttgatcaaccgttttgatgaaaatgtccatgttagacaagcgaccgttgggatttgaaatctgatgaagtttgcccattcgcaacgatgtctgaaattaagattggcattgtaaaagagattatgccaaatattcataaatgtccgtggttttaaacttgtccttttttagagtccaaatcctaatccctaggaattgaaaaattcaaagttatcattattttttattattttttaaagccattattaattttgtgtacaattaattgttgcattggtaagttccataaatctgccaatttgctgaatgcttgcatgccgtaggcagtgaattcaaattggcgttttccgtcagcgcccaatgtgaatttttgacccaattccagcaatgtcggcatcggcattttgtattcaatgcttctacgactgtttctgtcctgcttgattgacggcacattatcatgaaaaactttgccaaaatcgatggtgctagtgatggtggataaagcgtggatcaatccttggcggatggcttcagttcggttcgtaaccgacacaccaacatcaatttggggtgacggagttgccaaaattgtgactagaaaaatgccgatgagaaacaacaaaacacggatgaatgaagaaggcattggaaatgcattataataatcataaaatgtcatttcaaaaagctaaaaataattaatttttatttaaa

SEQ ID NO: 27467 - DNA, 1956 bp, Heterodera glycines
gtgcgaaaatggggtttgacaagtttattggggacatttgactttacaaaataatacccctgggagaagggagtgggaaacatgatttcaaaattttcaattttttctagtctaatctactcaaaccggttcagaattcaataaaaataacattcacggtgcgaaaaaaggggtttgaaaagtttattttgaaaaaaagactttacaaaataatacccctgggagaagggagtgggaaacatgatttcaaaattttcaattttttatagtctaatctactcaaaacggttcagaattcaataaaaataacattcacggtgcgaaaaatggggtttgacaagtttattggggaaaaaaagactttacaaaataatacccctgggagaagggagtgggaaacatgatttcaaaatttttgttgaaatatttgtcgtgctctgaagggcgtgggagggggggggcgaaggcccaccacgaggccgcgaagaggccgagtgagtaccttcggtgcaggaaaattattaaattttaaaattttttaattgctttttaaatatgccaaaaaatgtaggcttaacttttttagtgaaaattcgatcactcatattttttgctaattgagcagaagcgtaccaaactatgcagggatactccccggtaaaggactaacttacactgaaatgagcgccgagctagctggctcaaaaaaaattttcgaaaatctgagtctttcgtttttatttattttttgcaaaattaattcataaatatttttttcagaaagggttctgaaacgcaccaaattttatttacaagttaataaggctctctgatgctttttctatcaataatggaggtgaataaaattttaaaaattttttaattgctttttaaatatgccaaaaaatttaggcttaactttttagtgaaagtttgatcactcatattttttgctaattgagcagaagcataccaaactttgcagggatactccccggtaaaggactaacttaccctgaaatgagcgccggagctagcttgctctaaaaaatttttcgaaaatctgagtctttcgtttttaatttattttttgcaaaattaaattcttaaatattttttcagaaagggtttttgaaacgcaccaaattttatttacatgttagtttaggcactctgatgctttttctatcaaaaaagggagatgaatgggggtgttaaaaagttttaattcctttttaaacaggccaaaaagtttaggcttaacttttttttcagaaactgatcagaagcgcaccaaactttgcagggatactgaaaggaagagaaataacctattttaaatattatctagtcagttcatttaaataatttttatccaaaaaatttttttttgggttttcggggcagtccccctgaaccgatgcgcccagatttatggggagaccgaatccttccggaatagcttcactatagcctgtactttaattctgcgttggatttttgctccccataattgtttgagtaccccaaacggacacttgaaaaaatcgatttatttttgttttcggggcagtccccccgaaccgatgcgcccagatttatggggagaccgaatccttcgggaatagcttccctatagcctgtactttaattctgcgttggatttttgctccccataattgtttgagtaccccaaacggacacttgaaaaaatcgatttttttgttttcggggcagtccccccgaaccgatgcgcccagatttatggggagaccgaatccttccggaatagtttccctatagcctgtactttaattctgcgttggatttttgctccccataattgtttgagtaccccaaacggacacttgaaaaaatcgatttttttgttttcggggcagtccccccgaaccgatgcgcccagatttatggggagacacgaatccttcctggaat

SEQ ID NO: 27468 - DNA, 1396 bp, Heterodera glycines
caaattcattcaatctatctcttttgttcaattttcaacctttttcctattttaatggtcctacctttttttgacaatttatcttacaattggagcgtttaattgaaaactaaggggacccttatttagtgttttcaaataagttctgaggtctacatcaaaagaattagtaaatcaatgcataaatttccgaatttttggttttatacattattttggatgtaaatctaagctaaacggatgtcttcagattccccacctcccctttaaaattttgttattttcgatgcaaatatagcctaaaaaattctctagagtcccctcccattttaaaatttttatagaaaattagcatttaccgctttcactcttttttcaaatcggctttatccctaattttaattgttgcaattaaattttaggggttacacatttccccttctcctctttcctctctgttgttatcacaacacaattccaattcgtcaacagcttcttcactcatcgacgagatgacttcttcaagatcggtgatcccttccacccccttttttcatccgctttttccttccctcctccccccattcagcgaacgcgtcgtgcaacttccaatactgcttcaactactgctactgctggccgtagacgcagccgttcaagacgccgtacacgtgcagaacaagtacgagaagcgactcgccgcgcgttacgtcagaacaacggcggcaacgcgaccaggacgaggaagaagcgcggggcagcgatgcgtcgtccgcccaagctcaaaccgctccgtggaaggccgaggggatcgcgcaaatcgagggcggcgccgcgcactgctggacaaaagcgtggccgtggacgtccgaggaccgtgaaaaaaggccgtgcccgacgggggaggagcgctgcccagcggcagacgacgacgactgcggatgcagccaccaacacggacgcgcactgggtaactattgcggagttgagggcggcgaccaacactgaggtgaccgctgcgactactccggcaacaatgacgacgaccgcggatggcgctgtggcgactaacactgacgcaaccggagcgacgactgcgacaacggacgcggcgaccgctgcgactactccagcggcaacaacgaccgcggatggagcgacggtgaccaacgccaacgaacccggtgcgactacggcgaccaacactgaggcgcccgctgcgactactccagcgacaacgacgaacgcggatggagcgacggtgaccaacgccaacgaacccggtgcgactacgacggctgcggcgaccaacactgagacgaccgctgcgactgctccagcgacaacgacggcgaccgcggatgggacggtggcgactaacactgatgcaaccgga

SEQ ID NO: 27469 - DNA, 1029 bp, Heterodera glycines
tctagagtccacgctgaaaagttatattgactctctttctgaattgacggtagaacttcgaatcgaagccaatgatgggcttacggagcttaacaaattacgaaatcgtgcttgttgccaacctttggacaaacatcagagttcgcttgatattgttgccaggtctttttaacccatcaatcattgtttgttggcagatttcagctgattgtgagaattcaacttttcaggtattatgaccaactttgcgcgatggaaacgaaactgccaataactccgacacagaatcccgtcagctttaagtggaaagatgcctttgacaaagggtcgctgttcttttcgcgcgcttcgctcagtcagtttttgtctctaaaatctcacatttgttattcaattttgatatttttagctcttaacgacagttctttcgaaagggcgtgcgttctctttaactgtggcgctttgatgtcggcaattgcttccaaccaacagacgaacactgacgaagaactgaagacagtggcgcatttgttccaacagtccgctggcgttttttccaaacttaaggacactgttctcgcttcggtcttttcggcaaaataattctcctttaaagccaaacttttaaacaggtccaccaggaaccgacttcggatttgttgcccgacactttaactgcgctccttactctgatggttgcgcaagcgcaagaagccatttatatcaaagcggctaaaggtcttttgcattaatttgttaaaaaccagaaaactttagacaagctaaagtcgacttctctgcttaaaatagctgcacaatgcgcggatttctatcaagatgctcaaaagttgatgaatcgtgagactgtaaaacggatttgggaaaaggtttcacattgaaactagtcctttgattcggagtaagcccatttttttgttaaggaatgggttcaaacggtgactggaaaagggctggtgttcgcctctttggcacaattccatgcagcagaggcagcgcttgacgaacaaa

SEQ ID NO: 27470 - DNA, 1118 bp, Heterodera glycines
cgcatcggtgagatgttccatatggaattgttcgatagatgagacggcattttccaattgctgcacaattcgctgttttttggagttaattggggggggggggggtaacgacggagggtctgcggcgatttgcatatgacattacgtcttaaggactacagaagagtcaaaaaaaatttggaacgctctgctaaaaatgacaggttttgacaaccttaccctgaaacgtaaactcgcacggatttcgaacttttaatatattatcaaactgcaattttgttatctatccataattcttgtttaatatcagggctcggatcgaaaaattttcaaaatcagaacatcaagtccaaaaaataagatttttgggtccaaaataaggacattttgcaaaattgcttcaaatcagttatttttacaatttattcgatcaataatgtatcaaatattatatttttcacctcccatgatcatttttaacaattttggtgaggaaatgagcaaatcatacatttcggggcaagtgagatcgtaattcaatttgatttgtgccagacttttcacggtttcgattttcaatgaattgcgtacataagtccattgcgctgaacaaagagagaaaacgcgctccacacatgcattggacacgggaattgaaagaattttgctgacaagcaaaagaagattgggcaatttcgcttcaaaaagcttcatccacttctgttcagcgttcatttctctaaatttctcatcagaaattttttcaagcgtctcattcagtgccgtaatttcgtcaaaaagttcattgtcgttcaattccggcgcaatttgctcagccaagctcatcacttcggcgcgagaaacttttttttctttgagagaaacccatgccaaatccgttggaaagcgctcaacccggaaccatttatcgacataggtaagtgttgatttcagaaaagtctaaaaataagaaaagcttaaaaatctccagattaaaaacccggaatgaggcacgtaaatgagttgattcattagggtccaaacgacgcagcatttgcgcggtgatcattccgtaaaactcctcagagaaacgttcttcgattttccgtttaaaattt

SEQ ID NO: 27471 - DNA, 1411 bp, Heterodera glycines
  unsure (1)..(1411): unsure at all n locations
ctcattaaaatgtgtcttacaattaagaatttgttttagggtgccatgctcatcgaactgtgccaccgcaaacaatggcacaagtgttcgcattggctgccgaactgttgtgccgagtgaccgacacaatgcaaccaatttgcctggacaacccccccccccgaaaattaaaaaattttaatttttaaatttcttttttttccggtcgccaaaatttcgttcattgcccgcgacacttcgacggatgcgcgcgcctttggcttcgttttcggcacggcggacggcaaacacaaattttacggggtgaaaacggcacggacggcggaccacgcggtgctctccattcgggtgggcatttgatttggtttaacaagacaaacaaattttcttgccaaggcccaaaaaatcataaaaaattttctgaaccaattattcttttttttaaatgacaaaaattggtgattttttggcgaaaaacggctacaaactcatgctttttgttcccgacgacgcaaattttaaaataacattaaagaaaattttttttgtaatttttgccccgaagagccaaaaaaaaagtctttggattttccccttggaagtttttttttctggctacgggtctgctgtctcccccaatgttaaaaagaaacataaaaaaaaattttttttctaataaattatttgagagaccggacaactgagtcccatccaaatgtgtcccccattttgcatgtttaacttttcaggacatgttccaagttgtgttcgagatgaagaagaagcagttggaggaggagaagaagaagcaggaggagcaagagaacacactggtgagaacactcactgaccaactaaaggaattgggtggagaatttgaattttactctttttttggcgattcgtttgggtccatgccattcgaaaaatttttttttttgaataaatgcaacaggcaggacccgaattcttgttaaaacagaacctgttcgggtccatctctcggaaatccgggaagttcccctggtcccctagggttttcccaaatttctggggtttttttggttacaaatttcctcccgtttttttttaaattttgaaaattgtcaatttgtgcctaattatttattcaaatttggcagaatgccgagcgggaggcgaagaacaacggtggtggtgccaatggacagcacagtaatgggaaggctggtggtgacatttatttgtcggcatcgaaaaccgaaaatggcaccggcggcggcggtggaagttgcggtggctgacctgctaatttggaaggtgaaggtggagaacattcaacaggtcagcagttgacaaatgagggacgaactaggcgtccacccccattccccttcgttttcccccaaaattntttaaaaatttttcaaac

SEQ ID NO: 27472 - DNA, 1169 bp, Heterodera glycines
tggagttcatttgagtgttgagcagaaaaagagatagacgttttttcaaaattttcagagccaaactcgcccagaaagaaaatccagaaaaattagggtcgtcgctattattccgaaaatgtggttggagttcatttgagtgttgagcagaaaaagagatagacgttttttcaaaattttcagagccaaactcgcccagaaagaaaatccagaaaaattagggtcgtcgctattattccgaaaatgtggttggagttcatttgagtgttgagcagaaaaagagatagacgttttttcaaaattttcagagccaaactcgcccagaaagaaaatccagaaaaattagggtcgtcgctactattccgaaaatgtggttggagttcatttgagtgttgagcagaaaaagagatagacgttttttcaaaattttcagagccaaactcgcccagaaagaaaatccagaaaaattagggtcgtcgctattattccgaaaatgtggttggagttcatttgagtgttgagcagaaaaagagatagacgttttttcaaaattttcagagccaaactcgcccagaaagaaaatccagaaaaattagggtcgtcgctattattccgaaaatgtggttggagttcatttgagtgttgagcagaaaaagagatagacgttttttcaaaattttcagagccaaactcgcccagaaagaaaatccagaaaaattagggtcgtcgctactattccgaaaatgtggttggagttcatttgagtgttgagcagaaaaagagatagacgttttttcaaaattttcagagccaaactcgcccagaaagaaaatccagaaaaattagggtcgtcgctactattccgaaaatgtggttggaattcatttgagtgttgagcagaaaaagagatagacgttttttcaaaattttcagagccaaactcgcccagaaagaaaatccagaaaaattagggtcgtcgctattattccgaaaatgtggttggagttcatttgagtgttgagcagacaaagagatagacgttttttcaaaattttcagagccaaactcgcccagaaagaaatccagaaaattagggtcgtcgctattattcccgaaatgtggtggagttcatttgagtgtgagcagaaaagagatagacgttttttcaa

SEQ ID NO: 27473 - DNA, 1229 bp, Heterodera glycines
  unsure (1)..(1229): unsure at all n locations
tttttactaaaattataagcaaggttaattattttgaatattttttcaataaatcgcccatttccggcactatgccaagtttgggcgggacagacctaacggggagatataaagtatagggaatatcaaatctattcccgaaggattcatcctcccgaaactgtctgactgttcgaaaattttttttaaattaagcctaaaaaatttgtctaattattttaaatagtttttcaaaaaatcgcccttataaattgcattggatattttcaagacaatttagtcctgtactggggagtatccctgcaaaaattggtggggttctgatcgcttttcgaaaaattacttggaattataagcctaaaaaataaggttaattattttgaatattttttcaaaaaatcgcccttataaattagcattggaatattttcaagagaattgagtcctgtactggggagtatccctgcaaaaattggtagggttctgatcgcttttccaaaaattacttggaattaaatttttactaaaattataagcctaaaaaataaggttaattattttgaatattttttcaaaaaatcgcccttataaattagcattggaatattttcaagagaattgagtcctgtactggggagtatccctgcaaaaattggtagggttctgatcgcttttccaaaaattacttggaattaaatttttactaaaattataagcaaggttaattattttgaatattttttcaataaatcgcccatttccggcactatgccaagtttgggcgggacagacctaacggggagatataaagtatagggaatatcaaatctattcccgaaggattcatcctcccgaaactgtctgactgttcgaaaatttttttaaattaagcctaaaaaatttgtctaattattttaaatagtttttcaaaaaatcgcccttataaattgcattggatattttcaagacaatttagtcctgtactggggagtatccctgcaaaaattggtggggttctgatcgcttttccaaaaattacttggaattaaatttttactaaaattataagcctaaaaaataaggttaattattttgaatattttttcaaaaaatcgcccttataaattagcattggaatattttgcagagaatagagtcctgtactggggagtatccctgcgaaaattnngtgnnggtctgatcgcttttccaaaattacttggaattaa

SEQ ID NO: 27474 - DNA, 2166 bp, Heterodera glycines
  unsure (1)..(2166): unsure at all n locations
atcaattataaatattagataaacantttgaacaaaacttagcacaaaactaaaaattaaaaagccaataaaaaaattgggttttagcaaatcccgataatcccgcgggatcccgaaaaaaatcttcgggattcatcgggattcggtcgggatcccgactcgggatccgtctcgatcgtttttccaaaatgttcgggattgatcgggatcgggattcagtcggtatcccgactcgggatccctccgaccccagttgtccggtctctactgcaaaagcccgcagcaatggacataaactcaaaccctatgtgttggtcaacagaaagcgaccggttccgcaaattatcaaccaatttgctggaaaattgttttgtttttcagaaaaaattagtgccaaacaatgttctcaaaattctatttatcccccatggggggtaaatggagactgggtgattattttttaaactcctcagaaagggggggggataattggagactgcggtattaatagagactgggctataattagagcatatacggtaagtttggcgttttataaattatttttgactctatagcactatgtgtccaatcgcattttttgagtccaatcaattgataaacctaagttttgggtcttggtcgtgcaaaccctagtctttatgatatcctttaaatgatcatagttgatattgtttaatattgatcaccgttattcatataatgaccccaagcaaattctccattgattggttcaatgaggtactgagaaacgagaatagtaaaacatttttatttataaaatatattataaattcagtaaaataaaagcataattatatttaaagaaaatttactggaatatcaggattttaaatattaatcaataaaataaaacattatatgggccatcgatctttcttcatgttaaaatagccaaaataaatagtataaaatgtttattaatataacaaaggacggtaaaccaaaaaacaaacttttaacacatagataaataaaataaaaatctaaataggcttaaagaaaataagtgaattacaattgaaaataatacaatataaatcatcaatgcacctaatccctctatgacataaattaatcacctttaaaatatataaagaaaaaaaactatgaaaattcaaaactcaaaatgataaactaaaaggctataaatgataattatcataatttagtctacccaggtttcttatgtcgtttaaccaatgaacttgggtcctctttgtgatatttcagaattaatcaagaaattcagctcatattgtttttcaagtatttaattttttttttgtaaatttataaaaaaatattttctgttattattatgaaattaaatatgctatttattagcaaaattaaataatttactaacttgaattattgatttttcgataactagctcgccgatatattgttattcctttttgaaattacatattttaattgtcgatttgcttgtaaacattaattttaaatttcttacctttgcttttatttctatatacaaaaattattacaaattaacagaattttttatctgattttgactaatatattaaaagaagattctccacttttaattttaaaaatgtcattaaatttacttattttgttttattaaattcttatgtttttgattacgtttaatggctcagtctttttcctttgattttgtttttttttgattttttgttttttttattttaattcttttgatatttttaaaaaaaacttctatttttttttgttttattaatttttaataacgaaaagtttaaaattttgtatttgttttattagattcaaagaaaactatttttcaaagttatttatatcttaattttttatttcttttattaacatttaaagctcctttctttgagatttgttattgtctttaattttttatcacaattaatttataatatttatgcaataagggatttaattcttactattcttcttatatattctaaatttttatcttccatagaatataaattggaaaaataatatttttgtacttaagatgtcatttactattttgtttanactgtcggttttttatatgatttanaattttattaattaatttctatagaanatatttcatttacacatacattc

SEQ ID NO: 27475 - DNA, 1238 bp, Heterodera glycines
tttcccgcagcgattggccaatttttgctgcgcggtgccaaactgaagaattgccgctgggtgttcggtgtcgtcgtctacacagggcacgactcgcgacttctgatgaactccaccagcgccccgctgaaaacgtcgcgcattgacgtgatgaccaaccagcgcattgtcatcctctttctcatgctggtgctgatcaccatcgtcaggtgaccgggcaatttggaatgagagtgccggatggaaccatccgattatgccaacaaatgcctacggaaaaattagaccaaacttagctaaaaagaagaatttttggtgaatttaacgacctttaggaaatgaaacgaaattgaatttttgtgtaaaatacactttaaattggctttggaactagttccgctttaaaaagctatcaaaaccttatatattattatgttacaacaatatggggtttttaaaaagggtctttatatatgtgctttgtgtgtgtttgtgcctccaatcagccttttgcagtgtcatcggtgccgaagtgtacaacaaatggtttttggacggccattggtacatcggcgccattggccattggtccttctggtggaacatgctcaccttcttcatcctctacaacaatctcatcccaatttcgttgcaagtgacgctggaaattgttcgcttcttccaggcctcgtacattaaccaggcattgactatttttgagtacattcaaaattttaaaacaaaaattgttcactaattaagtccaacctttttaggacatttttatgtatgacgaggcaagcgacgtatcggctacggcacgaacatcaaacctaaacgaggaattgggccaagtgcaattcctaatgactggtaatcacctcaagctttttgttagcccacaaagtcaattgcaacacctaaaatttacttataaatccaaaagaaaattctccgaatggcgctttttgaattatttccctttttaagagcgaaaggaatttaattttataaaacctaggctaggcggacaagggggggggggggtcaatttcgtaaatcgtacgcgggtccgaggcaatttcgtaaaatttttgcccaaaatcgaaaaatcactggttaagatgggaaaattttacgaaattgaaaaaaaacaaaattttgtgccaaaaaactcaaaatttttacgatttcaatgttctatgtcgttaaaattttacgaatattgaatttcgttt

SEQ ID NO: 27476 - DNA, 1151 bp, Heterodera glycines
ttataatttagaattttttcaaaaaagttttgcatttaactttttactaaacttaaatatttcaagtattaatgttctttatttattgtttttttaccatttttataattttagtctttgattttttgtcgaaaaatatctcagttttgatttctttattttctgtcggttgtaaaatctcatttaaaattataaaaatcttaattttttaatttcataattcataaattatttattacattaatctatttttttttatttttggatagataatttattctcaattgttcaatattatctgcatctaaaatttttacattatcaaattcggaatgcaatgttttattttacattttttgtatttgtttgaatggaaagcaaaaaggtttttttcattttcgataataaaaataaaagtttttttgttctcaaaaatttgaaaacattttaataaaaaatatacgaaacaattgaaattaaaatgcataatttttgaatttttcgaaaaatatttgtgttacttgtgtttatttaagtaattaaattattattataaaattaatcgaattttcttattctcatcaaatcagagatccgagattataaatatcatatcatatcctttttaaataatttcttttatttttttatgtaaaaaaattttattttattattttgcaaaaaatctcttggtttcgtattcttcttatgtatgtactcgctggtgacttttctcaatgttttttattttattattttcattttacttagtttaaaaaagttttcttaaatttttattttataagagataaataattgcgtttatgtaaaacattgtttttttgttaattggtataaaataagttatattaaaattattttgcttcttttatcaattattttcatgacggtttattttatttacagttttttatttcatttatttgtaaaattagggtttcttcaaaatcgtttaactgaaaaccatcaatccttcaataagagacatttgacatttttcgaaccccgaatgcggactcgaacaaaaattcaaaaacattttacaccacatttcacatttgttgtaaaaaactgtttttaagaaaaaatgattctgacattcatttcgaccaattcaatactccgagtaa

SEQ ID NO: 27477 - DNA, 1186 bp, Heterodera glycines
ccatgccgggatccaagtgaatggattaagacccggccccggcctgggagaaagccgttaaaaaactgaacaaaaaattgttcgtcaccgggccggtccgggttccggatcagtcacttttggtgcccgaaagtggtcagataggcttccggaaaatgaccaatcaatctctgagctttttttgtggaacgcccacactgagctttttgtggaacgcccacactgagcttttttgtggaacgactcaccacggttggatgagttgacgaatcatcgagttaacgaatcgtagtttttaattaattgacgaatcgcgaattgacatatcgttgagttgtcaaatcgtagttttttgctgaattgacgaatcctcgctgtgtttagccattcgtcttattcaattccataaaaattttcattattttaggccaaaatattttttcaatggccgcctcgaatggcacgacctcacaacagcctccatcacgttctgcaccactgcgagccactctccgtgagcggatttatttcttcccttccgttgttaatcaaccctttcccttccgacaggaatataaggtctccaccagtgaagagcaccagcagttgttctgcttgatccggaggatgctagagtacgacccggcaacatgcatcatgcgaagcactgcgcctgcgccacccatactttaagaaagaaggttcggccaaaatgcaacttttcggtggccttagcccaggcccgtactccgaaaaaaatttctggaggggcaatcaaagatctttttctatcttcggaacaattttttctatagctacaaatcaaaaactgatgaagaaaaaattgaaattgttcaaaaatttattgcaatgaaaaatgaatacaaacaaaaaagaaaatattcatcgaaagaatggaaacaaaattatgccgaaatttgtaagaaaattggagttaactatggaacaattgttaaaaattttcttctgttacttcgcgatttaacattagcaaaataaatattgtaaataaaaattaaataattaatttctactctactgttgtcattgaaattgcaaataaagtagggaataacaaaaatatttttgatcagtagggataaaattgtttatttaatagtgaatgaaattactttatttttatttcattacaatatatttaaaa

SEQ ID NO: 27478 - DNA, 1258 bp, Heterodera glycines
  unsure (1)..(1258): unsure at all n locations
cggacctgggggcaaattatgaaattcaaaactatccacgttttatttctttcagtcactcgacgtagtgtaaattcgaaaaattgaaataagttttcaatccgaacagttcggttatttaatacaaaaaaaagttcattttccatttcaaaaaacaataagttcaagaatgcttgaggctgataaccatgcaataagggtacttccttcttttgctacccccccccccccctcgaaaaattttaaatttaaaaaattcatagatattttgttaaatctatgggaacgcactaacttccatgcgcagtgcacgagggatcggctcattgcgtcccaacattttgtaggcagcgatctgtgcactcaacaaacgcagttggtccggcccaattttgtccgcagattaatattgttattggctagaactgttattggcatttataaattgaatgaatattaatatatacgttatattgacaaggagtttcgttgctaaaaccattttctcccggccgaaggccgggagcgccctgaaagtagtggaagggtcttacaactttttgaggcgcatccgggaaaactatagagaaaaattcagcgcggacgactgagtcccggggaccgatttctcactttttcttgcgtttgttagcccataactttttttctaaaactcggatcaaaaaattcccgctgggagggacccaagttggagtgtcctcgacaactttgccagcgaaccctaagccctacgttgggctcccgaggctgtagccttggctaaaaattcagtaccaactttttccagttcagtccccgttgaataactcattaggctttgacctgagcgcagggtggccagcagacttattgtagagctcaatgagctcgatttttgcaatttttaaaatttggaaaattttcaaaatttttcgagttaggcctaaaaaacggttttcgggtttttgaattttaagaatttttaacgatttttcccagaaaaacgaagaccacttacaaaacatagtttttcgagctctatcgactggtaattttttcggaaaaatttcgatttttttccggaaatagaaaaaatttttggcctgagcgggacatttgagtcccgggcctataactcgtcagggatcggttttagccaaaaattgccttagaacatttttgtagagcattttanatgctatcgaatggtgtactatatgaagggaaattttcaaaaattttcgagctaggcccccta

SEQ ID NO: 27479 - DNA, 1957 bp, Heterodera glycines
tatttgtaaattctttgtgttcttcgaagcttggactctcaaaatgagtcattttaaacaaaaagcgacgaaaataactttcgaattttccttttcctatctatgcataaaaatgaaaattccaagttgaaatatttattctgcagaaatagaactaaactatatttgtttaaagaattcgctcgcctcgcctcccccaaattgggtaattaatcgcattttgttcggcggtttagcgaatcggaaaagtggaagcagaaaacgttcatttctcggggacaaactctgcgggctccgataacaaatcattcccgaaacgagaacaatcactcactcagagagttcaaaaacattttaattaaaaattgctgaaaaaagcgaacaatcaataaatggtgccaattgtgtgttttgtccgtttttgctaggctttgccttcgccccattgtctccgcctgtaccaaaatcggatgcggtggtcatctgatccggtgacgaacattggcatgcttggcgaatgcacaaaagctcgagtcggagctgtgtggcctagcgcaagcaaccgctcgcggtccgagttccgtgcatcccacgaacatagcgaacccgacttttcatcgggaagcattactgaaagggattggatataatggataatcgggatggaggagagagagaagagagtggaggggggggaagcaatgaaaaggggaaataagaacgggtaaaggaggagagaaaagagtgtcacgggaagtcgaagggtggaattgccaagttttgcagggaatggctactcaaatgagaagagatgcaactgaccatagtcttcggtgtggctaagtgcgcctgcatcggatgttcacgtgcgcctgtggtgcccgctgccggtgtaagcgatccacagcgattggtggacaattcccataatttgggcacactgtccattcctactgtgagaacgtactgaaacgaatgaaacagggcaattaatcggaattcccaatcgctaaaagccaagattaccacacaggtccggtaccatccgaattaattttcatacatttgatattttatcacatgacgaaaatggaccttaagaaactagtcgaaaatgtacggacggaaaaagtcatgtaatcgtaagaccgaccccaattaacagcaatgacactttagtaattaactgggaaaatttatgcataatgaagcaatacctttccattacgagtgaactgagcactgcaaatcggggctccgtcatgcgcgcgggtaaaagtctcaatgcatcgattggaaactccgtcccaaactaaaaaaaaaagtgaaataaaggacaaaaaagaagggggccgtgagggagaaggacaagggctgaaaacctaattctaaaaacctccatttttgggaccttttatcggcgaagaatggttttaatgagtcgactccctcgcccctctttccatatatgacctatgtctaataatcgaccttttacattcccatcacgacttcccgtgacaaacattcgcgcattttccgaatagcacacatccgtaatggaatcagaatgttggtccttcggtattgtagaaacaaagcattgctaaagaaacagattcgatgaagttttcagaatcatgtaaaaaatgttttctatgctatttaaaaacggaagaacatattgaaagcgattttaaacaaattaaaatctaaaaatatggatggtacctgtgtttcggcactataaagacgcaaggtcggatgccgagttgcgcatagaaaaaactctccgctcggatgaaaactgaccgcagtgatcggctcgacctccttccaaacatttcattgtaaaattctttcagaatatgacttaccgtgatcgttttcattgcccttttaaccgcagtttttgaataatcgaacattttcagcgtaaaatcgttgctgcccgaaa

SEQ ID NO: 27480 - DNA, 1054 bp, Heterodera glycines
  unsure (1)..(1054): unsure at all n locations
attgatagggatctcaaaaatatgtacaaaaattggtcaaaatatgtacataaatatgtaaaaaaaatcccgaaatatgtaagaaatatgtataaaaacccaaaatatgtacgaaaatatgtaaataaaatttttttaaatggttattttttgggaaaaaaatcttcgtaaagtgttaaataggcataaaatggcataaaaatgacctaaatatgtttagaatcaccttttaacatttaaaaaattatttttggaggggtacatttaaaaaaaagtttttttttaaattttttcactagaaataaaattttcaaaaattctcaaaatatgtataaaaaataaataaatttgccaaaattttggattttttttttgaggatttccaaaaatttccgtaaaaaacccgcaaaatatggaaaaaaaaatcaaaatatgtaagaaaaagtccaaaatatgtaccagatatgtataaagtcccgaaatatgtaaaatatgtataaaacctcgaaatatgtaaaaatatgtaaataaaagtcccaacttttgttcgcaaacacaaaaaagaaagtgtttttcttactatttagagcatggagaagccaggaaaatatatgtatttacataaaattgagatccctaattatgaatgaacatggaaaaatgggcgggagtagatattggctgggttaaaactaaattaaaatgccttccaccatcacatcataaatataacggtgctatgacgttagtcaaaaaccatcataatgggcgttagtcaaaaaaccatcaaatgaaatattttttgatataactttgctcaaaagcaactaaatttttaattcttgatatcattagataggcctaagtgttttctattagcctacaaaatttcaaaaagtttcgttaagtttcaagaaagttatggccaaaaatgttcaaaaaaacttggttttttgagcttctcaggtcataactntttttaacttanagattttttagaaatttgcaggataatagaaacacttagggctatcgaaaatatctagattataaa

SEQ ID NO: 27481 - DNA, 1122 bp, Heterodera glycines
aatagggctccaatttatagttttttcactatttttttcctgagctccctatagcgtgaaatgcacgaaaaacatgtttttttcggctgttgttaagctacttttcgagttattagcaactattttctagttttttatttttagcaactaaaaaactataaaatttttttaaaaaaactattttcaactattttagcgttttgcccaaaatttgttaaaaaaatgcaataaaaagtaaaaatacacccctaagaatcgacttaaaaatttttttcaaaaaatacacccctaagaaatgaaaaatttctcaaaaaatcatctccaaaaataattaatttattttattgacgataatttttgattttgaaaattatgtatctaattaatgggttggcataatatttttgttttttgaagaaaattttcgattttacacccaccccccttaatttgaattttagaaactatttggccatttttagcaaaaccattttgggggtttttagaaactaaaaattaattattttggcactttttagcaactataaattggagtatgaatggtttatgaaagccccaactcgtactaggccaactcagtactgctggtagtaccctgactcgtactaattttccaactaattaagagggggggggggggggggtagaaataagtaaacccattatcatgccaaaaaaagttaaataatatttgtatttttatttcttcatataattaaaattagaattatattatttttaaattaattaccgttgcccattgaaatgaaggacaacaacagcagggcaccaagcaaaagcagaagaaagtgcgaaatttttgaacacaaaagcatgtttagtatttgtctagaaataattttaaatgaaagcaaattaaatttatttgtttatttttgttttttaatattttatgagttcggccaaatattatttaatgtgttcgataccgaaaattttgcgaaattcgagacccgaaaaattgggcacgagtcctgttcacgggaaaaaatgttattcctcacttctatgatcaacagagttcgagagtctcgaattttactagaagtaatcatggtttcttgggcctctatatttttt

SEQ ID NO: 27482 - DNA, 702 bp, Heterodera glycines
ccccctcgctgcgaactcccccacctcttttacaccccccccccccctaaaaatgtatgaatgccatttaattttttgtttaggaagttctctgtgcctctttttcgctctctcccccctctctccctctgacttatcatgtattgtatcaacaacacattgtcaaatggacagcatttcgcgcggggaacactgcgagaagttgctgggcgacttcaagaagaagacggcgacggagcccgctgtgaagcgtgccgagaagaagaagattggcattgagaagctttttttaaagcagtctacaaccagtttgttttttttctttttttttgtttcttgttacagatccatagccaggggatgggcacattttttgaaattttggcaattttccttcaattgcatttcaaactggagaaaaatcttgaaaatttttgagggttatctccctccgatttttttttttggctacggtcccgtcttgtttcggcacttttctgtaagggccaccggaataaaggggtggggttttgttttgattatatcgtaaaaacctgctcatgttgatttttgggtcgctaatcacgaatctgacatcaatttcaactagttccaccctttggaattttttcctggtttcataacagcaataatcgaaaaaaccagaagtggattttaaagatacttcaaattttttgggag

SEQ ID NO: 27483 - DNA, 2031 bp, Heterodera glycines
taaaatgaaattattgtttaaattttaccagaagccgaccattgatggggtgaaaaaagtcgcggtcttgagtttccaaaatgagaccgaaactgaaaaacccgagactgtgactcaagttgagaccgagactctcaaataagcaggaagatttctcgaattagcattttaaaaattaattttaagggtcaaaagcgaaagccgagacgaaaagcatcagaccaaggcaaatttattgtggatttattttactttttatcttgcaaaattaatgctgtttaagcagatgtaaactcattggagtcggggccagtggaagatgatgaagaggaggaggaagaagaagaggtgggaagggtaacgagtggaggctgctcgagaattgaattttctcgagtctcaagaagctgggcaaagaattggacgagagtcgagggtcgattgagactgacacctcaaaaacccatagaaatttcttggctcgaaaaccccagcactttcgagtgagctacaatatgatcaaattggtgccactattcccgactcagtaaaattccttggttttaaatgtcatgatggtatcttttctgcaacatattagtggtggtgagaacgaaaaatttctcgagactcgagccccaaaaaccccgggatttttctcgagttgagaccgagactctcaaataagcaggaagatttctcgaattagcatttaaaaaattaattttaaggatcaaaagcgaaagccgagacggaaagcatcagatcaaggcaaattatttgtggatttatttatttattttttatcatcaaaattaatgctgtttaagcagatgaagaaaactcattggagtcggggccagtggaagatgatgaagaggaggaggaagaagaggtggtcaggggaaggggagctcgctgaaacttagaaaaaaatataaaatgaaaattcagaaaatccctcgccgaaagagaacaaagaaaaagaagaagaagaaacggcttcattatgatgatgattacggcaattatgatgacgaggattacgatgattatgacgacgatgaagacgatatttacgaggacagcgactacggtacctatgaggatgactacgacagttatgaggacgattatgatgatgagccggccgatatggagccggactatgattcagaggaggaggaatacgactatgtggatgaaggcggtggtggcaacaatggcattggcactggcgtgtcaaggccgaaacgatgccgggacacgaccagagagtgcaggcacggatttaacagacttttgggggaatgataatcgaccggaaccagtttatgaatttacaaaatgctaggtgtatgataacctcccagtcggggctggtaaatcggagatttccccgaaaatggcttaaaaaattcgcgggaaattagcccaaaaatgccgggggccctcccaaccataatttgttgtttttaatgggaaagttgcaggacaaagcaaatgcgtctctactgttccgacgaggactatgaagaggacatgcaccaaagatgtccagtgacatgccgattctgtaaaggtattaaaggggaattgggtacagtaaccaacggatgattccgccagggttaatgtacggtactcgaaacgggaaccaatggtatgccatggtataccaatggtacaatcagcaggactccccgtcgggtgcactacgttccccctcccccgttttgtttcggccgaacagaagtgggaacacaagtcaaaaagaaaaaaatgccggaatgcgatttgtattaaaggcggtaaataacccctcaggggtttttatacggtattaaaggggattatagttacggtaaatggatccaacagattttcccgagattctggtcccgtttgttttgttgaaattccaattttaccagtggtcaattgtttaaatgtacggtatctatacggtagcaaaaattacaattaaacaatgcgtttttcagcgggagaaatgtggcaatagactatgaa

SEQ ID NO: 27484 - DNA, 387 bp, Heterodera glycines
ttgtcgaaatcacgcgcagacagtgaaaaaaaagcaaaatagtttactgtcgaaatcacctggcacgaatatggtgtataaaaaagtcatttttttattatgcctatcatttaatttcatttttacacatatgtaacaaagaattattaatagaatttacaaaaattagatttttgtttcggtgactttttttttaaatatacaatgatttgtttttgtcgtcatttgaactgaaaattataattaaagcctaaatatatggttgtatttgtagcattttttacgggctttcgaatggtctacataattactctaaacaatgttttacataaacactgtgttttattaaacgaattattcacaaattatgggtggtcaaaagtttat

SEQ ID NO: 27485 - DNA, 1733 bp, Heterodera glycines
  unsure (1)..(1733): unsure at all n locations
gaaatgcctttgtcagaatttccccccccccccccgttaaaatttgagtaggaaatgaaccagcatctttcacgctcacccgacgaccgaaccccacagccgacctgatgaaatggactttgatcagataagtgccgttgggggggtcgaccctcctttcaaattttttgtcaccaatttgtgcaattttggaaatttctaaaatgtcctcataacggggttttgagcagtgttgttcttttcccaccaaaacagggactgacctttggtcattcggcgcccgaaaaccggaccacactgacgcggcatttccatcgaaatggcaacgacccgccccttcccagacacggcacacgggcctcactcccgcgacattgtccccgaaacggcatcaacccttccgacacggcatttcctaagaagcggcaacgaccgaccctcccgacgtaaaattgtcccgacagaccctccccctcacccttccatcccgaacaaacgaacaagtggaatttccaataatttttttggaggtttgtgaaaatgggaatgggacttgcatacaatattaaattttatttctttgcaatttaatgatttgttttttgttctagtgaaggtgtcatttccccgtttcgtatgggccacacactcggacgaggtgtttcgcgttcctgagggatatcaaccggaagaggaaataatgtttgataattattttttgctaaattatctgtaattttgtaatttgtttatctgtctgtttttgtttaaaatgttctcattcgtattgtggtccagccactgtcatatgttatatttatttagtgcttgtatgacgtattgcgattagacaattaacaaaaaagttatacatgaaatttgcgaaaaaactcgaaattttgaagtttttgttaataaaaattttttcaggcttgaaaatcttttcgctttttgtaaaggctaatagagcatgtgaagagcttcgaatgataccaacaatgtttgatttggatgacaaagaaaaaagttgtagtggaaaagcatgctggggccaaatcgtgacggccgaactgaacgcgtagatttattattgtcattagtcgtaatttcaaatgattaaattttctctttttgttgattacttttaacatttttttaaatttaatttttcaaattttagtttctaaattttaaaatttaaaaggaatttatgaaaatatttttcgttcattattcatcgttttctttcagctgtcatcgttttcccttttccatcctttcaattcaattcgatgtcaatcgatgaaattgagcggacaattcctttgccttcgtcccatctcttctctcattcgcaattcgtccgggctgagattcactcttttgaagaagcttttgtccacaacaaacgcttcaaagagttcgaaggattactcagaacgaatcacaaagttagaaaaagaaaaggaaaggaaaaaagaaaggaaaaagttacagacttacgaaagtgtcgaagcgaaattcgacctgcaaaaaatcgaaaaaatgagcactttgacgaatcgactgaacaaattggcggatcatttgggggaaattggccatttgcattttgaaaaggtatgccaatggggaaaatgggaggatganaatggcggngcagaacgatgcccaaaaatgcctanatttagtttanaaaatattanattnntgacgnataataggcgctagtt

SEQ ID NO: 27486 - DNA, 1110 bp, Heterodera glycines
ttggaaaatattatattaattttaaaatttaaaattgcataaaaacggcttgaatcgatttaataaaggcaaaaaatgatgaaaaaattcttataaaattttttataagaaaatttcaagaaaaaaatcattgaaaaattttttcgaaaaactgtaattaatttatcataaatttcaaaaatgaaaatttttcaattttttttatttacttttcttataaaagaaattttctaacaataagaattttttctttaaaaatttctaggtatgaaaaattttctttttaaatttctgcggcgttattcccctgattgtgaaccgtccgacgttttttaatgacgcattattatagaattttgaaaaaatagctatttttcttgaaattattttctaaaatttttagggaaatttctaagttttgtgttcacctccattcctcgtgccatcgtctttctccgccgattccattttttctgtccatcgcttcgcctcctccaccaattttcgcgcctcctccaatttggtcgggaaatcgtcgtccatttccatgctgaacagtgcctccgtcatgtccacgagggcatttgcggcgtgccgtatttgcttggagtccatgtcggtgtccgggttgtactcgatggcattgttgcgaatcaattgaatgtccttcgcaaaggcatcctttgaggcataaaggcccacgtcgatgttgcccatctgtcaatagaatatgcaaatataaatattttaattttttactcaataaaaatgcattgtttcaagtaaaaatttcaaaaatgggcaaatttaaatgaaaaattttaaaaaaaccagaggaaaagggacccttttggagcaaattttacaaaaaaaatgtctgccacgaaaacttttttccaggtgttttaggagtcgctgatcatagatcttccatccaatttgaccaattctgaattccttaattcgaattcgaaacaaaaaaaaatccgaaaaatttgaattttcgaccattgtttcgaagccggggttaaggcgttcagaattggtcgaaatagcgcaaacccaggagagcaatttcattaaaaacccgaaagagtaaccccaatggtt

SEQ ID NO: 27487 - DNA, 1329 bp, Heterodera glycines
aaaggtaaaaaagtctgctaatgatctcgtaaaactttttttttcataaaaattggagggtgatctcccaccaagaaattttatgttttaatgcctgaaagttattagtttcggggataaaatgttcaaaactaaatttaatttaaaaaaaaaattaaaaaattttttcattctttccttcagaaaatgttttttttttaaattttatttaaaagtatctatacaataaataaaatttaattttttttttatgatttttcattttaattgcatcaataccaaaaatttcattctctaaagtaaataaactacaagaaatcagaaaatttttttcaatttcaaatccatcttttaaatattcgtgagccgaattgtcgatgcaaaatttataaagaaatatggaaacatttacaatacaaattgatcccgctaaagagtcacagaaaacgggtctgggtcgttttcgtacgagcataatttcttggctataactttttttctttgcgaaacaaattcaacaatcatgttatcattcgatagcccaaattgttttctatcattctgaaaattttcaaatgatttcgttaaggttaaaaaagttatggccagaagaattcaaaaacatgtttgttcgaacatttttgccataacttttttgaaccttaacgaaatttttcgaaattttgaaggcaaatatcgtacacttataaatagtgctatagaatgatgccaagattgttggatttggttgccaaagaaaaatgttatagcccaaaaacttgtactcgtacaaaaacggcctggtccgacagaaaacagtcaaatttaaatcaaaaatgatttagacaaaatgccaagagaatgaaggagaaggaataaaatgtggggtccactgcgtttcgtagtccaaaaactgcgctggcgccgaaacgcgcggcgccgaaacgcgtgtgtcccaaaatgtgcaccacgaatcttagaaaagcataaagaatcccataaaatgctgaaaaaagctcgaaaaaagtcagttccaatgaatctagtgaaatgttttttttcatctgtcaaattcattacgccaagttttgctcattgtggcgtaatgtctttcaaatgtttctcgtttttcttcagttttcgcttgacaattgccttctcgggacagttaaaaatggcacaaccaatgcaagaagaagcatacgcgcatgtgcaagccaagtcaattggggcacaaacggcacaaccgagtgccaaatgcgtcaaataaaatgtggcacacaacagacagcatactaaaattatatttgtcaatatattttttttcag

SEQ ID NO: 27488 - DNA, 1129 bp, Heterodera glycines
  unsure (1)..(1129): unsure at all n locations
tttgaaattttntgggcaatttcaactgttaaaaagaccacattgaataacattttcataactttctttttacaaaaaaaaaattttccaaattttatgaaaaaccaaaaattttcttaataaatttcattaaaagtcaacgtttttcttcagcgtcgcctagtacaaaaagctaaattttttttctaaaatgtagctcaaaatagcaaaattttgtcattttttcgtgtaaatctgttcacaaaccaaactcaaattttcaaaaattttccccggcggcgcctgtcggcactgccggaccccccccccctcaatgtcctcaaaatcattttgaaaaaatgcaccttaaaatttttttgaagagtaaaaaagttcgatttacaatggcttgagatttctatgctaaaataaaggactataaaaacgccatcaggcaattttttcttattctttcaactgccatattaatacaacaaaaattagaatcattttgttcgaaccgggttcgtggctcgaattgggtcgaaatggatgtcaaaatctgaagctccgacttataaatctccaagacatatttttttttaaatccactcgtacgaaaacgacccccgtacgaaaacggtcgtacgaaaacgacccccgtacgaaaacggtcgtacgaaaacgaccccgtacgaaaacggtcgtacgaaaacgacctggcccgtaaagcctaatcccatgcaattggacaacgggtgaggcaaacatcgtaaatttttctcaagtcatttggttgatcagctcaaatggcacaacggagtcaatcggaatttggccaccgcttggccatccgacgcattggcactttcattgggcggaaaagcgaggagaatgtcatcatcaaacaagacaaccgcgaagtgatggacaatcattgagcagtgacgggaccaattgacgtaaacggcgaaaaacgatggtgttcaaaagcgggtccactgcgtttcggcgctcgcgtttcggcgctcgtgtttcggcgctcgcgtttcggcgccagctcgtttcggcgcccgcgtttcggcgccaaaaaaaattataaaaattcaaatacttgttaaaatcaacaaatcaaaaaaaataacacttt

SEQ ID NO: 27489 - DNA, 1180 bp, Heterodera glycines
  unsure (1)..(1180): unsure at all n locations
ttagtcatgggattacacacatgcacatgtggtgtagtcgttaaactttctacctttcataatttttcgcctgggttcaattccccacttggatagaatattcctcacattttctttaccattattttaattaaaattttaattttaaaaaatattccaacttttttctttcatgttaagcatcctaaaaacccaaaacttaatcaattggtcattttttttacaaattctgttaacaaatcgcattaaaaattacaaaatttttcccggcggcgcctatcggcaccgccggccctccttgtcccccaaaagtcttggaaaaaacgtgccgcgtaaaaagcggtgttgaaagcaaaaaaaggtcattgatttacattaatttacatggccggagaccccttcgcaaaattggaaaattggctgctgatcccttgttttgcaataatctgaattttgaggtctatatctgaattttagtgttctatgtcctgaatttgaaaaaaaaacttggtcaacctgaatatacatatacttctgaacaattctaatgctaaaaaacaggcactcgcgcgaaaactgaataaaaattttgtatttggaaaattttgtccaaaaatttttatgttctaaaattaccggtttttaccggtaccggtaccggtaccggttgaaaaagttggtaccggtaccggtaccggtttttgcagtaccggtcagtaccggtaccggtttttttgcaattaccgattaccgctcaactctacaaaaaaccattaaatgttgacactttaaaaaaatacatacctatttgttttttcaaatttactttaaaagtaaatttactttataaagtaaataaaaccacaagatacaccaagaaaaactaaaattttcagaaatgcgtttttggttaagccgtaaaaacaaaggagatgatgcagtaaacgatactgatttggaattggaattctctaataaacttgatgatttggaaaatgataataaagcagaggggatcatcggagacggtaataaatggataatcacttgaataataaaatgaaaaaaaattccgcagaaaaaaatacagcagaaagcaaaagtttggaaaatgcncctcattcgcancnncaaatcaaagaggtctgcaaatctcacaagaacagcgattatttcatta

SEQ ID NO: 27490 - DNA, 1321 bp, Heterodera glycines
ccaatcccgcagcgggatccgcaaatttgattttttgtgcgggattatgcgggattttatgatttttttgaaaatttttctaagacagaatgccaaatatttttaaataaattaaataataaatttaattaaagttaactcatttttcatcgcaaatttcattcaaaatttgtgaaattttcccggcggcgcctatcggtaccgcccgataggcttttacttaataatcctgtagaaattgagtaaaaaactgcgtcatttggtcaattttagacaaaatctgttaacaaatcgcattaaatttcataaaatttctcgcagatgtcgataggcaccaggtatggcacggaaagacttccgatttccgacatttttggggtcggaattccgacttccgaaatttttgatgaaaagtcggaaatttttttaattttttttttcaaaaaactagtaagttttgtacaatttctgttaaaagtttttgaaaaaatcgcgctgtaaaaaacgtgtaaatagtcactccttttcccaaaaatgttctaaaataatgaaaaatgacaaaaagagattttgataaaataattgaataattttttcaagcgaatatactaaaaacatttgtgaaataccttttacttggttaagaattaaaaaatttagcctattaaaatatttagaaattttttattatattgtatattttttgaaaaatttccgatttccgacgtttttggggtcggaaatccgatttccgacacttccgaaaatttttggagcctcggaatgccatccctgataaggaccgccggacccgctgttcctagttttttgaaaaattgcaccgcaaaaaagtggttttgaaaagaaaaaaatagtcaaatttatgaaccgttaataatttgatttccgatcaactttttaccgtcggatccaatcgaaaaatcttagtcgacccatcagccccttttaatacatcccgccagcccctaaaaatttatttttcagcattttttgatttttggaaattttttgaatttaattgaaattttttcgaattttccaaaatcccgcaatcccgcaaattttaaatgcgggatttgcgggattaatcccgcgggatcccgtcccgcaaaaaattttgagttccagtcccgcagcgggatccgcaaatttgaaatttccggtctctagtaacaacactaattcaaataaaggaatcaacaaatgaaagtgagagaggcatttctcatcaaatccgaatcccattgggtgagatcgttgagcatttcttaatatatattaataatttttcgtgctttca

SEQ ID NO: 27491 - DNA, 1504 bp, Heterodera glycines
agggcgcggagcaccctttgaggacgcgaaagcggccgaaaagtccgcccacaaaattatgaatgcctcctcgcgatgcctgtagaccgaaaatcccttggcgtccgcgcatgcactagcaacgaagtcctttgcgcgaagcgctcatgtaatgcatattcttttcatctctcacaagtatactgtctacaccgagcaattactgtgcaaagccaactgcctgcaccggacccccgtcaattcccacacgctagtttatatatatatagagaaaaagggggactcgtcttaaaaaacaaaatctcccggccgaaggccgggagcgccccgaaagtagtggaagggtcttacaactttttgaggcgcatctgggaaaaatacgggtttttctctctggtggccaactgagtcccggcggctaatttctcacttttgcttgcgtttgaaggcccataactttttttctaaaactcgaatcaaaaaatgcccgctgcgagggcaccccgccaaagtgtcctctacatgctggtattttttatttttttaatagagccaccccctggcctgcagaaaatggcaactgaagcgtgctcaaaaagtacacttcagtaccaggcgaataccgcgtcggcgtttgatctgagggaaagttgcccagcagacttattgtagagttttggaagctcgattttctgaaatttaaaaatttcgaaaattttcaaaatttttcgagctaggcctaaaaaacggttttcgggtttttgaattttaggattttttaacgaattttcctggcaaaacggagaccacttccaaaacatagtttttcgagctctatcgactggtatttttttcggaaaaatttcgattttttcccggaaatagaaaaattttttggcctcagcgggacatttgagtcccgggcccataactcgtcaggagttgattttagcgaaaaattgtctaagaacatttttgtagagaattttaagctctatcgaacggtgtgctatatgcccggaaaatttcaaaaattttcgagctaggccccctagaaattttcgaaaatttttttaggcttgaaaagggtggtgaaaaatatttttctggggtattttgaggtgctgagcacgaatttgacttttgtttttcgtttcatgatttttggaattttttaaaaattctttattttttggcaattttttggcccacgggaatttgggtcaatgtttgaaaaatcataactcaatgaaggactggtcaatttaagtgaattaaagctttaaaaatagcaaaaaatcaggagaattttatgagatttatttggttttataatgttcaaaagaaaaaaagttattccagaatttctggaaaaattcgaattttcagaaaaaaattcataactcggttctgaaaagatatttgggaaaagtaaaatactacaaaaatccgcaatttttttctctataatatagattttatttgacaggtttatctctttttt

SEQ ID NO: 27492 - DNA, 765 bp, Heterodera glycines
aggcacagaaattcaccgcttttcgtggctaattttcaattccatgaaattttcaggtcgatgtcagcggcttccgccccgaggagatcaacgtggaggtgattggtaatgaaatcatcgtcaatggggaacatcgcgagcagaacgacagtgagttttgccattgttcgagtaattttatcggggttttggattttggtgagacaaatgtcagggcttgagtgttaatggattcatttaaaatgcttttcggaaccatatttagccaatttaggcttacatttagcgaatcagagaaatatcgagaaacttctttcaatttggaaaatttatatccgcatttctgccatttatggccatatttttgcaaactcttgattttttacgtcccaaaatacctttgaatggatttttcgaaacgcaaaaatattttttttcgggtcgggcatattccgaatttatgattgatttaaatgcaataaatgtctagtcataatgctgtttttcgatgattcattgccccctccaactcaggcgaatcggtccaccgtcagttctcgcgccgtgtgctcatcccggagggcatccaaaaggagagcatcaagtgcgagctggacggcggtcgcttgtgcatctgcggaatgaaaacggctggcgaaggcggacgtaccatcccaattgagatgaaaaagaaagcggccgtggaacatcagccgcaagagagaaaaaaagagggggacaaatgagacgacggaccgatcgatc

SEQ ID NO: 27493 - DNA, 1313 bp, Heterodera glycines
  unsure (1)..(1313): unsure at all n locations
atcaggaaaatttaaaaagttaaaaaaattatgttaannaactnggnaaatttggnngtttaaatgcgcgattcccagcaaaatttttttgtgcgatccgcgattctcgacccgcggcttccgaggccaagctgagaaggcgcaagaaaagcgaacacttcgagccaaacatcggcggagatgaagctgaaaaaaaggaatttaaattttatatttttttttcgttttttacatttcttttttgttggggcgtcgtcgttttttgacgttgtcccaaaagaaccaaagaatggtgccacagccgaccaaatttctgtgatttttctcaaaattccgcaaaatcgtgcgccgcctttcttttagctgtttctgatgagtgccaccattgccgtcagcttcatcatttggttgcattcctttgaacatgatgctgcgaatgggggccaatttgagctggtgaattcgtgcactcgtgaacggttgacaggccgaagaattgggaaggacgaccaatttttgattgaacggtgtccaatcgttggcaaaagtgcggaccaacgggacgaaagtggccgagaagaagcatggaagacggagggcgaaggaagaagcattgattgttggaaaatgctaacttttggcactcctttctttgaatggaacactttttcgtagcacatttcaatgttgtatgtgccaaaattggacgcagatatggttggcaagaaacaataagcattaaaaaagttgttttttcataaattttcgtaaatatttaaaaatcacacacagtccaaggggtgcgtagagggccgggggaggcagggtgaaaaacgaaaatttgttttctcggcggacacctctcacctctttccccgttgaaaagttagaattttttggacaaaatcactactacatcgtcggacccactttccaatgctttttttcttgaattcattgttgcgtgctgagaatgagttaaaaattggaaaacattggcaacaactcatgacaactcatacaaaagacaatttaattttaaaaaattaaaaagaaatctttcctattaaaaaatattgtaaaatgttaaaatgaaagatgaaactagtctattctttgataggtcccttgttgtacgagttgtcatgtcaaaattggatagtcctaagaatcctctattagcatgcaaaatttcaaaaaattccgtctggtttcaaaaaatttatagccaaaaatgtttagaaaaccaactttttaaaattttctggccataaccttttttaaacataatgaaattttttgaagctttgcag

SEQ ID NO: 27494 - DNA, 1643 bp, Heterodera glycines
ctttttgggggcttggaaattccgcttcccgaaaacctcagaaatcagaaaaatttgaaacttcacaaaaattcaaacagttaatagatttacatgtattttttccgaagatctccgatttatttttaaaaagaatttgtttttaattccctaaggaacaacccctggtgaaactaagtgtgctgatgcaaaccccctcctctccgttccccccatcaattcaccggtttggcgcaatgcgataggtcgaacagctggaccggggcaacaacggcgtcgtcgtcgaagttggcatcgtttgtggggcggtaccaccaccagcagaagtggcacagcatccaccgcaactgtgccgttgtcgctgctgctgctgttcatcgacggcaccgttttttatagttaatgtcgccgtcgggtcgatggcaccgccggcaccggaaatgattggacatgacgaagacggcgttgtggcggtggaggacgactcgctgacactcttcagcttcatcaagttaactcgcgtttccaacacgagtcgaatcatgccgtcgtatttgatgtcaaagtcgcaccaaatgccccattcgttgaccgtcgggcgggtgcacccgcacaatttggggccgtgatggtgcccaggtccaacttggacagctccagcgtctcgatgaaatagggcaactgcaacttttacaatttgtacgaagaccattgactaaattgaccgaaaaacaaacaaaatttcaatgaaaatgagtaatttttttactaaattgatacctttttggcataaatttacatttttgggcccctcaaaatcacccaaaaaatcggaatctggaaaaacaacgcacatgaatggtggccaactttgtctgaattttgttccgaaccgcaccgcaccagtaattgtcacggcaaaagtcgtaaaacaccctggaaatttgaagttaatcacgaactccaaatttcgaattttcagaatttaaaaattgctaaaatttttcataatcacagtttaactattaactattttttgtattgtaataccgagaggcgatcaggttgaccaacaggatgaactcgttgttgctgtactgctcccgctcctcctgctctgttgtcttcgtcgcttctccgttttgttttttgtgttggccattgttggcgttgcggttattgtgccgcgttgtcgtccagccgaggtccatccgaacaacaccgccactatcagcagtgggctgctcatcacctccgacaccaccgtaataaggggacgaggacgacgacgaattggtgacacccgaagcagcggcacagccaagtccggcaatcatcgtggccaactgcctacggtagggggaggttgaaacaaaaatatgggttatggtacaaaaaacatgaattttgcgatgccagaaagatggcacagtgaatatttgaaaaaaaaactaagaaaaaccaatttttgaaaattaaacaatttcctcaaaaatgcctaccgcatcgctagttcttacggtatattatttatagtcttactacggtaggggaagacaaaaacactcacttcgcaaattgcgcattttggagagtgtaggcgacgcgcgcgtcggacaatttggcagccaatcgttccagcg

SEQ ID NO: 27495 - DNA, 1852 bp, Heterodera glycines
aattgcaaacggaaataatggaacgcaatttgagcagacgctagccgaaagagaaatggaatcatttttaaaagttttaaaggaaagcgaagaaacgctgagggatttattggctcaaatcgaattggaccatttggtgccaaattcggcggagaaattagtcgaattgaaagacggaaagctaattgaaagcccatcattggaaaacattcaaaagcaaacagagcaatttgtgaacaatggccaacattcgcaagaagcaattgatatggcaaaagatgcgctgtcatcaatgaacacaattaaaaatgggcaacttttttttcatctttccattgaaaatttgaaaataattacagtggagaaaaagcagaagaaaatgccaaaaattttggctttattatcgcgaattaaaatctcaggaaaaaagaaaaagacatgaacaaagttggcacacaataagcatttttaatttgctaatattattaattaacattcgtaaatgcagttaaattgaaattttaaagtttaaaaaatttgcaatttctacctattttcaaagaattaataaagtttcgtcgtttttttaaataattgtttcaattaatccattccaaaatgtaaaggaatttaattttctgtacatttacaaattgtgcatttatcttttgagaacacattcataaaaatgaatatttcaattttttaggtcatcgttttgccgtacgaagttttgttaaccccataaatttttgtgaacaaatccgcaacagaatgctcatttattctttgccatttattcaataaaatttttttttcatttttatctattacaaaaatcactggattcagagcccaacgttaaactttaaaataagagttaatatttctaaaatttcaccagtacttttgggtaaaattcgtcataagcctaagtttaaaataggaatgggaatttaagtcaaatgatttttttctgctggttcaaaatacctttaaaatgaattaaaaagcattttaattttatttgaaacttctgaaaagcatggcttttttctattttggcatttatattacatttttgcatttttatattttttcatatttgaaacaaagtgctgaataatcgagtcactggaaaaaaaagtatttaacttaataaatttccatccctattatcattccacaaattgaaaaaaaagcactgttaattactaagaccgggcccggttaattgtcgcttcggtccgggtagagaatattgattatttatttgaatttgcgcgccatacagtaagctaagaaagactaatgattatttgattatcttcccccccccccgtcaattttcccatcgttttgcatcattcattttcatttggctttcattttgcatctctgctgtttcgcatttcttttgatccacttaatcgaaattttatttacgagtcgaaaagattattttgggttttccgaatctgacattaattccgacctatgtcgaaccccgaacccggatccgggtaaaaagtcgaaaattcaaattttataattctcatttttgggcttaaatgacatatgtatatagggaaggaagtaaactaaaagtcaaaaaccctctaataaaagatcatttcaaccatttctagaccaacactgagaaattcgaaaatttgaaatagaaccgaaagaattgtatagaaatggcattttctaaatcaaatatttaagagattttaaactggtaaaatgtcgatttctttgaatgctacaaacaacgatttcacaccagcagcagatgagggtaaagagaaaattaaaataaatattgaaaattaattaaattaaataa

SEQ ID NO: 27496 - DNA, 1226 bp, Heterodera glycines
  unsure (1)..(1226): unsure at all n locations
agtgcaggaaattattaaattttaaaaattnnttagttgctttntaaatatgccaaaaaatgtaggcttaacttttntagtgaaaattcgatcactcatattttttgctaattgagcagaagcgtaccaaactttgcagggatactccccggtaaaggactaacttacactgaaatgagcgccgaactagctggctcaaaaaaattttcgaaaatctgagtctttcgtttttatttattttttgcaaaattaattcttaaatattttttcagaaagggttctgaaacgcaccaaattttatttacatgttagtttaggcactctgatgctttttctatcaaaaagggagatgaataaatttttaaaaatttttaattcctttttaaacaggccaaaaagtttaggcttaactttttagtgaaaattcaatcactcatttttcgagtagtgatcagaagcgcaccagattttgcaggggcctaaaaaggtcaaggaaaggcgtctctgcgttgatttagcagtagtacctatgaatttaaattttctatgaatttttaaagttttttgaaatttttttaagtgcaaaagtggtggtgtctgcaaaaaattttcaccgggtttaaaaaatctaggaaaattagtaagcatttgtagtgttccgatacgtatccctgcaaaatttggtgagcccctgatcaattacaaattatttatggacgatcaaatttttagaaatttttatttatttttgcataattaattcataaatatttttttcattccctatagtctgtactttaattctgcgttggagttttgctccccataaatgtttgagtaccccaaacggacacttgaaaaaatcgatttttttgttttcggggcagtccccccgaaccgatgcgcccagatttatggggagaccgaatccttcgggaataacttccctataatctggactttaattctggggtggagttttggtccccctaaatggttgagtacccccaacggacacttgaaaaaatcgatttttttgttttcggggcagtcccccccaaccgatgcgcccaaaattatggggagaccgaatccttccggaataacttccccataagctggactttaattctggggtggaattttggtccccctaaatggttgaggacccccaaaggacacttggaaaaatcgattttttttttttttggggagtcccccccaaa

SEQ ID NO: 27497 - DNA, 1688 bp, Heterodera glycines
gctcgtctactccatgctgaatttgataccatcaagcgggggcgaaggcagactccctgctgtgcaaatggcgccattcacacagagcaaatgagctccgaattgaacgaacttcaaagcccccctcgtgtttacttggaaggcttggtggatgctgttgacgagagggttcgagaggcatttctgaacaacatgatggcgttcaacaacctgttcgcctttgcatctacacatggcgaaaaggccccacctgagcaaatggggggccgcctggacacgtgcaaatacaacggttaagaatcaacttatacatttttaataaaaaaatttaggggaattttcgttcctgttcagcgacctaattgccccgggggtccgtcgcccgtcgtttgctcaggtttatacattgacgccggaagacgctttgaatgtccgtgaaggggcattacacaccgcagttgcgccgcacatcagacgcacaatcatccagagacttgaggcgctgatgcgggcaaacccatttggtcagacattccagacggtgggtacgaagattgaggcagctcgagcagcaacgggagaacttccgcattttcgagtacacctacaatgaatcaatttttgattaaattaaaaaaatttattaaagattgccctgttgacggatcggcacttaaagggggttccgcttcaaggacgcactgatattactgttattgaacgagcggatgcaccgactgccaaacaagtggctgtaatttgggtagaagaggatgggctaccaccacagatcagcggtaataacaaacgatccaaaaatagtctcatcataaaataattaagctttctgggtgtccgacaaagccgggaagatgcgcgagctgaagagtggcatgccgcaaatcgacccgtgctgcttcccactactccacccacttggcacacttggatggcggtggtttatgaagaagcgtgggtccgaggttataacgagaaagcctatcaaaatcaaaaataattaaaattctcaagaacgcccatcatgaaatgcagcaacaagaggaaccggatttggaccaaatttccgacgacgaattgggcgacgaagttccaatcgatgacattgtgggtacgcagaagaatgatgaggaaattgacgaaatgccggagctcgaactggaattggacaacgatgttgccgaggaacaggaggaacctgatatgaatgctgtgggttcgtctactgcacagccaaatcccggacgcaatgaaaatgaggacgtcatctttgaccatgaagtggagactcgtggaggccggaccaacatctctgaacgacagttctaccgctaccgcatggcacttcgggggtccggcaagaacaccttccattggttgtggttcgcgcgacgactcgccgagtacttcaccatctctgtgctcaaccggatcgagcgaaacgaccttgaacatctgaaggcaatccaggtcaagaagaactaccggcagcttctagcccgtgaatatatcgccgccatggagaagggggtccgacagcaaggaccaaatgccaagctcggccgtgttttcctcatgccacagaccttcgccgggtctcggcagtattaccaagggaagtacgccgacttgatgacaatggttcgacacctgggggctccgacttggta

SEQ ID NO: 27498 - DNA, 914 bp, Heterodera glycines
  unsure (1)..(914): unsure at all n locations
cttacgtctacctcgtactattttcatattatttntgttgtttttcacattgattccaatctattaaattgtgatttttcgatttttaataaattatcatagtacaaataacgcactctctgaacagcaactggcgcttttcgaggaaaatagcactgaactcgagagcttttacagaaatgaatcatctaaacatttattgtgcgctattgaataaatttctgttaaacatttcatagtgtaaatgaaagttcccgatgatctaaaaacaggacatgtacaaacacaacagatattcctccgcccatctccacccattgttggcaattgtgctcgactgcagcacttcatgatagagcaaacacagcaaattccaccgattgattttggggttttcgtctttcattgaaggcatggcactgcctcctccatcggccaccagttgaaagtgctgctgggcagccttagtgccgagaaaccgggaaatccgtattgccgccgttgcctaagtgtggtattcagaacaattatttaccccccccccccctaaaaaaataatttaaaagtttcggcgattttttgaaaaattttttgagataataattcctcattcatttttgaaaaaattgctagaaagaatttccaaatttttttaatgaaatttctaataaaattttgatgttttgaaacctttttgaaattaaaaatatattggcaacccaccagatagaaagagacttttcgctttctattgccagccataaagtaaagacgtgcagcatgttcgagtagtatagcgtcaaacaaatcggaattcaactgaagagatgccccaacactaatcatttgctgagccgcctcctcaaagangtcgagccgacataaaatctgcgaaaagaatggaattaattatt

SEQ ID NO: 27499 - DNA, 997 bp, Heterodera glycines
cgctgtcccaatgaatgaaattgaagtaaagcatactgccccaatagggactccaacagaggacgaaaaacaccgaaatggcaattgtgtaaccggcgatgcgattgacgggcaactgaaagaggcgcaaaagggggcataggaggaaaagcgaagggcggcggaacggacctttgaagttgttgggaaagagcgagaacggcggaaaagccgacgcatcatcaaagcgtaaaagacggtgatcagaaggatgggcagaaagaaccttcggggcgagggggtaaatgcacggcaaaaaaaagggggggggaagcagtacccgacgatgaacatgtaggagatgaacacggctaaacaaacagacggacaaaagtaaatcgatcaaaagcattcattggcactcacaaagcatcgtcccctccaaatggtccatgcacttgaaaatgcgaaccctcgccagtcggtaggggttttcgagtagtacttccttcagcacaagctccttgcttgacgattttacgagcagcggggagagaaggacgaaagtgagcaaagtgagcagacaaagttggaccaaaaccatccgacgcctaacggagggggggggggggatttacaaagggttcaaattggaaaaaagggaaattacgtcgtttttttgtgggggtggcaaacccgaagaaagcgatcttaaacacaattattatggactgacattgagcagagacactgcaattttgttaccaaaggccattgcggcgagcacaaaagtgctcaacgccctgccgacatgttccaacgccctgtacaccttgcaaagcgcggtgccaaacatccaaaaaccgagcagcttaaacaggggaagagaatgggtagagagagggcgagagagagggagagagagtgagagagatagagagagagagagatgggggggggggaaagatatgagaggatattaagtaaaaatataagaaacaaataaataaacggacag

SEQ ID NO: 27500 - DNA, 1066 bp, Heterodera glycines
cgggtgttaagtttggttatcaattgcgtgtcattgtgccttcttggtcgtctgtatacacaacgcgaacatcgaattgaggtgggcatatatctatattttttgaaatttattgcaaaagcgaaaaatgatacataattaatatttaaaaattaaaaaaaattatgaatgaaaaatgaggcattttctcagtggaaattttgaatattttctgagaatttaaaaaaaaattaaatttttccagttccattgactgtgaaatcattttacaaatagaattctgaattctgatcacattagtccaaaaatttgaccgaactatctctgatcaatttacaaaaattgattcgattttcattaaaataaataaataaaaattttgattattagatttatgcataaatctttcaaattctgtgtggatttcaaggcgaaaaagcagctgaaacgcattcactatctgttagtcatttcgctggtctccactctgacggtggccatccccaatggcatttcgttgacctcggcatggtttggccggttgaacatcgctttatccgatccggcaaattggatgattgcggccaaatgttccacgaatttctttgtttatttgtttcttaaagcggtgagcagtgaaaaaaaaagcattcaaaatttttcaagaatggaaaaatttacatgaaaatttaatttctaaaaattgaatcaaaaaagggtaaatgcacttaggcattattattaacaattatttaaatttaatggaacaattctttaaaatgttaaatttaaaatttaaagcaataataattaatttaccgttaaaatttaataattattttcttgttttttttaaataaattgaacacataattgaagggctatcgacagcgcatttacgaaattttgggctgtgtgagcattgatcaacggttggaaaggcgatttggcacaacgagctatgcagctggtggcattggcctaaatgttggcaaaattgctgtgatagaaccgctcccatcacatcaaaaggtggtggcaggtggcacgcccttaaggggggggg

SEQ ID NO: 27501 - DNA, 1451 bp, Heterodera glycines
  unsure (1)..(1451): unsure at all n locations
ttgaaaaatgggcatagatgcttttttatgataatanttagttatttttttcanaaaattctcccaaatncgccgananattttcaattttttnttcaaaatttatanggcgtttaatgtaaaaaaataaatttcggggggagcagggaaacgttgtgcatccgcttcccncatatcaattaaaaaacatttttttttttttgcattcagatcttccaccctnttgttgtccttttgccaagtggacgaattgcgaggcccaaccgctgcagcaattgtcgctgttgagcccaacgagcagcagctgaacacgccggcacaggccatggtcaacacggcacggctcacctttgaggaggccatcttccccgaagtgccgttgaccgccctccaattgttggcatttgtcatcaaggcaagacacaattgtggcacttttgttcactgctcaacaaatttctctaaatttacataaatgtccattttcttcgattaaaaaaaaagagtttgccaagcaatttcctagcatttaaatttttttcaatgataaaaaacaatgtttgctctctttaaggaaatttttcataaaaatccaaaataaaagccaaaatttaaatttttgtacatactttttgagaatttagaaaaaaatttaaaagaaatttaaaaaagagagattttattgaaattattgtttaattggtcaatttttgcttaatcctttccaaattaaggagtccgtcgatgttggcagaggaattcgtcgccttttctcctcctccttcgaccctttgtgtgcactcattgggcaaacattgcgaaccgtacgcattgatccgttgctgtgccctccgttggcgccattccatgccaaacaaattgctgaagcactgcgactggctgaatgtaatgtgaaaaaataggcaattaattatgggaaaattcggacataactaattaaaacgaattaaaactgaaataaaattcgaaattaatcccgataaatgttggaattttgtgcaaatgaatcgaatgtagtactttttgaagtgttaattccatgtcatcgaaaatcgtttttccaactattagagcgtttttttgataaatcaaaaaaattcctaaaaagatttgactcgagaaaaaaaaactgttttatatcattttaatagtctaatctgtcctccacaaaatggcatccaaaatttttttgtcacctttcaaaagtgccgaaatttttttattttaattttttttataattctttcatcaaaatggccattactggtttttccagctttaaccctatatttattgcctagaaattttttgatttattaaaaacggaagataattatgttccaatcccaatattaagcccttcaatagcctttcaattaaaaaaaaaaacaggaaccttttttgtttagcgttggcaaatgacgacgact

SEQ ID NO: 27502 - DNA, 772 bp, Heterodera glycines
gtcattaaaaaatcagactttgacgcttctcaccaaaataattaaaaaatttggcgttatgtctccattttctcactattttattaactatttagagattttttatcactaaaagtcgcggctctagtcattaaaaatctttgaaaaataatccccccgtctccattaaaggccctgtctccaattatgtccccccttctgaagaggttgaaaaataatccccccggggccttaattagagaatatacggaatatctaagaaatcagaacaaattttggtcgctaccccaaaatcagaacatttctgacaaatcagaacatttttattttatcagatttggaccctttgttgtgtcatttattcaacaacaacaaatacaatcaattacaaatgaataataaataaataagtcagaggttaagagagagagagacaaattgtgtgggggtgaaatgcaaatgataaatgagaatgaatgaagtccgaagcgaggaaggaggagggaagagagcggtatttatgggcgatgaaagtgatgacgtgtcaattgaacataatgccaagaaaatatgaaatggcaataacacaacggcgcgccaatgattcgtctactcgacgattcgtctactcagccaaaaagtgacgattcgtctactcagacaaaaagccatgattcgtctattcaacgattcgtctactcgacaattcgtctacccagccaaaaagtgacgattcgtctactcagcaaaaaagtaacgattcgtctactaa

SEQ ID NO: 27503 - DNA, 890 bp, Heterodera glycines
  unsure (1)..(890): unsure at all n locations
gggtcaggggttcggaatcggttgaaatggatgtcggatttgtgatcagtgtttccgaaaacctctagaaacatgtttttatgattttttgaaagttgaaaaaaattcataaaaaagggggggtaccatctaaactattaccgatatcaatacaaaatatgaaaaaattaaaatgctatttaaagattttcgtaaaattttcttgtttagttttgcctttcatcaaattgatgttaaaaatttcagatgaaagatgaaagttattaaaaagaaaaataatttttttatttcatttgtacttaaaaataaatatttaaatattagtaaatataattttcatttttcctatttgttaattttttaaattataaaaacattttgaaaacaaattcagctgttcaacgcattgttgacctgcatgttggtgttgatatgctcaaaattttggacaattatgctgagggtttttcgggtgtgctgaaagatttaagtgccaaaaatggtcaagcaacaacattcaatgccatgttcacgacggcatatttgaacattttgtccagtttaagcaacaaatgctatgtgtccattgaggaaggaccttttggacgaatcggctcaattataatcgtaagaataatttattttataaattatttattttgcattttaattttttggagagttaaaaaattgtttttttccgagtccattaacattttttttttgaaaattttacccaattttattattttaaaacataaaaacccattaataatttcttggaatttaacacaaatttattatttgaaaacataaaaattaattacaaacactaagaaattctcaatttttcttccanaaatttaaagaaattaaattattttaaattt

SEQ ID NO: 27504 - DNA, 1026 bp, Heterodera glycines
  unsure (1)..(1026): unsure at all n locations
tcataaanagtcgattgggactcataaaagtcgattggacccttccagtgcattagagccattaatgttttattaagaaatattgttttttcatgattttgcttttgtggattgttattaatatttttttacatttggcctttttcgccaaagagatttttttattatcaattaacgttaaatttaaacattaaaaagaaacctaatttattctgtacctataaaatgtcagaactgaaagacgcaccgacgcattggtcgggaatggacgaaaatcgggaggaggaaatgatgcgcgagataatgacgaacggacccatccaaattagtgtaaatgcatatgatgatatttacaactatggtgaaagcagcaatcgaatcaatgtttacgtggtaagacaatattttatgtgaattgaaggaaaggtctacatacagaaatggcaaaaaaaaagcaacctattatacagttaattgtatagttcaaaaaaaaaacccaggtcattaattccgccccgtttttatagtcaaaacgccattgtaagccagctggatatttgtgtgggggtcatttttcacgaggtttttttcacacatatgattttgggaatttgaagacttccattaaatttttattgccataatttttgaatgggaaggtctaataccgacacggttttttgagagaatgaaaaaatgtaatctaagggtttaagatatggggaataaaatggttatacgtataattgccaataaaatgttaaaaaatctggtcagttgatgcggtaaattagattcgtgagcataggtatttaaaaaaagaaacaatgctaaaaaatgcattatcattagggctatatttcatagttttttcatccctatgatatgaaacggaaacatgttttttattttggcgttttgcccacattttaaaacaaaaatgcaataaaaacgaaatacactctanaattttattatttatttattgacaaatttctaaaaactatgtattcacccttttttttt

SEQ ID NO: 27505 - DNA, 2319 bp, Heterodera glycines
gttagatgcttgacatcaaacgccgcatctgtgggccattgcaatacgcaccaattgagacaagtgcaggtgttggatttgtgtgcactgatgttgaggcagctctggaggcgcgtctttcatctgccaaggacaatctgatcagatttggcgacgaaatctacataaagctgagcggcgaccatggccagagttgtacgaagattaccgtctcattcagccaggctgctcggtcaaattctccatcaaacaatttcgtctgtgccgttttccctaccaaggatagccgcgaaaacttggagcgctatggaatcacactttgggaacaaattgacggaataggcacattggcgggcaaacgagtcaagtggtaaatttgaaaatttgttttttaccattttttgaattcaaacggtttatgggcggagacttcagttttatttggtcaatgatcgggcattgtggttctgcagtgacaacatttccgtctccaatttgcagttgcagaagtgatcatttggtgtaggagggcgaaatttgtgaactccggacaattgatcaaactgtgcagttcacggagcaattcaccagagccatagtgaatggcgaaaaggcaaacgcagcggtcagatcggcgatgatggggatcacgaaaccaccgcttctcctgtccattggatttgaccggattatccccgcgccatttcacgttttccaggggattggaaatgccttaattcgggaactcgaacagcaggaaggatgtgtcgaaattgctcaacacttttttcggagattcggcgcgcggagggagcaatttcgtaaacgagacatgactgggaattcaattagaaaaatccttgtccatgcttctgaaatggaacatctcttttcgacggattggccaattacgatttgcagaacccttgtgcacctcgggaaaattcaaaaattttcaaaagtcccttttttctcttttcacaaacttaaattcgaaattcaggcagagccattgtcaccgaatgacctggatgagctagaggagcgtgtcaacgattttaaatcttttttgtctgcccaggagcgaatgcgcgggtttctctcaaagaagccgaaagcacatcttttgttgagccattttgttcccttcgctcgcgagcacaagtttcttggccttttagatgaacagggttgtggtgaaaaatgttttctatcccattaatctgaattttaaggtgatgaggcgctccattccgtttggcgccgacttgagcaactgtggaagtgtatgccggacgcagaccaaattttgcagcaattggagcaccattttgtcaacaattggctcctcgacacgggcaaaattgatgaaatgaagcaggtctgtatgtttggagggggtgattgcgttaaacttgttttattttaaaatttatatataataattcagagacaaagtgatcagagggaagagcatgatgagctcgatcaatctgaagaagaaattgacgaaatttcgcttatcatctcattgattgatggtgatttagcaaaaagaaattggtgatcgacgggagacggacgaagaaagcaatggagaagaacaacaattcgattttgaataaaaacagttggatgaaaggtttttctttgtttttacagaaaataaaatttaaaaaaaattcttggcttctttaaaagttgttttatcatttcacatatatttatttgctttaaaaacctcaaaatacagctataacatgcatgggattcgaacctgggaccccccttttggtgactaactcacagaccactaagacgaaaaatccagcatacttgtacttggagcccaaaattgggccgctgtgtgatatgttttgccaaaaaatttttaaacagatttttgtttcttgaaaaatttatacgtttggattttttaattccaatttattaggtcgtataaaaattttgttgtcctaactcgatttgagttggcataaatttttgaattctcacacttttcttaaacataattaattggtgtcattcgataaagccaaatgagtcgcaatgttttgtggttacgcatttttcggaaaattatttcttacaatttttgtaggattttaggctaataagggtacttactacattggatagagcgaagttatgtgtaaaaacaaaaacaaaagttatgaggcctcaaaaattgaaattttcccgtttggattcgaaaaaagccattgtaaaacacacaaaaaattgaaaacaacaaaattaagtaaactatttttaaaaaaagcaaaaaaacgaaccccg

SEQ ID NO: 27506 - DNA, 1735 bp, Heterodera glycines
agggaatgggcctgagttcaaagagaatttacacaaaaacggccaagtatttactgaccgttttgacatgtggatgcgtgtctggagcagcaaaatcgctgagttccgagaagaactttatgacaaaaagttcttcggaacaatccttggttacggtgaatcaatggagttccaaggccgaggaggcccacatgcccacattgtggcgcaaacagacctggacgcagttccatatgtcattcaggaatacatatgggcgcacattccatctttgcctgataaagatgacgacacgcccattgcaaaaatgcatcgcgaaatccgcgaaacaatgcatatgcaactgcacagatgcagtgacagttggtgtggtcctagcgacccaatttacgggcggtgcaagaaggggttcccagccccttactcaaaatgtacgattttgcgcccggacaggcccgcgatgtatttccggccttcaccaactgatggtggtgcccaattagaggtaaacggcctaatatacgacaactcacatgtcgtgccgtataatccttatattctgctacgttaccgagtacaccataatgtactgtttgcatatggtaacaaagcaaatattaaatacgcactcaagtacccttttaaagggccaggacattgttatgtcgagtgcaaagaagagtccggcaataaaatcaaaattgacgagccggctcaatatgccaagatgaactttcgtggtgcaacggaagcatatgccattgttcattcaatgccatttgcccgtctttcgcatcatgttgtcaaattggcaattcatttgccaaaccaacagcccattgtatatagggctttccagctggtgagcaaagctcaacaaatccagcaaggcgaactgccagaaacgcagtgttcagcctattggaaacaatggcaaaatgagtggaagaatgatccaaagtttaaggacattcttttcgaaaaagtcccagagcggttccgatgggcaaaggacaaatgggtcctgtacaaaaggcagcaaattaaaaggcctcctatcggccgaattgttcctgtacccccatcggacccggaaaggttcgcgctctattcacttatgcgtcactttcctggagacccagaccatcttaagatggttaatgggttactttgtacctcattcactgaggctgcaataatgcatggtcttcttgaagacgacaaaatttgggacaaaactctggcggaggcagctctgtcgcgctggccagatcagatgagatggctttttgtgagcatcctggtctatggccagccgagtaatgccatagaattgtggaacaagtacaaagaccaaatgtacaatccgcaaggcattattactctggcacagcataaagtagcagagcttgaagccctagccgacattgattggcggctgcacagctgctttaacttaagctgtgtgcattttagcctgccagacccgccaacttcaattgccaaaaatactgacgcggcaattgaaaagtttttctttggcgatgatgatttgaatttgcctccagggcaaccaaatcctcgtccacagccaaatacccctccgccacttaacagcgaccaacagaaggtctttgatgctgttttgttggcaatacagtcgaaccctagggattcgactgtcccccgccgtttcttcatatacggcgatggaggcacaggaaagacattcctg

SEQ ID NO: 27507 - DNA, 1848 bp, Heterodera glycines
  unsure (1)..(1848): unsure at all n locations
ccggtataatttgccaatttgcttcatttttgcaatatccttccacataattagttgtttctgttccgctgtttctgttactgcttgaactacattagaaacattttttcctttttcagtccccgtcgaatgattttcttcttttttggacccaacttttgaagactcccccgcaggtaagttccaacttttcatctcaacaaaaaattcttttatggttttttcggtgaataatgtcttcatattttctgttaatgtctcgacactatgccacttgatatctaaaattgcatttattaaaaaaaaacaaaaataattttaattttcgtatttcaaatttttagggtgctaacattcaattatctctcttttaaatgtcatgtcgagcaccgctttgaactctctccggtgtaatttttcaatccattcccgaattttggttacattttccagtttctcttcactcttcattgcttcgtccacgacagtgtctttccattttttgaaaaagtttttcgttgattttttcaaagaatttttcatgaaaattttgctttgctcataaattttatccaatttattgccgaaggcgattaattgttccttatccatgttaaagatcggatcatataactcattaaacacataattgcgcagttttacccaaatttctaactgattggctttggccaattcccgtttcaaccacctggcgaacacgaacaaatcggtgccaagtgtgatgcttattaaccagagcggagcctcatttttttgctgatcaaaaaacaccttcgcataatttagacaaatacgtcgatcgtccaaaaactctgaccattagagatagagagagagagagagagagcgaaaaaaaggaagcgatattgataaaaagaaattgtgagcacacagaaatcgaatagataatagagaaattattgaaaattgtttactccaagagggagaaaagagagagagaatgaatgaaagagaaatagatntaggaagagatttttgggcacagaaacagaataaacggttttaactttgttgaaatagagaagatattcagtgtgagagagagagagagagagagagagaaataaggaagagagaatgaaagattgtgagagaggactaaagaaagagagttagagagagctcgagagggaagagagagaaaaagaaggaagagataaaagagagaaaatatcctgttaaatttttgacgacttgccgtctttttctgtgtaaatgtgctcaagcggtccgccgggcacaaacagtcgctcaattcgctgccggtcgccaattagcagtgccaaccgtgtcttcacgcacggcaccaacagaaagtcgcccagtattttcggcgcttttcttttgacagtgttcaatgactcttgcatccattgtgccatctggtcaccgcgcacaaattgttccagcgttcgatgctgttcgtccgcttccgtgcactcgtccaagccgcgccaacgcttcaccaatttttcgttgattttgtgtgcatttttggcactgatcggtgccataaatgcgtgtagtttgatcaatgtacataaatgtactgcatattccgggttactgtatgccaaagttttcactgccaacacgtgtgcccagatggtcttcaatgtgctagcactgatgttcaaatcactaattttttctgatagcatgttcaatgaattgatcaattggcttattgtccaatacagtaacgctttttggtgagacttactcatgctatggttgatcagcaatgttttgagacgaacagcatagtgttggataaataagtatgtctgaaaatgaaatggttat

SEQ ID NO: 27508 - DNA, 949 bp, Heterodera glycines
caatattcattggcatacccttttttatcaatgttttaaaaatattaatcactggttaaacccttttttatcagtgctcccaaatgaatattcattgttaaaccctttttttgaaactgtttaaaaatagtaatcacttgcaaaccctttttttaaaaatgccaaaaaatcacacccggtgaatttgtaggaactgtaggacaatgcgtgccaaatgtgcaaactgcaccagcacataggggatgaacgccatcaacggaatgtacaggtcgggcgcattcgcatcctgacagggcaacacgggcgcatcgccctcacatttgttggcccaattctatgaaaataagggtttttgaaaaaaaaattaaaaacccgcctaaaatgctaaatgtatagaatttcatttgtatgttgccaaaaattttaaaagaataaatgagaaatcaatttaatttttttttaatttcctaattttaaaaaggtaaaagttttaaagaattaaaaaagggacaaaaaattctcacccgatgaaagaacgggaacagaatgagggccaactttcgccgcacataattggtgtccaccgtaaaataatacttttggttgaacgacgtggacgaaagatattgggtgaactgcaaattgggcgggaaaatttatttgaaattaaagtttgccccccccctgacttatacaaattttgttactttaaaagtgcgccttattctggttgaaaatgcaaaaaccggggacacaggaacatttccggtacaccccaaaacacagccgggaataaattttaaaaaaaataattctaactttgaaatttttcaagaaaaaaatctttcaattataaaattttttcgttgaaaattccatgagaaaagattctgcaaaaattttttcaacgatattttaaaatgtgcagttgacaattttcttattaaaa

SEQ ID NO: 27509 - DNA, 652 bp, Heterodera glycines
tgtatgttaaaagtatcatgtaaaggaaataagtaccaaaaataaaactatggactaattggtgcaccatttatattttcaacaaaattttctactcattcttttttctgaaatatgaatttagaaattctgtcattttcttaaccataacaaagtggtttctgattgtgagaagacaaatttggaggggggaaaaaagcatacaatgacattaaatttaattcaaaattcgtcaattttcgaaaaaaaaaaatttattttttatttggcggcaaaagtgacgcaccgtcggaagaatttcgtaggcgagctgttcccgcttaaatgccggcataagtctgtggcgcactgcgtcaacgtcttcgcggtcgcccacgccaacaatcagcaaatccaactgaagcggaaacaaagggcggatcaatgaacgacaaatcgtttttttttgaaaggatagcttggagaaatttcattattttttttaataacaataattatatatgaattttcatgacataacaacaagaaccaagggcgtagctaggggggtaatgtaatttatgaaaaactcatgaaaattgagttttcccttcctattcactatttttggaggagtgcgccttcctttaaaaattttagaaatttttggcgc

SEQ ID NO: 27510 - DNA, 1247 bp, Heterodera glycines
atatattaaaatgaccggtttttgagagactgggtccctttttagtcgtttttgaaaatgccaatccggtccagtccggcgaatttttgcagttgaattttttaattctaagatttgctacaatagtaaaacgataataggtctttttttggtttctgtttttaaaatgggtcttatatggcaattgatctattaaaaatgtctaaaaatacagcattgacaaatttctcttacccgaactcgaacagaaagtcgaaattcaagtttcatttcattgtttttttgttagttggtcccgaacccgggtgagaaaaatataaatgaaatcagaggcaattaattcagagttacataaaattgatcatttgggaaaaatgaatcgaatttgaaattcgttaattttatcttttggtgaattaattgtttgtttactttaaaaaaaatctattgaaaattttgtttaaacttttcaagtagtgaaaatgactttctttagcagttacattatttgctgcatgcttttgatcacaatttgcttattctcgtgaggaaaagcattcgggtgattggtctagtggtatgattctcgctttgggtgcgagaggtcctgggttcaattcccagatcaccccaaaatttttagaaaattttaaagtttaataatttaaattacatataaattcattatcactttcatttacatacactaagaggttaattttcgttaaattttataaattttaatataatattttaaattttgagagagagaattttaacatttacttagctgtaattcttctgagactttacgaaaattttctgaactttaaaattcgccagctcatcaatgcaaacaaatttcaaatttcatttatgcaattaaaactagagatcggaccggtcggtttttttcggttttttccattttccgcttttcggtttccgagaaatttttgagtttttcggtttttttcggtttcagttttttttggtttttaaaccgaaaccgaccgaccgaatttatcaaaaaccgaaacaaccgaccgactttttttaatgcgatttgttaacagattttgtccaaaatgaccaaatttttgcaatttcgagccatttttttaagaaaattaaggatttttaattttggtaaacttatatttttataaattttgggtttttgtccaattccgtttcatatgcgtgttccagtgggttgtgctcttggttctgtctaatttttgctt

SEQ ID NO: 27511 - DNA, 921 bp, Heterodera glycines
aaatttgtttcggggtcattaattctgcgccgcaaatgtcattttgactgggcgccgcaagtgtcggcgccgcaaatgtcgttttgactgggcgccgcaaatgtatcgccgcaagaaaacgacaaaaaattattcattttctggataattaagtattttagtgccagtagatatttgtaacggctccaatgagaataaataccaaccatttcatcatttgccgcgtactttccgttttatgaaggatgacaaattttgactcgaactgtggcgggtcttctttccctgacaaatcatttgtttcttttgtgggcccaaaattggcgaccattggcaaataatcgtacatcccttggcaaaaattgtgattagtaattagttataagttttaaatcaaatattctattaaaataagtactcggatgtgtcgcaatgtttttgccgtgccaagtagcttaaggttaacaacaatttttcaaaaaacaaaacaattaaaattttgtccatttttacactcactggttagtaattggactgggccaattttgccattttgaatttgtgttaaaattggctccaaattgtcactgctaaataaaactgatgtatccacccaaccgaccgtgtcatattccgacaaaacttccttagaattgcagtggttttttgattttttaaatttaatttaccgccatggccaaaattttccacgcgaaacttttcgggtggcgcactcgtccttcaaccgtttgagaaaaatcgaaaattcgccattccaattcacagaccgagttcagctcagccatcttcaaaccaattaaaattaaccttcaattttaatttttcgcaatagttttaaaattacaaaaccactcaataatttgattaaaaaaacaaaaattaattattgaaatataaatt

SEQ ID NO: 27512 - DNA, 866 bp, Heterodera glycines
  unsure (1)..(866): unsure at all n locations
cctcggctcttttggttcccggtgcttnggtgcgttcacgtcgcgggtaccattagtaggcataattgccgaagcgaaaaccaaattatttttggagaaaaaattcaaattattaaaaatatatatttatatgtttttgaagtatgacgaataattgaaattttatatattaaaccaaatattttatttaaatttaagttagtataatttatgtgattaaaagtagatttttcaaatggggtgggaaaccattccaaattcccccaagaaatcatacaaataatttattgtggaagcaggagaaaatgagcaaaattcaaaaagtttcgttcacccaaaaaaaattttttatataaatttcaaacatttttaaaacttgaaaatttaacggaaaattttgccgatatttttttcatttttattaaacacggagagagagagagagaaaaaatgagacagagagaaatgacaacagataataattttaaaaaagaagtgaaaatttattaaattagcatttaatattatttattaaatttttaaaataggctataaaaacttatttaaagatttcttatgagatttaataactatttttataatttttactttatttttatgcgtattgttcaatttttgtaaaattttacattatttttttaaataattttttgagaaaaatcaaataatttacttatataagttattaatctttttctttatgcctgcctatttagtgaatacatcaataccattatttattaataattttagcattttggtgttccgaaccattaaatcaaagcttttatagttgaataacattaaaactctataaaattctgtttatatattaggttctttat

SEQ ID NO: 27513 - DNA, 1559 bp, Heterodera glycines
  unsure (1)..(1559): unsure at all n locations
tttaattattgtgnnatatcaggagatcattttttaaattatatctaaattctttaaaattaggggtctttcgggtcaatttatttgaaaatttttaaacattaattaatttatattttttaaaatttaaggttctaccattccatgacaaatatttgggaagttatatgaaagaggtgcgtcaggaaagagaaatgagcaaaatctaacattttttgatgagatcatttttgctagttaacataaaaaaaactattgtttattttgtgataaatttaatatttaacttttctcaacaatttgaatatttaagaataaattttgcaaaatggaaaaaaaaagttaaaataatgaaaaacccagaatttcggaaaaaaaactttaaaactaataagcgttaaaatattttcaggttaagtttgtcctttatcgggaaatatgcctgtaaaatttggtgcgattttatcaattatatataaaggggtaagttcgatacaaaaatttaaaaatataagcctaaaaaataggcatatcactaatttttattcatcaccctttttgagaatataagcatccgagtgccttattaattaacatataaataaaatttggtgcgtttcagagcattttctgaaaaaatatttatgaattgattgtgcaaaataattttttttttaaataatggaaaactcataattttgaaatttttttagaaccaataagcgttaaaatatttgaaggatatgggataaaaaagtttaaaattggttgattcttttccttttagtatccctgcaaagttttgttgtgctaatatttttaacatatttactttgaatatttaataaattaatgaaaaaaaaatttaattttttaaaacgattttttaaaattttttttagtaaacttttaaaaaatgaaatcaaaaacccagtgaacacactcaaaaattgcattttcaacgccttcttggcatatcgtccagcccagagccgaacacggaagacagcgcgaagcctttgccaccaccggtgccgccagcttcgccgccgttggcactgctgccgctaccaccaccacttctgccgaagagttgtgccagtgcgttgccggtgtcttcgccggcaacgccgtcgtcggcacccgccgtttttgtgccttttgtgccattcattgatcccaaaatgttttcgagcccaaatgagcgtaaccaatccggcatttggggcaatttgcctgcaattaatttaaattgactagaattaatttttatgccacagcttaaagttcattgttagtctataatgttgatcagaatttgtaaagaatagtacaatttcaaatcatgataaatggctgatgggaatactaattattttcaatgcccaatcgaaatcaagtactgcccagcaattagttggatttatgcttaaatctgaatcctgttcaaacagattgtgagcncaatttanaaccaaagcataatcagtggatcattattnttaaagagtttgatcatttcgatctagaatccttgtncaacaagttttgcctaaatt

SEQ ID NO: 27514 - DNA, 1032 bp, Heterodera glycines
tttaagaaaaaattttcgggaccaataatctagaggattgccataacacccatggcatacccgtgtcacagtcaatgtattccttcgcgagaccgaagtcgattatgtgcaaaatgtgctgtttccgagtggaactccttccgataagaaaattctcaggcttcacatcacgataaatcaagtgttttgagtggacgtattctattcttctcaacttaaaacataaatgtatagaaaggttgtgtaaaacatgggcaccaattgcattgcggtcatacaaacggttttcagcgtaaattttctgtcacaaagatcgaaaagatcctccaacgaatggccaagcaattccatcacaagcgcattgtacttgccgcagggaccaaaataatgcacttgcggtagcccctctacaatttttcggtttcatttgtaatgtcgttggctctattccagtttacgcctccaatcatgaccaaaaagaacaaataatggcattaagaaacaataaaattcagtcttttatagtatatttagttacataaaactccctacttcaagcttaagcctaagaaacaagccggtaatgattgaacgtgtaaacttgaatagaaccatataatcattccaaattcaattcagtatttgtgaatttccttctaaaaatacccaaaacattatcactcggcttaccgcaaaaaaggtcaaaaatcgttttactattagctccccttgagggaacctgtttggccaagcaatttgtagaaacgatattccagatgaagctgtggcgccttgcttttcataggctccaattttatggccacatgttcgttgttgtaaagatttttgccaagtcggagctcgccaaaattaccacaaccaatttttttgccaaccttaagtgtagtagtaatttattatattatcataagattaaccgataatccaaaaagaatagggtaatactgacttttactggtcccataaataaaaaataaaaaggctgtttttctacggttcttctttcccccc

SEQ ID NO: 27515 - DNA, 837 bp, Heterodera glycines
tgtgcccccccccccccatcagatcgctgctctctgtgctcctctgtccccttctcctttccctcctccgtccttcttccacttgtttgctttgtccgttgcatattccggcccggcccaaaccgcttgatcagttccgattgccctccattcagaaaatagtgcacacagccgacactttcgaatggctctgtcagaatgggtcaaagtattgcagtggcaatggccaacaatttttgtttcgtaagatttcgctgttcattcaaaggttggccacggtgtccgctcaatgccgtgccgatgtgtcccatttgttctgttccctgacccgactggtccaatccttgaaaacggaatgcccgggagctgacgagggaatggcacaatgtgccgagtgccgtaggaaaacggacattctctaccgggagaacaaatgggtgctgacatgtaagcaaaaggagtactgaagaaaaaatatttgagtactttagggatcgactcgttggggaagatgccctcgggcataaggtggggctaattagggagggcctcaaattagtgggacagaacaaacacactcactttggcacagtgatggcaattaccattggcttggcgactatgagcagtgccttcgattgcgggagtaagcagcttttgtcctttttcaatgtttattaagcccatctctctgattaagcgacggtctcttcaatggccaatactgtctgctcgagttccgcgttcccgacggagtgttgctgaactcggaacattgtgaggacggctcggagccgttggaggtggtgttggacatttgtctgtcggccaattgcg

SEQ ID NO: 27516 - DNA, 1583 bp, Heterodera glycines
tgttgttattattgttgttttggttctgttcggtgccctccgtttcccaaccggcactttcgaattggcccaacgtgccaaaatggacacttccgtcaaccatttgcccgtgccatgtgctgctttccattggctaaatgcccattaccaattcttttctcctatttctaattttatttttttttccatttttcccacttcttccgcagattctgctgcttcttctccgcttcgctccctttgcttttcctccgctgatcgctggtgtgaggactgagacagagacaactgatcggacgccgtggtcgtcggatcggagtcgaacaattcggggtatttctgaggaatttaaattttatagggaattggagggaaatgggcacggaaacaaaagcaatactcgcaaaagtccatattttttaagatctgtccttattttgagtcgacatttaattattttttggaaaatgtgataattgcgcacataaatcatcgattaaatcctcaaattttgcttgttgatattggcatgccgaactcttcctcaattgaacttttgaattataaattaaacatttcacttgaaatagacagtgtaatttcggataattaatttggggtttcctttactaattaaaagaaaaacttaaaatatgcaaatgttcaaataagcaatggataaagaataacattctctgattttgacttttcacctcctcaaatgcgctgaattggcccacaattgcctcgccgttgcacaaattttggtccccacaaaggcaataggccacttcgaccccattaaggtcgaccacgtcgcactcctccgccaattggtacggtttgcgcgggaaagtgacgtggtgcgcactgtccgcgatgcattccttcaccacagtgaaagtgcctaaaaaaggggggggggaagcaatgaaaaacattttaaacaaaatttaattgccaaaaagtgccgcaccattcgccgttttgtgtcgcgtcgtgcgacaaaatattttctcgtcctttggaaagcgtttggcgtacccatcgcagctgaacggaaaggacgttttgcactcgccgaactcgtccaagccattctcagcacaaatgtaacagttcagagctaaaaatgcttattataacctttgctcacagtaaatggaaaatattcgaataaattattttttaaataatttcaaattaccatttgcaccgagaaaagacgcggagaaaaagaaaattgctgtttttgttataagaccggatgtaatcatttatttaatcttagtaaaacaaaacaaatgattaaattaactattgaaatacgatttcaaatgtttattttgaaaagtcattcaaaaaacttcaatctcgcaaaatcgttttccttcggtgctttggattttcggatttgctcaatctcttttttttggctttgaccgtccgcccgaaaaacgcgggcgaggcgcacttttcgtcgtgtaattgggtggatcgtcgccacaggggatgaaatgaaatgaaatcgaatggaatgaggttggaaatccatcggtcagaaatccctcgaggcattcgcg

SEQ ID NO: 27517 - DNA, 1647 bp, Heterodera glycines
  unsure (1)..(1647): unsure at all n locations
tcttttttttccatttccaggcagattctgaccacccttcgctgaagagagagttgaaaagttntgctgaaaaaactacgaaaacaaaaatgtctggacgaattaaaaaaagcaatcattgctgagggcaaatacgtcaaatgtgtggtgtacaaaatgtaattttttgaatttacgtatttataaaaaattgaatgggggcacagacactgacaaaattcaaaaactacgcaaattcacaaaatttcctgtttgcttaaattaacccttttgacacgttaagtgcactagatgaaggaattcctcttaattgtttgcatttaagccaccaaatgttagggttttttttataaaattcattgcttttcatgccaaactttggctcatgcttttttgctaaaatttcttgtttttttaagtccagagaagcagcaaacaccctatggtggacagatgaagtcatttccgcatttcatttgctgtaaaatttgcagatttcctggtaattattgtttgtacaaatttttgttaaatcaattttttaaccccttccaatttttcaaatttttctaaaagcagttgggctggattgatgagagggtgtatctactaaatcattcacttttccatctcaaaaaatgccaaaatttccaaatactggagaggtgttggcaaaaaaaaaaatgataaataatctttctggcaattttgctaaaatgtctaaaagtcgcttttcttcataaaattactactagatttgctaactcatcaccaacttcgtccggttgctcaatgtttgcatcccttcaacaaagcccagaaaatggtcgacatctgtgtgaacccttaccattaccagatcattcaaaagccgcgtaattttttgcttaaattcgtcgttaagcacaaaaacggacggtataactgcgtcccggccaaatttaagaaaccagagcccatcatcgaaacaaaatcttatgaatttggcgtcattcgatataattaacgagctctattagcttatccgaaagtacaagattcgccgatatataaataaatgctttcggatgatggcaaacttatatataattttgaccaactgaaataacttgaggttttcttaaactttcatgggacacagttgaagccaacaccatgtgaggggtgttaccaaactgaaacaaaggacaggcccaactttgcctcaagggccatgacaatttgtcttagataagtcttaaaatatgagaacaattggtattttggagtagatcttcaactgtttttaaacttttttgcatattgaaccgcacgcaaaaaggagaatgataacaatttgtattcaaattttcaaaaagtatgaaatttgtttccattttcgtgtgaaaattgaacgatccttgaaaattttaggcattcatcccaaggttgtcgtaaagcgaaatatgacagccgaaaatggggacgacttaagcggcatgcaagacgcagttcacaatgcgaaagggcttgacgactcaggatatgtaataccattttttccgtaaatttattcttcaattggatttgtaattaaaaactcaggtgccgaacataacgctcaatgactttgaaatcgacacctcaaataacaaggaaatttgaagg

SEQ ID NO: 27518 - DNA, 465 bp, Heterodera glycines
  unsure (1)..(465): unsure at all n locations
caaatgcacacantcgtctgtaccagaaaaagctgtcagaagaagcccacaatgttgaaggcctaaatttggtgcaggtcattgatgaaaggatggtcagtagcctttatttgtggttactagagttcgacctggacactggatccaggcctggatttttcctggatccaggtccaggtccaggtcattttttgacaacctggatttttcctggacctggatttttgtccaggaaatccaggtccaggtcaaatatgaaaaaaaatccaggtccaggcaaaacaggaaaaaacctggattttcctggacaaaattttagaatttattatttcaagtgaccgatattttttcaagttttcaaaaaatgattaaatatatttaaaaacaaattattattgtaaattagatatttttnaatgttcccaagcaattaattgaatttttcaaacattttttttgattttt

SEQ ID NO: 27519 - DNA, 838 bp, Heterodera glycines
  unsure (1)..(838): unsure at all n locations
ttgcctttctcctattcagggcaaatcgtaataattcaggacattttatatttttcatattgcctttctccaattcaggacaaatcgtaataattcaggacattttatatttgcctttctccaattcagggcaaatcgtaataattcaggacattttatatttttcattttgcctttctccaattcaggacaaatcgtaataattcagggcattttatatttgcctttctccaattcagggcaaatcgtaataattcaggacattttatatttttcatattgcctttctccaattcaggacaaatcgtaataattcaggacattttatatttttcattttgcctttctccaattcagggcaaatcgtaataattcaggacactttatatttttcatattgcctttctccaattcaggacaaatcgtaataattcaggacattttatatttttcatattgcctttctccaattcaggacaaatcgtaataattcaggacattttatatttgcctttctccaattcagggcaaatcgtaataattcaggacattttatatttttcattttgcctttctccaattcaggacaaatcgtaataattcagggcattttatatttgcctttctccaattcaggacaaatcgtaataattcagggcattttgtatttttcatattgcctttctccaattcaggacaaatcgtaataattcaggacattttatatttgcctttctccaattcaggacaaatcgtaataattcagggcattttgtatttttcatattgcctttctccaatcacgacaaatcgtaataattcangacattttatattt

SEQ ID NO: 27520 - DNA, 1199 bp, Heterodera glycines
  unsure (1)..(1199): unsure at all n locations
cgcatcgttcggggggactgccccgaaaacaaaaaatcgatttttcaagtgtccgttgggggtactcaacattnnatggggagcaaaaatccaacgcagaanttaagtacaggctatagggaagctattccggaaggattcggtctccacataaatctgggcgcatcggttcggggggactgccccgaaaacaaaaaaatcgattttttcaagtgtccgtttggggtactcaaacaattatggggagcaaaaatccaacgcagaattaaagtacaggctatagggaagctattcccgaaggattcggtctccccataaatctgggcgcatcggttcggggggactgccccgaaaacaaaaaaatcgattttttcaagtgtccgtttggggtactcaaacaattatggggagcaaaaatccaacgcagaattaaagtacaggctatagggaagctattccggaaggattcggtctccccataaatctgggcgcatcggttcggggggactgccccgaaaacaaaaaaatcgattttttcaagtgtccgtttggggtactcaaacaattatggggagcaaaaatccaacgcagaattaaagtacaggctatagggaagctactcccgaaggattcggtctccccataaatctgggcgcatcggttcggggggactgccccgaaaacaaaaaaatcgattttttcaagtgtccgtttggggtactcaaacaattatggggagcaaaaatccaacgcagaattaaagtacaggctatagggaagctattcccgaaggattcggtctccccataaatctgggcgcatcggttcggggggactgccccgaaaacaaaaaaatcgattttttcaagtgtccgtttggggtactcaaacaattatggggagcaaaaatccaacgcagaattaaagtacaggctatagggaagctattcccgaaggattcggtctccccataaatctgggcgcatcnggtcggggggactgccccgaaaaaaaaaaatcgattttttcaagtgtccgtttggggtactcaaacaattattggggagcaaaaatcccaacgcaggaattaaagtacagggctatagtgaaagctattcccggaagggattcggtctccccataaatctgggcgcatccggttcggggggactgcccccgaaaacaaaaaaacgattttt

SEQ ID NO: 27521 - DNA, 1887 bp, Heterodera glycines
tctagagtccaaaaaaagaataaccgaatataaaaaataaataataaaaattaattaacagtttggaaaacgattttgaattcaaccgcaaaaaagcattcattcaaatggccgaaagtgttcgcgtggtggtccgatgtcgcccgcttaaccaaagggagcttcgaattaattcaaacgtggatttaaaaatttttttcataaaagtataaataattatttatcacagatttgcgtggaaatggtgccctcaattggccaggtctgctgaccctttaaatcctaagccttttatcacttttcaaaaattatctaattattagacattattaaaactaccatttttacaaaaacaaaatttttggagagtatatttttcaaagaaaatttgctttttaagctgtttatttttcatttttattgaaaaaatcaatttttttattcattccagacgaagggatgttaaggaaaaaattgacaaatcataaaatattcatcccacatagtaattatttggtttttattactattatttatttccaatccatttaaattctttgtttattgagttaattaaaaaaggatagtgagaagtgtctttaaaacccaattttaatttaatttaattccatttttccatcacacagtgcattttgcaaacagaaggttcatcggttccaaaagcattcacattcgatggcgtttatttcatcgattctactgcggaacagctttacaacgacattgtgtatccgctggtcgaagttggtgacaattggataatgtttaaaaattagttgatcatcttaaaatgataaattattttatccattgaaggtgtgaaaatggtttttttatttaaatttttccaaggtttttgctaattaaatgatccaataaaataagcataaattatagagcgtgatcgaaggctacaacggcacagtgttcgcctatggccaaacggggtccggcaaaaccttttccatgcagggcgaccaacaattggacgccgcacagcgcggcgtaattccgcgggcatttgagcacattttcgaggccattgccaccactgaacacaccaaattccttgtccatgtttcctatttggaagtcagtcacgaaacttcaaataattaataaccaaaataaatgaaaattttgaaaaaattttaagatttacaacgaggaaattcgcgatttgttgggcgacaaatgtcagaaattggatgtcaaagaacacccggaacaagtggatttgggggggggggtttgaatttattaatttttattccgactttaattcccatttagggcgtttacgtggccggcctttccctgcacgtgtgccatgacgtgagcgactgcgaacggctgatgacgaccgggttcaacaacagacacgtgggtgccacattgatgaacaaggactcgagcaggtgcgaagagtcggcgggacattttttagggaaaataaaaataattaataatatgtaaataaatgctttttgtaatttttagcaataaatcattttttattcgttaaggtctcactcaattttctcaatgtatgttgaagcattggatgagaatggaaacatccgaatgggaaaacttaatctcgtggatttggcgggcagcgaaagacaggcgaaaacgggcgccaccggcgaacggttcaaaggtgggaaaccaaaacaaataatgtgactaattaaaaggatcattagcataggataatttagaagcgaccaaaatcaatctgtcgttgtccgcattgggaaatgtgatttccgctgttggtggacggcaaatccacgcacattccctacagagactcgaagctgacccgtcttctgcaggtacagcaattagcagaataaatgg

SEQ ID NO: 27522 - DNA, 1318 bp, Heterodera glycines
aggggggcaatgaaattcgcacattaataggtcctatctgttgctcttttcccattttaggcgcgtaatctttgctacatggtggccaagcgagaaaagctgaagaagcagtgcctgaagcagtttgagatgcagatgaaactgaccgcttcgaatgtctttggacgggtgccgcccgtctcggcacgctgcatggaacggattctatcggaatggcgcgaggcggccgattttaaaccgacctcggcaccagtggaggaggaggacaacaccaacaaaactcgtggtcgaaaacgaaaatgaagccgaaattatgcatttgcgaaaatggggatatgaaaatttgtcatttttgtggaaagtttttggtttatttgttgtcattctgccttttgttctcagtgttagggacggtcccagggttcgccggagggtcgaaggcattttttcttgctttgattttcaaaaagaaattttggagaagagaaccaacatttgaagggggcggggatcgtactctccgcctgtgactgtcctcgagtttttgttgttttgcgtgacatttttacaaaaagttctctgccaattttcactttatataccagttcacccaatgattttttgatttaaaccgatttgtgcattaaaattctatcttggaatgaaatcacttttttatattctgttatcgaagtacgcaatacccaatagggaaaatattgatcatagtccccaaactcaaaaatgcttaaaaacggtcagaatcgatgttaaaaggttcgaaataggttggaaaaatagaattaggggcgcgcttgccctggcgacgagaaggcgggtcaatccccgcctactgcacgaaatggacgggactggactcaaccgaagcaaaaagaatgagggacgtacttggagacggtcggggcgaatcccgattcatcaatccgctaaaattgatcattcctaattttacccccttttcatccaatttctcatttgcatttttgctccatttcgtaccattcactttttgcccgtttctttgtcccatttttgcccaatcgcatccctttacaattctctcttcggctggctcatcttcggccaacttcaaatttcctttcacaatttcccatctttcacatctgccaatttacattcaatttttgtgcgcccattttctttgttcgcaatttcgcttctggaattttctgcccattttttgtccctctcacaatttgtccacgtgcattgccttttgcccgcccccttcgaaaattgtctatttaagcgcccccggccaaggggtcgtgctctt

SEQ ID NO: 27523 - DNA, 1062 bp, Heterodera glycines
gtaaccctggcaccagcgggtctcacaagcgcttttaagtgaatttcgtagattcgatgatgtcataatttgttgattgatatgcaatagaaattattttattcgaaaataattattcatcttttttattaaatgaattttgttgagtcgttgtataaaaaccaggaaatggaaattgttaaacaaacaattacacataactttgctcaacccaaaactaaatttttaattcttgatatcattggatagccctaacaattcctattagcctgcagtttggtgagaattagcatttgggatgtgaggtgagtttcagaatactttatgaaataatatttatgaattaattttgcaaaaaaaaaattattggaatagttagaattttttaaatttttttaaaaccaataagcattgaaatatttgcaggttaagttagtcctgtaccggggagtatacctctaaaatttggtgcgattttattaattatagaaagggttaagttagataaaaaatttgaaatataagccaaaaatattagacatatttaaaaaactcataaaaaatttttttaataaaattaatgagccatttttcaaatatgtgttattagagtgccttattaacgtgtaaataaaatttttcgtttcaaaactgtttctgaaaaaatatttatgaattaattttgcaaaataaaataaaataatggaaaactcagaatttacaaaaaaaactttaaaacaaataaatgttgaaatattttcagtttaagtttgtttccaatgttgagcactattttcgcacaaattttggcatttttttttattaatttgcagaaattattcgccaaatttttctcttgccaaatgggcccaattaaccttgaatgacaatccgtcagtgaagatcagacaattcgtcagtaatagagacaatctgtcagtggacaattcgtcaattaaatgtcaaaaaggtgggaagcgcaccactttgacgccagccgttttggcgccatacgctattacatttttatttgcccatgaattaaagagcgtggtatgattc

SEQ ID NO: 27524 - DNA, 1805 bp, Heterodera glycines
ccgaaagtcttatctcttcttcaaataatgagctcttgtagaccaaggaggggggagaactccaaaaaccattttctaaaattctgaaaacatcttgttttttttcaaaaaattcacatgaagctaacaaaatgccgtaatagatgagtttaaaagtcttatcaatgaccgctggcaagtgaaaaatttcgtattttgggcttcgctggctcaaaaatgttcaaaaaattgaaacaaaaggtgaagcattgctccgaatgacttctcttaattgaataaatgcctttaagactttttgtggttgtcgcctgaacaattgcggaaaatgggcgacaacactaataataataataatgaccaacaaattgacggttccaaacaaccggacatttacacattggcattgattttcactgaagtataaattaaatgcattaaattttgggttcaatttcacctgcagaaggcggcaccatcggatcatttcatctttttaaaactaaaaaaacatttagatcgttttccatagaaaaattagtgtttacaaacatactttggacacttttgttttgctgtaccatataagatggaattgtgaagcctttatagagtattaattttaattattaatcactaattaatgggtatttgtatggagaaaaagaaaaaattattgtctaaagcaagcactaaattaatttcataataaatcatttgttaccttaattaactttgtgtcccaatttcggatggtgaatatgtgcccgtgttgggaggagagtgaccaatacggcgccaatgagcacggggaaaacgtgcggcgagcagcggatgaacacgcagcagcagcagcagcggtgttcaacaggcgcagggaaacagcgcagcagcacgcggcacgacagccgagggaacggaacgcggaggaaattgcttatttggtgaagcggggcggcactgtgccattgagaccgaccatacgccccgcgctggacgaactgaagcccgaattggtagggcgcggtggataaatgtaaatgtaaagttggaattggaattgcactaggaaattttttgggactgcttcatctcccattttttcgcttattttcattgtctctattttgaaatttttaattcgagattccaattgcttaaagaaatattattcaaatcagcttcatctgatccgcgattgttgggtggaggcgccgaatgaacggccaaccattgagaaagtgcggcaaaagttgcggcaaatgaatgccggcagaagcatcaatctgatggaccatgtgttcggcatgttggagcagtacgccaacaaattggaggaggatgtgcatgaacggacgcgcgagttggaggaagaaaagcgcaaatcggaaatactcctctaccgtatgatgccacggtaattaagtcaaaagtgattaaaaaaattcctttttttctcacgggccctctccctccctattacaaccccctgttttattgcccttactgtaaagccgatcaaaaaccaaaacgtaattaagccaagttgcggaccggcttaagcttggccagtcggttgagcccgagcatttcgagtgcgttacggtgttcttctcggacattgtcaaattcgcggaactgtccaaccaaatgcgaccgctgcaggtggtcaacctgatgaacgaactgtacaccatttttgacgcgatcatcgacgaacacgacatgtacaaagtggaatcaattggcgaggaatttttttaaaattaaaaacagacaaatgaaatgtttgaattttggggctaggc

SEQ ID NO: 27525 - DNA, 1890 bp, Heterodera glycines
tctttttcatccgagtaattttcttcatttttttcattgaaattttcattttgatttttgacattttcttcgaaatttgcaaatttttctttgcatttttcggccaggtcgaaaatttcgctgacattttctacttcgcccacaaatgtatcaattcgcatcacattgtacgctgctccttaatcagcaattttattgtaaacagattgatgttaatcaaaacttaattacatcattatctgtcgttaattttttttattgttacattttttatttggcaaattattgaatatgatggcctaacatttcccctatttaagatgttcaatgtgataacgttctttattccgtaggggtaaatgattacatggtgaaatacccgaaacgtaacgggagaggggagtttggtcgggatccgtcgggatcagggctgggcgaaacttcggcttcggcttcgaaaacttcgggttttttgagcttcgaacttcgtgcttcggcttcggctattttacccgaagtttcgggaaaaatacacctctaaagattgagttttcaatgtgaaaatgcaccactagtgattgacttttggtaaacttaaaattaatatatatttaaactatttgcttatttgtatttcgcatgcttggtcgagtggtagttctttcggctcttttcattatgtttcctttgggtcagttcccatcaaagtagttgcttttcttctaatttttcaaaaatattcatttttttcgacagaaatttaataaaatttaacaattaaaatcgcaaaatttttttcatttttggactaaatctgttaacaatgcactaaaaatttcaaaaatttcaccggcggcgcctatcggcaccgtcggagctccaaatttcctttattttttaaatcgactcaaaaccgtgaatattctaagaagtataaaaatttacaaaatatattgctcaaaaagttaattacatttatttatcgaaaagggttggttggtctctagaaactagagaccggcgcgggacgggatcccgcgcgggattttgcgggatcccagtccgcaatcccgcattttttgaaaaatttccgatttcttgcaccgcaaaagtggttttgaaaagaaaaaaaattcaaatttatgaaccgaaccgtttaataattgttagctaatgattattgggattaaaattttaaattgcttttaaatcggctcggcagtgcggagaggatcgatccccaggcgcgccaagccatgtatgaagagcccggagggccacggcttttccaaaccgtgggatgtttaaaccgactgttggacacggcgccccgtcatttttggaagccgagttagacaggcggcgtttttgggaaaatataaatattaaataatcaatagaaaaacaattattccaaataataatcgattctatgattcacaaactattagtcgtcagataaattttttaatcttcttaataactaatgataataggactttcacaattctaatagcctgactaaatgggcatttgctctgtttaccattcagtttatttactataataataaaatggttatcccaattatatgttatcgtttagatttttccctaattccaattctttccaattttcttttccatttttctttacaccaaaagcggcgagtcgtaaacacttttgcctttccaaattccgccttcgttttcgctggccaatttcgtcttcaatatgtgcgcctctccgctgaattgttgcagcaccgttccgtcctcaatgttgccaagcaaacagccgaaaatgcccaattcgggcgttaccgcgacattcaaaaggggcgccgagtcgggaaaaatgaaatgattctaaaatttaaaatcaacaaaa

SEQ ID NO: 27526 - DNA, 893 bp, Heterodera glycines
ctggcgacatgcttttgtttgcagatgcatttccaatctttaaaatctctgccgccgatcgtcgcattcattcccacgccgactctctccctcccaactcccaatgagttcgggtgattaagcgaaggtggaaagtttcttaccataatttgctcgttcacctgcgcacaaaacacaaatcattcatttattcgttcagccgcgacggcttttgcgaatcaatgggagggagggaaaggaggagagaagggaaagtgattaagcatgggatgatggaatatgacggacgaagcttactgatgggacggatggtaatgataatggaatggtgggaagaaaggaaagaattaattggtaaagtaaattgggagggggagggaaaggaaaagaaaagggaaaagtgtaagcgaagcaaaaggagaaaaagaaacaaaggaagagaagagaagggaggcaaaaagaaaaagatgggagaaaaataaagaaaatgaaaaagtgaccaaagttatgagcgattgtcagaaaaaacaacaacattcagatcgacaatttatccataaagaaaagacacgggaatatgctgatcgattgcaagaaaaacaaaataccaaattttcaaaaacaaataccaaattttcaatggtttatcgtatcgtcactcttttctcaaatggtggcggcgccgttgtccaaatggaattcgttacgacgtttctttttgtggctgatgaaaccgaccatcacaatgataatgagcagaacggtggggacggccaaaagaatgagcaccaaacgaaggactgaaagggaacatggaaatggcaatggaataagttgagtcacacaaatttcgcatctgctacgttttcagccccattttccaatgatcggat

SEQ ID NO: 27527 - DNA, 998 bp, Heterodera glycines
ggagcgcatgcgcggcgccaatgcgaagcgaatgcgttgatgatacggtaggagttcgtgcactacagtaatggcaccatgacgaattagttaattgtattaatttatatgtaagtgctgctgtactgaattaattatggatgtgatacagggagatgaagcagaattcgaatttaaaatattacaaacatacaagggacctgtggcaagaaaagtcttgaaacattgtcaaaaaatgttcaaacccgagttttgtgccaaatatctcttaaaaaaaaaagtttttaaagcacgaaccttaggcctaaatatctctaaaaatcttaaaaatcctaactttaggtccagtaccttcaataatttttaaaaatacgtcctaatcaaattacggcttacaaagagaaaaaaaatttagtttttttttagttttgtcggtttaaacacaaataaattcactgaagccaaaagagtataagggaccgaaaaagcattcccccaggggatagtggaggaggggggggggggaaatgcccatttgtcatttttggacacattgcaaatgaattataaagtgtctcgggcagcggattagaagaaggaatataggcagtctttcttggttttgtgagacatctttgagtaaaaaatggaaatattttatgctccagtaattccaatgctcaaaaaaattttgagaactcgaatcggaattccggggccaaaggctctcttaagtcgaaagtcgaaactctggggacaaattattttggaattagggaattcctggggttcaaagttcaaagttcaaaataataatgataatgttaaaaaaaagtatgaaaaattcaaatacctgaataaaattattttattcatttaataatgtttcattaatttaaaaattaaaaataatggggggaaatggacaaattaaagaccaacatttcaacattttatgctgatttaatgttagaattttagttcaacgctattttatc

SEQ ID NO: 27528 - DNA, 934 bp, Heterodera glycines
tcagtggacgatcagtcccaaagccatttgtccatttcagtcccgggtctgtaactcttcagggatgttttccgcaaagaaattctttcggattcttccattacagacttagggctatcgattggtatatatttcgaccattttcggctctgggccatatgatcaaatttacccacggcagaaatcgggacaggttcgtgactgaacagtaaccatatttctaaaaggtacctaattaaattttttttatttcttaggcctagtactgtctttgctttcccctggtaatttatttatttatgaataaaaaaaagttatcagaagggcaaaaccacttactctgacgactgttcagataatatgtcgtagagtaagtgataaatatatggatgaccaaaaataaaatcaaaatatattaataaaatgaggtcaattgagatcgacagtataaatgccaaatcacttttaaaaaattaattctgtttttgcttttccggttattaccctaatgaatttctaagttttgttttaaattgattcaaagaatttgtttttattagttctttatcgagtttattccacaattttgttaccctcccagcaaagggaatgaattttttgcatagcttatattttgtgctaaatctgtaaaaggggatgttatagcgtgttgatggattaaaaatagaaaatagtttcagatctgttcggccataaacaattttatgcgccatgaacagatcaaacagctttcgcctattctcaagtgttggcagttgcaggtattctaatcgattttggtatggaattggcggaaggctacacttaaaaaatactcttttggtgaaatatttttgacttaaaacgaattttaaaaatctttatttaaatttgaacgaaaattgaaaaataaaagttgaagccggagcagtaa

SEQ ID NO: 27529 - DNA, 603 bp, Heterodera glycines
ccccccccagatattgaaaaatggtgcaaaatgaactcattgaaaggggaggcgcgcacctccctcacgtgcgttgtgccggtcatccaccttttccccacatgcgttgcgccggtcatcccccttcttgccccccccccctcagcgcacgtccaccagttgtgtctaacgcatctctctctctctgtagtgtactctattttgtcatcgtttctataccttttcccttcatagcgccacgaaaggcgcaatttcaaaaggagtgtcgtccgacggaagaattaaatgaattacaaataaattaataatattgcacaaaaagcaaaaaaatccgaaaattgaagaaaagatctaacgaaaaatagtaaaatagctgataaaaaagaaatcaaatcgataaattaaaaaacattcaaaattacgaaaaatatacatatatatttaaagcaaaaagggctgacaagaaagaagaaaaataaattaaaatcatatattttaaaaaagcattcaaaattatttaagtggctttgcaacttttttcggtgccgtccaatgccaagcacaggaaaattgtgaaattagtcacatgactacagcaaaaaa

SEQ ID NO: 27530 - DNA, 1508 bp, Heterodera glycines
tcgaaaaaagcggtgcggtggccataaatccggatttgaaggattcgtaaaaaatcctcaagcaatatcacttgtcaaaagctatgaaaaaaaggaaataaagacacttgatgaactacatgaacaacttatgcataaaggcatacagatttctctatgcactttgaaacgctgcctgcataagataaaacgatgatgatcggcgtcagaaaagctgtcacggccccaattgccagcggaattgaaataattccgcgctcttttcgcgattttttgctgctttccgttgaagaattttccccaaaattcggggtgcatataagaacaagcagaaatgtaattttaaagggaaacattttggtggtttttgaatttggtggggaattgcaagcttttctcgggtatttaaacgaaattttttcatcaatttttcattaaattcttgaatttcatccatttctggctttttgtgttcccaggccgttcctctgcggctttaaatattgtgtattgaatttcttgtcggtcttcagccgctttatctttccaaattccatggtcatatgcttttaaaaaatttaatgtttgttttcccacccatttttagcatttcttttttttcgccgcattttttcgtatcttattacggaactcaaacaatgacgtatttctaatggaagccaaaattttgcaaaaaatttaaaaaatgttaaaattattcactgtaattttaaattattaaaaaataatttaaatttaatctattttaattgaataataattattttaattaattattatcattgatacttttttaggatcgcccacattgatacttttttaggaacgccccattgatacttttttaggaacgcccacattgatacttttttaggaacgccccattgatacttttttaggatcgtctcagcacgttctcttttttccagttttttttaaattttcaaatttttacggttaggaagaattggttggctcaaagcatttggcgaaatgtgcagaagaaaatccaaaaattggtccatgtcaatgcccaattcgttcaaagtgaccgatcgctgctgcttctccctcatctccacactgagcatccgatcgatcaccggggagaagcagcgaagccaagaagcggacaaagtcacctgaaaaagtggatgaagcaataacagaatttcaaataaattaattagtgaaaatggctaattttaaaaaattcttaaagcaattatttaacagggatcgaatttaggtgcaagcctaaaaatatttgctgaaaattggacgaaaaaggacaaagattgttcaaaacaggcatttctctctaaatatgtttaaattgtgtcttaaatatttgttatacaattttttttcaaatttttaagcaaatatgaagaaattttgggaaattatacccttaatttggaaaaatttatgtccatatttatgcaattttatgtccatatttcgcgatttttggcccatatttt

SEQ ID NO: 27531 - DNA, 1545 bp, Heterodera glycines
  unsure (1)..(1545): unsure at all n locations
cgttccaatttccgccaagggatccgaaaatntaaaaaaatgtagcacttataaatttatataatatcatgtatcattcaatagcattaattgttctctatcaaaatactgtagtaaaatttttttagaaaaaattaaaaaaagttatggccgcaaaaattctgacccaatttacgccaaagacaattttttttataaatattcgcttatctcgccaattaaataattaatcaacccaaaattttgcgaatttttgtgctgattttctctatgctgcttaattctcaaataaattgtgagaaaaaggtccggcggcggctctaacctggtttaaaaatttattacttacattgaagaatttttaaacggggtttttttatcgtctcaaaaatggaaaaattgaatattagtttattttttattttaattaactatttaatgaacatggtctgctgcaaatgtgacaaccattaaacagttgtgttattgtgtggatgccaaagagagatgccatcaccgcataacattttccgctctttttcttcccattttctccttttccttttgagtatttaattcgctttttcatttctcatttttcagtttgtcagacctttcacaactgccattccatttttctttgcccccatttgcgattttccccgatttgttcacaatttttgaatttttctttcttcagtccgattgggttttttctctcaaaatgtttcctctcccctattcatcaaattttctgtactttggtcgctcataaaattcagcgatgcctccctctagggctatgcgagaagtgatttttaccgggaaccgaaaccgagaaatgaccccgcgaaacgatacaagaattgattcaaatgtctttttttaaatcagaaacacataaaaagagggaacgggccaactgcgtcccaaaataattttaatattttttggaattccattgaataatgttttaaaaatagaaaaatacgaaattttgaaaataaaattaatctggactttatgttggccctatcctcgtttcggaacccaggaaaatccaagcccaggtcaagctctatttttcctcaatttgtacccgagaccgagaagcggaaaacccgagaaatttcccgagtcgggaaccgagactctcgcacagccctaacagataagcacgaaaattttccgtttggtttggggcttctatgtacaatacctattcttacctatttgggagtttttctgcctattacctaggtccctattttatacctatttcggcatttttgtcaccttttaaggattttagaaaattccattaacaaaaattcaaaaaattaaaaaaaacacatcccctaagaatcgacctgaaaaaaattcaaaaaatgaaccccaaattgtaagaattggaaaattttctcaaaaattcatcaaacaaatttatttattattttttggcaaaatatttttaattanaaatgtncatattttctatgaaaatatcagaaatatttattataaaatattgttttcttacctaaa

SEQ ID NO: 27532 - DNA, 1334 bp, Heterodera glycines
agttaatagtaggaatattaaagaaatgaaaaatgctctagacagaatataatatataattcgtgaataaataaaagtgcaattgatcgaattgatcaactatgcatgtggatattatttctctctctagacagaatataatattgtaatttgattgggaaatattaaataataacgaaattataattatggccagcaatataattaatagattaaaatagttatattattaattaattaaaatcattattcggtactgaaatgacccgcctcttctgatcaccactcatttgcctttttgaaacggaccaatttttgcgaatttggaataatttattaagaaaaatcaatactttttggtgtccggaagtgcctataccgcaggaaagtttttcggaatttttaatgaattttattaagaaaatttgttcaaaatttcaaatattttcaatattttcctccttcgtggatgaattaacttttaaatttttacaacgctcggggtccccggccccccgactatgtgtcggggggggggggggcaaaatgtcggggccggcgaccgtcatggaaaaacatgtcgggggtcggggaataggcccaaaaatgtcggggccggggagctcggggtcggggagcaaccctaggtcaaaggttttggaaacttttggaaattttgacagatttttaaaaaatttgcaatattatgcactcataaaaaactgccttatcattagggctcggaattttatgcacataaaatcgcaaaatatgagcataaaatatgcaccaaaaatcgcgaaatatgcacataaaaagtgaaaaatatgcacataaatttttccaaattgagggcaaaattttcccaaattcttcaaattcactaaatttaagctaaaaatctcgaaaatagttaaatatggtatgaaaaattatcatagaatcaaaaatacaaaataaaagtaaaatttatttattttgaagaaattgagtaaaaaatcgaaaattttccattttttacattttttggcataaatttcaaattttgaaaaaattgtatttttactaatattttcgagaaaattttgctaaaatatgaatttttggggaaattttccggtcattgaggtaaaaaggccaatttagctgatgggggccgttctaatagaagttttttggaaaaatgctcaaatatgcacataaaatatgcacgaaatgccttttagcaataaataaaaagttttaatgatggagaaaggatattttcattggcattttatgcaatttatggagtgccaacgttttatgattctctaaaattcacgaccattttg

SEQ ID NO: 27533 - DNA, 1789 bp, Heterodera glycines
tagtgtattatatggccggaaattttcaaaaattttcgagctaggccccctagaaattttcggaaattttttttgggttgaaaaagagggtgaaaaatttttttctgggtatttttaaggtgctgagtacgaatatgatgtctattttaagtttcagaatttttggaattttttaaaaattcgaaaatatttggcaattttttggccctcgggattttggcctaatatttgaaaattcataacaaatcgaagggttgatcaattttacagcaataaagccttaaaaatagagaaaaatcaggagaattttatgggatttatttgggatttctatcttaaaaagaaaaaaagttattccagaatttctgaaaattttagatttttcagaaaaaaattcataacccccttctgaaaagaaatttttgaaaattaaaatactacaaaaatccgcaatttttttctttataatataaattttattttacatttttatcactttcttacgaattgttacaaaaataaaaccgattttgggattatggaccaaaggggtgagcataggattttttagttgaaaaattttttcaccaaaaatcttcaaaaaatatgtctttaggggttatttggcccgctgatcacgaatacgtaatcagattttacttttgacatggttaagacctcagaatccttgtgtgattggggattctgaggcacccttatgaggaggggggggggcggcaggttcggacccggacggtgtacattatttttctatgcatttttgggttattttcactgtttataattaatttgaagatttgttttaaattatttaaatttatttttttttaattaaagaaattattttttgttttattattattaacaaaattattttaattaaatttaatttttcttttgaaaaatagatttatttttaagcaaaattagatttaaaaatttggatgcataataattcatttcaaaataaagtaaaataaattattccgtttattaattaaaaaataaacttttacattttttattattttgtttttttaaaatttttaaataaacctaattctataaaattatatttaaaattatgaaattatttttgtacatctcataacaagttagacttttgtacctcttctaatcactgttgtacctttctaatcacttttgtacctcttttaatcactgttgtacctcttttaatcacttttgtacctcttctaatcactgttgtacctcttctaatcacttttgtacctcttataatcactgttgtacctcttctaatcacttttgtacctcttttaatcactgttgtacctttactaatcactgatgtacctcttcaaatcacttttgtaccctttttatcacagttgtacctcttctgatcactattgaacctcttctaacaccgttgtaacgggcgcgaggcgcccgtccgatctcaacaaatttaaaaaacgggcgcgaagcgcccgtcagagcaaaacaacatttgaaaaacgggcgcgaagcgcccgtactatgccgcgaagcggccgaaaaggcccaactaaatttaaaaacgggcgcgaagcgaccgtctgaggccgcgaagcggcctaaaaatcccagataatcttttaaaaattccaaatctcttcacaacgcaatagcatatctaggtagcgaagctcccaaagcgcgaagcgctttttcccagctaaatagccgacggatcacgcacccgctagttaatatatacgttatattgacaaggagtttcgtt

SEQ ID NO: 27534 - DNA, 1611 bp, Heterodera glycines
tggacgtggggagagagtgcgtcggcatcgacggcgatttttaactgagtcgagacctgctgccgccgatagctgcccgaccaaacggagcggcaacgacgacgacgaggcccagtgggggggggggggtaatttggtagttatgagacgggggtggggcgagcgggaaaaagtgtggggaggcggccctcccccttcccctgtcgtcgtcgtcgtcgtttcttggccgtcgccatcgccgcgtcgttctcgacgggccaactcttccgccgccaccaattccaatgggtgagaagaattgaagcaaaaaattagagaaatattagggggacagaccatttgtgctgaaactatgggaggggtgtgggagagtagggaaatagtgtgggaaagcgagagaaaaagaaaaaggggacagttggagagaaagcaaacagaagagagagcatttggaagaagaagaaaaagcgcacgctcgagaaggggaaaattggcgagaaaacggcgagcggcggactttgagagaataaatcaatgaaaagcaaaaggaagaaaaatcgaaaaataaatgagagagggaagaaggggagagtgagggggacgagagagaaacagagaaggacaaaacaatgtgagaaggagggaggagaaaaaggggaaggaagaaatagtaggaggaagagaaagaggaaaaaggaaatagtaaaaggatgagaagtagaagaaagaagagagaataatgaagggggaggaacagaaaagagaggataaagagaagagaagagagagagagagaaatgatgagggaaaataacaaaactaacagcagcaaggagagaaacagagatgagaggaaacattgggaggataggagggaaaagagtaaatgaaagacagagaaaggaataggaaaaacggaagtgatgaggaagaaaaagaagaggaagagaaggagaggaaaaagagcaaacaaaaacagaaattgaaaagaaaacgccaaaaatcaatgccaatcggaatatgttttccgtccgattttcggctcgacttttttggccctccaaatttttgtcaccacagcgactcaaaactgagcaccaaaaaagcccggcttttaacgcatgaaaaatttatatgtttttggcattttagaagccgaaaagcgaaaagagagaaaagtcaaagggacacaaacaaagcaaagccaacgaagggaaaaagggacaaaaggaggagagaagaggagaggagggcacagtgccgaaatcgacgggacacccaaaacaaacattggcatcctttccggatgatcttggcacttatgagagaagggtgcctaattatacattttgtatgggcataaaaagtaaattatggtcaatattttccaacgaaggtacggtattaaaaatcagtttaaataatgtaaattaattaaggttcaaaacttgtttttcatgcgtttcaggcttccttaagcctaggaaaaaaggatttagattaaattgaaaaccttactgatatcagtgatcgaccaaaaaaaaacacttttgaatttacattataaagtgagagcctacgtgatcggcatctccgatcatttaaattatt

SEQ ID NO: 27535 - DNA, 1059 bp, Heterodera glycines
tttcttaacattttattgttgcataacatttcttagcattttcatcgtcctttcctcctttttggcatttttttatggaaaagcatttcttcttggcattttcttgacattttcttggaaggtacggctcggccgcttcgcggcctcggatcattctcttggcattttcttatggcataacatttagcattctccttatcttttcttgtttctgggcattttcttatggcacaacatttttagcattctccttttttcttgttttttggcattttcttatggcacaacatttttagcattctccttttttcttgttttttggcattttcttatggcacaacattcatagcatttcctcatcttttgtttcttggccttggcctttcttattacataacatttcttagcattttcctcgtcctttcctccttttggcagtttcttatggccaagcttttcttagcattttctttttttcttggcattttattggaaggtacgggctcggccgcttcgcggcctcggaccaatcttttggcatttttatggcacaaaatttttagcttttcctcccttttgacatttttttaaagtcaagcatcattttcttatggtcaaacatttattcttagcattttcctcgtattttcctttttcttgacattttcttggaaggtacgactcggccgcttcgcgaacatgacgcacattattgtgtcacactaaagtcacagaacaaacgctaatgtttaaaaacattacgaacattattgtgtcacactaaaatcacagaacattcattcattcatcatttatacgcataagcgtgacgccgaaaaataagaaataatgaaacaatatcaaataaaacaaacaattggtcacttttggagctggggtggcaaagaaatcaacaaattcagataagatctttcaagaagtttggcaaactcattagaatttagtaatctcgtctctttaggcaaaagtctatagagacgagaggttcgaataaataacgaattaatgtagcattggttgagcaataagctgttctta

SEQ ID NO: 27536 - DNA, 778 bp, Heterodera glycines
tttaaatattgacactctgaaattaaataaattggcaatgaacctattacattatttgaaatccaatataaagggcaaatgaactcttaattaaataaacagatcctttcattctttgacaattactatattaaaagataaaatttttaattcaaaattagtaaaatagataattaaaaataataattagctccactgactcaaaaaattttttaagaataaaaagaaaaaaattcatattaaaaaaattttcaagcattttttaaatttttatacttaatgataaaatgttaaaaatgacgactaattttgggcgtttcgtaaaatccgccattttagcgatttttttcgacaaaacatggcataactttgcttaaatgcaaccaaattttacattcttgataccatacgatagccaagctttttctctattagccttcaaaatttaaaaaaaaatttggtcatctttgtaaaaacttgtatgagaatatgtactatttctgccataacctatgctaaatttaataattttatgacttccattttttgattctaaaaaatggctaatttagacaatttcgaaaataatacggtaattcattggtaaaatgttattttaaatttacagtaaattttcagttttatttgaccttcaaagatgcccatcccagcttgtcactgattggatgtgcaacaatttttggaatcaccgcttcatttggaatcctgtttcatttttcagtgatttttgtcacaatcaaaacaaagtgataattaa

SEQ ID NO: 27537 - DNA, 989 bp, Heterodera glycines
  unsure (1)..(989): unsure at all n locations
tccctcatgaagaggaggccgatcggaatcggacaaagccgttaggctctccaccgccacggaagagagacagaagagatgtgaacaacaccactcctccccaatcccccgtgctgtttgatgagcacggaaagcgactcgggtctcccccgttgtacgatccgaatgctggcgaagagcaacacatgagtgatgatgatgatgacatgcgagcacaaaaagggacactaattattgatccaaaaagcccgtctcctatagcgacacccccagttccggcggttaaaccgctaacaacaacaacaacaacaacaccgactcctccagccgtaaaaccggtaacaacaacaacaccggccccccagtcgtctgcaaagccatcagcacaacagcaaaagccaacacctgtcctgccaaaaccatctgcccctcagacgtcagaaccaaaaatagcgacgacaacgacacctggccctccaaaaacagcaataacaaaacctacaacgctaccgccaccgtcatctcctccaacagttcctctacagcgaaagccaacaacaacaacaacccctcaaacatcaacaccaacaacaacagcaacaccgactcccacacaaccaataacaaccgtccatacaccgaaaaatacaaaaacaacaacaacaacaccgatccctcaaacaacaacaaaaaccacaacccaggtctctccaacgccaaaaataccatcgcctaagccgcctgctgttaaacttcctcctcccacttctacaacacatccgcctcagccagagccaacaacaacaacaactgctcctaccaaaactttcacttcctctcctacgacgggggctgttattggattaccttncaaagaaaaacaaattccgaccgtcgacgaacctgtctcggctgcgttaactctagaaagagtagatttaccaganaacagcttcatagttgaaatagactcactccaatatgtgccc

SEQ ID NO: 27538 - DNA, 1105 bp, Heterodera glycines
aagcggctgatcaagcaaagtgatctgatcagaaaaggagggatcagaaaatcggagggagagatttgataaagattcataattaatttattagacagaaattttttgggttatcaattaaaataatggcaaaataaatgattaactgaaataaatctggaggattaattttagaatttacttagaacttaaattgattagctatacaaattatcggctttgttgaattttattaatttaaaccaatttaagattttttcatttttaatgtagaataccattttaaatttcaacgaaccaaaatagaaaattagtaataatatttggtttatgcttttttctactgctttttgcttattatcatcaaatcaaatctttttctccttcacaagtcttttatcgcatcaattagcaagtcagcaatttcgtcgaccttaaaaatttgagaagaaaatacataaaaaaatttattgaaataaatttaccactaaatcttttccaccaccggcagatgccttttcttaacacatttaaaattaaaatttttctcattatttaattttcgtaatgtttaaaacagcaaataaaaatgcaaaaaaatgcaccggaaaaattcatttttttaaaaatgttcacctgatttttctgccggtcgattcgcttttgacatttccaataagtccgaaattgtgtcaatttcttcagctgctgaagaagcgcccaattccttgtcagacctttgtaaaaaaattgtttgataatttaaataaattaaacaaaatttgaattattttatatttttgattggattaatacctgaacacgttgaatttcgggtttttcgggaagtacaggttgaaaatggtgtaatgggcagcttttgctgatggctggatgttgttggacgggatgataattgcttgttcttcaactgttactgctgctgatgggcgaggaggtgaaagatgaagcgattgaggcgatggcacgaaactgaaaaacaaatttaaaaattatttccacagaaaattttctttttattttaatactaattgcctgctaattgctcgtcgcttgcgtgccactttctttttccctttgccat

SEQ ID NO: 27539 - DNA, 1218 bp, Heterodera glycines
  unsure (1)..(1218): unsure at all n locations
tcaaagtcatgacatgcagatgcggtacagtcaagacactgcatacgagacagcaatcaaganagtgcttctagagggaggggcaaaagggcgggattgttcttnaaaaaacatccgaaccttttcacagttctctgcactcgcattttgtgaattgatgacgttgtggcacgttttaatgacctggcagaaaggttcattcaccggtttgcgacactcaacggcaccaggattttcttgaataccttgaaaacgcttggattggtcgtcagcgtcgcactccgtcatttcgctcgatttttggaattgcaaagacattactgaactccatctgccaaggacaacaaatggcgtggaaagctggcatgcccgactgcagaagacttttgcctctccccatagcaaaaatgaacagacggtaaagaaagattttaaaaattttcattttccctattttccatgtttcagttggatttgtggcgacgtttggatggacattctgccatcttttgaccatgcccaactcggactcaaaatggcattgctttccgaccgtttcgacatcttagtggacaaacattttgatgggaaaacgacgaaattgacaattcggagaacaatcgaattgaaaaggaggaagggccaaaagcgaaaatatatgccaatggttatcgtgtgcaatttccgttccacgaccgtccgctgcccaacaaaatccgctttaatcacattcggattaagtaattcgaacattttgtaacattttgggatgtttttacccgcgaaatttggcctatttttgcgaaaagcattcgtcattttggctttcacgatggcgatgatttggacaaattgcgtcgccgcatttcaccgacacttctcactgatcttgatcaattgaattcgatcaattccggttatctgtgccccgatggaattgctgacgatggacccaatgcaactgctggccaagctttgaccaaatggttacacactccgagcaaaaatggacagccgaagcaattgcatctcaataattattttggtccacagaatctcgaatcggtcaacaacttcaaagaggtgtgtctcgccagaatttcccgtcaattatttttgtgtttaccaattttttatttagacatttcgccatgccaccacttctgtcacttacaaaatttgttttggtgttttcttgtcgctaatcgagccatttga

SEQ ID NO: 27540 - DNA, 2069 bp, Heterodera glycines
tccacaaattgtttttgtcgttttccaaccattttcttcagtttctcatttggccttcacttttgctttttcccgtgttttctccatttcttgattgcttttccatttcttccgcgttttacaaatttctcttttttggcgtgtccatggtcagcacaatttccatcgctttgcttccaatttctttgattttgtccgctcttttctccaatttttcactcaattcctgtgagttttctttgtcgtcaattagcctaatgagtttgctacatttcgggttccaaccgtttaatcagttcttccatttgttctcttgcgattttcttcaccggtgttatcaattcatttgattaccgaaacaaatcttccgctctttgcagatagtccttccgtaatatattacgtggacctatttcctagatcatgtcgcggtatattttatcgtaatgaggcgaatgccttctgcctcagataaatgaattacatcttggtatgttcataatccggtagtatggtgcaccattaatgccatttttatctctaagaatttgtggattcatctttgttaattcctgacctcatggaaggttcacaaattcgatgaaaaggtacgtttttctttccttttgcatttccataactttcctatttcagtggtgtcgtctccaaattcgcaaggcaaagatagcggaattgctgacaagagtgcagaattacataacgtcaggtcaggaagaggcacatgcattgcgacgcatcacggaaaaagatttccatgagtaagtgaaaattcgaatatcaaaatggcaactgaattcagtctgacccatgtgcaaactaacgaagagctgatggacattcatgcacatttccagctttattacggtcaccaaatgtgccgggtccaagaatgggaacgactcaacgcgataagtgagcaaagcgtggacactgagttggcttcacgctttaaacggagcgcaaaaattgaccaataccaagtgagttggaggttgttccaatttggataggatatcaatttcttaattgtcacaatgattcgtcaagttgtgcattcaatgcggtttgtcagcatttgctgaacagtttggtctgacgccagaggaatttgcagaaaatatgactgaatatgttaaacatgaagtgcggcaagtagacaaattgccgaacgatgctgcgctggagttcgtcaaagagtatttaacacaatcgctttaccatgaaatcatttatttcacagggagtttcttcaatttccatcgcccgaaaaagtcatccaaggcgccatttatttgttagctcagcaattcagtagagaactagcggtgcgaaaaaaattacgacaaatttaccgacaaaatttactcatttctgttcatccgactctgaagggaaaggacgaaattgacgaaaatcattctctctatgggcgccattatattaaggacaagccggtgaaagagctaaaggatgacgagtacttgagcttcgttagggtttgtacaacaaaaaaattacaatattatttatttttattttttaattaggaaattcagaaacaaaaaatatagccccaaatatctttgagagaaaatcggaattttgaaattggttgggtaatcccgaccgtatgcttccataaaatgacattaatttgtcttttgataggctcaaaaggacggccttatcgaaatcgatttacacattacttcgaatgaggaatcggagaacaaatgtttgcgtgcgtgcatggaaaacgatggctgtgcgacttttaagcgtaacgaaaattcggaaattgtggaagaatggaacaaacttcggaaccttgttcttacgatttgcgtcaacaaaatgttaattcctgtgctcagaagggagtcgcatgaaaatttgattgaggaggccaaagaatttgtaattatggtaaattttattattttctgttccctcttctatgggtgttctcttttcagaaagcggctgagcgattgcatggtctaatagagactgagtcttacaagccacagtttagctatgataatcag

SEQ ID NO: 27541 - DNA, 947 bp, Heterodera glycines
  unsure (1)..(947): unsure at all n locations
gaacggcactgctcggcatagtgacagagaaccatctgccaaacaaacaattggccaagaaaagctgaaagactgaccaaagtggccaagtgaatggcgggcgacagcaattcgatcattggcacattttcattctccgaaagccaaccgtagcaattgcgcaccagcagcagagacttcagaccgaacagcacaattgtgatacccttatatttgttttccaaatttgccaattcatttaaatccgcacttttctcattttcgtcagaatgccatgcggcagcgaatggtcgcagtgcgtttcgcgctgctcgcgccgtgcggcggataattggacccacaaaatgggcaaagtgaggaggaggaaaagcggcggaatttgggagaggaccgcgtcttgcagacattgggtgagcaccgggaaaagcacaacggattcgacgcccgaagcggtggcatttggttgggtctgatcagagcagagatcagtcaccaaaagagtgaagcattggtcacccgcccctaattacccataatgaatcactgcaaaattcgtttggccatcgaaatccctcctcccctccgttttcgtcataagcgtagaaatcgccactaccgaaagacatttttaaacgaatttgttaagggaaataatttacttttttatgagaaaagatttaataatgaaaaaagggacacagacggaacagcgattagaaacaaattaagaggcatttaggaggaacaattagggaaaagtgatgataagaaaagggagggaaaggagcagagagagggaagggaatgtttttattttgataatgtattctgtgatttcatttacaattgtgcgtagttcgngcagngatgcgatcgccanaacccaaaaaccgggcgcgcgagttgaaaaacccggtaaaaacccggcaaaattntcaaaaaacccg

SEQ ID NO: 27542 - DNA, 2034 bp, Heterodera glycines
  unsure (1)..(2034): unsure at all n locations
atcaccntttctagaaaaattcattgggacttgacacttattttaggacgaagtcgaggaggagcagggaatgacgacagccaaccattcggatgacactgctggcaattcaggcgcaaacagttcactgtcagaaagttgtgctgctgacccaacggacggagcagtgaagacagaacacgaaacggcaataaaacaggaaatggttgggcaaagccacgcatccgacgaatcatcggaggaggagggggaggacagtgcggacgattcatcgcaggacagtgacagtgactgaccacggacggactgatttgagacagaaagtccgcggacttgtgattgatatttgaccgatcaaaatgttgttgtgttctctgatgttttgtcgatctttctttttttgtttcactgataccgatactccattctccgtttaatttctgtttttcattgtttctttgttcctttatatttttatgacattgttcttgtcttattcgtattatcaaaaattgcttatcaatgcgcattttcagtggtcgtttgctctgaaaattgttatttttttaaacaaataaattttgtttttaatgcttaatttattttcaaattgtaaaagttaattaattaattctccaattttttctctgtttccatttcacttttcattattcggtttttaaccctttaagcgtgccattgaaatgaacgaactttccacgctcgcttggtacccggctgccgaatttttggaatttgaacgaatcaacaaagcgtattcgttcaacgtcccagccttttctgtggacacttcgacaacggatgggccgaagtacacacaaattatgaacgcactgtcggaacaattgcaacagcacgtggccaaggcgaatttgctgatttctctcaacgagaaaatcccacaattcgatgttgaagttgaggtcggttttaaaaccgaaaattgaaatgtaggattttatgagatgacggacagataacgaaactaaaatcaaacattaaaaataatataaaactgttttaaacgcgttttccctttatttcgagcattttttgagtttcaaaaagcatttgcgcaaatgtcaacaaaaaccttttgttaaggaaatgatgcgcattgcaattggccgtacgcaattgctgctgaacaaacggatgaagcaatttcgggaacatttgagccgtcatttggtacgaaaagagagagcgacggcatttacggcacgacaaattgaattgtcatttttacagaaaccaattcctggccaaaaagtgaccaaattgaacgatttgcacgctctttgggtgcttatcgacatgcaattggatgacatccgatccattttcaactccatcgagcagttccgtcttcgctgttgggctgtcgctgaaccaaaggccgccgcgactgccgcttcttctggcaattaattaatcctcagtctttcatcatcgcatatttttgtttttaaagtgccttcaatttttgaaatgtattgaactttttactagtacaaatggaatggaatataaatttatggttttatttgatttgatttgatcaattgatgaaatgagttggtccgaaggcgactttccttccctttccctccattcattaatttaatccgatgatttttgccatatttttgtgctgtccgtatgaatccgatcagcataagcaccgtcgagtacaggccacagaatgaggacgaagcgcgaaaggaagtgccaagcggcggtggagcggcctttggcactgttgctgatcagcggagggcacagctgttgccgaaaggcattgatcaatggtcgacaacagaagtgccgtcttttgccatcgccaactccgacacggcagccgatgcttctgcggcggctgcgtccgtcgcccctgtaccaatttctccgtcgttcaaaacgtttgttgcccgaagcaatacgcgaagtgcgggcggagtgatcaaatcaaagcgcgtttttaaggtgattagcagcatacagaaaaagggg

SEQ ID NO: 27543 - DNA, 906 bp, Heterodera glycines
  unsure (1)..(906): unsure at all n locations
tcaacaaaatttttctttttgttaaattgattttaaattaataaaaagtcgtttctatggattttcggggtcgtagaacccgaatatgatgtccgttttgacccatttcgaactccgaacccggattcgaacaattatcaaaattcaattttttttttcattttttctcctaaaaattattatcatcgcaagaaatcatatttatattgccgttgtcgttctgcatgtccactttgtttgttctcgcattgataccgcaaaaaaatgacctgtaactcttgaccaaataaatgagggaaaaatatgatttcttgcgatgataataatttttaggagaaaaaatgaaaaaaaaaattgaattttgataattgttcgaatccgggttcggagttcgaaatgggtcgaaacggacatcatattcgggttctacgaccccgaaaacccataaaaacgactttttattaatttaaaatcaatttaacagagaaaaattttgttgccacaaaacccgaaagtaccgtcgaaacattttttattttctttagccgcaaaagggaattttttgaacttttatttaaggctcccaagtgcggtcggnggtcttcgcgtggccgttttcgcgtgagtagctgtttaggactgaaattggtcggatttgtgcaaaacatccatgtttcgaatctgaacccgcattcggacaaatttcttaactttttaatttttttatttcttgcggctaatatcttctacaataatttgtcagtttggtcggatgtgcgtcaaacggaaataagtaaaatttttataaaaatataacaaaaaataacaaaatttcagaacaaactaaggccgctttttccataattccggaaaaccaccagtgagaaaaatgataaatgttttcgg

SEQ ID NO: 27544 - DNA, 1470 bp, Heterodera glycines
taatgatatttattttattaaaaatgagtaaattttcgcattaatccaacgaaaagccaaactcattaaatgatgaaatactaggtaaatgaaataataataaattggtaaaaatattgtttttcttgtcgcattattttaaaataaattttaaagagagaacttggataaattttgaaattttttatatccaacgtaagaaattaaaaaaaacggcgaagaatttacaagattgtacttggaaatggtttttgcatctgaatataaaaaatgtccattttatggtaaaagtttaaaattttttgcattcggcttacggttttgattaagttttcatgttcacttggatttcacaaattttccccgttacgaacttgggtaattgcaatcttgtacttggaaagtgaattggacaatttagaaagttttatgtgtcaaaattatttaaaattaaacaaaaatatttttaaaataaaatgaaaaatagggaagaatgcaaaaactgttgaattcatatgctttgaggcgaagataatgcggatgagtaacagcacaaaatcaaacggtgaagaagcaaaaaaagacgtctctcatctttcctcgccattagtcaccattatcattacacatttttattatttattgtcatttttaaaagttaatacgacaaaaatgtttctcatccattttaacgctcaatttgttcacttttaatccacgacttcgcaattttttgatggaaaatgcattaatggggagagaagaatgtgtcaatgcaccacttcacgaagaatcaattaccatttttgatgtaccatatttttgtaaatttataagtatattcatgttttattttttaaataataaaaggaaagggatggatttcacatattagggatgaaaccccggcgccggaaatcggctcgggttaccaaatcggccagggttcggagttttttgggttgggaaaactcaggccgggattgccaaatcggtcagggttcggagttttttgggttggaaaagtagggtcgggttttttcaatttttttcttcctgctataaagtgaaaacatattttattaattatttaaaacaaaactttaaaatctttaggttaatatgagtcgtcatcagagtaaatggacttacccttcagacggcatatttttatttgagaataaatacataaaaataaaatattaggacattaggaggggaaggagatcggctgacctctcaatacaaacgaagtccgggggagggagaattggcacacaaaaatatagtccattaaacacaaattgacgaatttttatccgttatgaattggggggacacaaattctggtccacttcctcctcctcctccttcaacatttgcttgttctgctcgtcctcctccgtttcctccgctgtgccgtgcccttccttttccctccctcctccccctcatcattcgcctcctcct

SEQ ID NO: 27545 - DNA, 1232 bp, Heterodera glycines
ctctctgttttcagatcgccgatttcggactgtctcggaactacggtctgcatgccaccttcaccaccgaggtggtcaccctgtggtaccgtagccctgagctgctgctccagtgcaagtacggtactgcggtcgatctttggtccgccggttgcattttggcggagctgtacacgcgcgacgcgctcttcagaggggatacggaggcggagcaattgcgcatcatttttgagtgagtttttcaaaaaatgctgccgcaaaaaatgttttttttttcaattttattgccctgtcgagtagaatatttcttcccccccctcagaaaactcggcactccgtccgtctctgtttggcccgccgatgcaattgtccctcattctttctacgccgaaaactctccgcacataacacctccgtttgccaatcagatgccccaatatttgcccgcctccggtgttgagttgctcacggcaattttgcaatttaatccgcacgaacggccgactgcggttgaatgtctgcagcacaaatactttgtctgatcactgatcgcgggaaatgttcatttccgctttgttttccgcccatcccttactaattaatgatttgactttatcccccattgatgaccgatcacagccaatggccttgcttcacttttttttagttttgccatacatttaatcacacatttttaaaccaaaaattttgtaaagctatttgatttgtaatattaaattctctgtattatgaattaaatatagtgatatgaaacaacacgttgcatgccagccttcaaggctgttattcgtgcgtgaaagtccaagtgccaaatgcattgcaaaaactagataaggactaagcaaataggcaaataggcactcgagaacgcatgggaacgatggcgagataagaagttggagaagtaaatttactaataatattcaacagttttaaagtacaatttctttttatgtaaatcatttattaaagcacaattaatcattttattttgcttagaagtaccatacgtaaaaagcgataaatactgtattaaatagtttaaccaaaaatgaagcacattttaattttatgaatccactgacgaaaatattcactgccgaattggaacactgacgaaaaaaatgggaaaacagtgaaataaataaaaatagtacactgacgaaaacgttcactgacgaaaatgtttactgacgaaaatattaaccacg

SEQ ID NO: 27546 - DNA, 1817 bp, Heterodera glycines
aaatttaaaaaatattgaaaataatttttggattcagggaacaaaattttgttgtgcacaaagaatataacgtaaattacttaatttacattaaaaaattaaaaatatttattcattcaattcgtccaattagtgctttttgcctataattattaattactaattaattgtggacaagcctagtctatttaaaagcaaatgattgtgtttaattggaaatcattggaatatttttgtagcagcaaatttcacactgaaaatgtcttcttcgtccaccatttttgttgttctgctggtaattgccatctgctgctgttcattaacaattgccatgccagcagcggtcaatgaaattgataggtattattttattttgattttggcattcaatttatctccctaatggctgtgggcgaccaattctggcactttttggttggctgtgcataaccaattccggcacttttagcgcagggatttcgtattccgcaaatttctagaaaaattcaagcaaaagatttgaatgcttcaaaagtgcaaaaaatatttattaattttgaaaattggtggtttcgaaatggattttattttttatatattaaattttaagtgttccacttcggcaaaagcgtggctatggctatggctctggtggctatggctctggtggctatggctctggtggctatggctctggtggctatggctctggtggctatggctctggtggctatggctctggtggctatggctctggtggctatggctctggtggctatggctctggtggctatggctctggtggctatggctctggtggctatggctctggtggttatggctctggtggctatggctctggtggctatggctctggtggctatggatatggtggctatggccacggcggtggaataggcggtggtagaatgggcatgggcagcggcagcgggatgggcatgggcagcggcagcggaatgggcagcggcagcggcagcggaatgggcagcggcagcggaatgggcatgggcagcggcagcggaatgggcagcggaatgggcatgggcagcggcagcggaatgggcagcggcagcggcatgggcagcggcagcggaatgggcagcggaatgggcatgggcagcggcagcggaatgggcagcggcagcggaatgggcatgggcagcggcagcggaatgggcagcgtcagcggaatgggcatgggcagcggcagcggaatgggcagcggcagcggaatgggcatgggcagcggcagcggaatgggcatgggcagcggcagcggaatgggtatggggggcggcagcggcagcggaatgggcatgggcagcggcagcggcagcggcagcggaatgggcatgggcagcggcagcggaatgggcatgggcagcggcagcggaatgggcatgggtggacgctgatccgcgaagtgatgaaaaaaagattatttaaaatgacccaacattttttcatcgtatttaatggatcaaaaaaacccaaaaataaattgaaatatttgcgactgttaatatttccaattataaaaaaaatttattttcattaaattaatttatttgattaaaaaataatgacattactaatcggatggtcaatgaaaaaataatggaacaaaaattttaaaaaatgttcaaaattattaaatagtacaaggaatttgaaaattttttattacattcaaaaaaaaaaaattaaacgtttatgccaattaaaagtatatgcttggtcaatgacaaaggacccagagacaaaggtcccacaaaaactaattacaattaaaataa

SEQ ID NO: 27547 - DNA, 1627 bp, Heterodera glycines
gggccaaagcagttgggagaaacggcagcaaacattgcgtgaaggggtggtgaacgcggggaaagcggccggggaaaccgtcggtaagccaagcaaagcacagcagagcaattctgatgttaattggaatgttttgtacagttacggccgcttctaatgtcaaagaagcagccgtaaatgtcgcaagtgccgcggggcaaaaagtccgaggcgcggcagagacagtggaggagggcgtagcggaagcagccaaagggacgggcaacgaaattggtgggggaagaaagtgcagcactaaggggggggggcttatcaccaccattcactgatcagagcgagacttactaattaatgattgatgtttagggaaggaattggaggaggcggggcacgcccttcaaacggaggaaaagcgaccggcggcggaggaaatggccaaggcacagtgaaagagggcgaaatgccaatgctgcgaagtgattaatgacttatcactgtccttctcactcatcaaatccatggccaattcattcctctttctcctcattaacattttgaatttccctcctttctcattcttttgaaattgatcttttaatgctttaccaattattattattaatattttttccttattgtgctaaaatgtcgctattttccttggaccagggaacggatggatttatatgtgctaaaagtcaaaaaatattttactgatgcaaaatcccaaaatatttttaagggctaaaaagtcactattttatttcgaaattgggcggttaaatgtgtttttggtgctcctctcgaaaacaaataaatccttccactccctaaagataatgaaaaattaattttatttgttaatatggagaaaaaaacaaaattgtttaattttaatgaaataaaatattttaatgtatgagaaacagaagcaaaagaagaagtacatatgtaccaggggtgcaatttttaggctctaaaaactgccaaagtaattagtttttagtttgctaaaaatgggtaaatagttgctaaaaactttcaaatttaaatgacgaaatttattcaaaaaagtaaaaaaattaggccaaatcagtagggatgtcaattttatgtaaatacaacatatttttttcctggattctccatggtctaaatagtaggaaaaaactttcgtttctgtgtttgcgaacaaaaatcggaacttttatttacatatttcgtgattttatacatatttggtacatttttttgacatccctacaaatcagtattgagctaaataatttttaaaatcacaaattcttgtcaagaaataaataggtaagtaaattttggattgatttttgaaaagtttttatttgttacgggtgcatttttgtaaattttcgggtcgattcttagggtttatttctaagaatatttttgagttattagaattattttctagtttttttacatatttttagcaaataaaaactataaaatttttgaaaaaaactatttttatttttgcttgtaaattaaaatttgttatgaaaaatgcatttaaatgcgatttgctaacagattttgtccaaaaaaatgaacaaattttgcgatttttagccaggagacgccttttttt

SEQ ID NO: 27548 - DNA, 597 bp, Heterodera glycines
tttcattttgagagttcttagcaaaaactgcagcaatccctcccctcccttcttctttcactgcgcaattcgcttcctattttcagcgacaattgggcgagtgatcacgcgaattggtcgaattggttgggaaagtggcgaagtagggaaaagaggtgcgatttgtaaaaataataagtgaaacggggattttgggaggtggatgattgttgggtgatttgatcggatggattgtgatcggcagagagagagagagagagatcggatgggaagtgatcggatgaaatttactaaagcgattgagtgacccgtcagttcagtcgattgtgcgctccgtcgttccaatcagtccgaaaacccgacaatttattttgtgtttgtaatgtgcaaaaagaatgaaaaaagcattatggtaaaaaaggaagggaagaacagccgaagagtgcgaggaaggagggaaatgacgaagaaattgcggaggacaatcgaatgacaaacgaaacgaacgaatgactctcgacgatgcctttccaactcaatttataggccggggacggggggggggcaaaccgcgcgggtcccaacttttcacccccc

SEQ ID NO: 27549 - DNA, 993 bp, Heterodera glycines
cggacattcttcattcatcccattcttccttccccccatttttatgtgttcttcccccccccccccaatcccatcattctccggcgcgacagaaaacaacaaaatatgtatgtatgtgttgaaaatctattgattttcaaaaaaaaaaattttgtgttacattggcggatggaattgaccaaaaaatgtgtgtgtcggccggcaaaactggtcattagtcatcattagggttccatattttattttccctggactgtgtgggagtaggcctgaaacgcacgaaaagcatatatttttaatctggcataatttactatattcatattttccgtatttgcgcaatttatttatccattccatagttttacatttttctttaaaaaacctctattagaacggtccgtcagctaaaaataaattttatggaggtcgagaagggcctaaattaattttggaactatatttttaaatttacttccgacatacatacatatatatttattctcataaaaaacatcgacaattttttgccaattaaaaaaaataacaattatggatgcccagaggggccaaaaatcattttttttttttcatggcacccccgttgataacggccaacaacgattaagaattaacgcagcccctgtgaccaattttttgggcagaaatcgaacattttttcacattattcccataataaatcccaccgagagcagaggagagagctctttttgccccatttactgataaaaaatttttgtcaaattcggctgctctgctgactgttggctgcacaactcgcggagtttttctccgccattttaattatttatttatttatgtttttctcccgtcattcaattcgttttgtgctttttgtgttgccgccgccgcccaatttcttcaaatattatgtatttataaaagattttgaaacaaattggttattggttttttaattaaaatttttattttttaccaacccctcctgat

SEQ ID NO: 27550 - DNA, 959 bp, Heterodera glycines
ctaaataaaatcaaaaaaccaagactataaaaaactaaaaattgctgattttatgcactaatacatatgtacatattgcatatttctttgttgttttccacgatcatgtctgactctgattacgtgatcgtccggaatggcgtggcacttccatcattcattcgttttcattcatttctctgtcccaattcccaatgcccttttcccatttcccatcgattgatggaatcatttctttttcttcattttgccatttacagatttaaaatacactcactttgttttttgttgaccaacgacgccaagctgtacacggaacagcagcaacagcgtcaaatggacgctcagcagcagcagttctgttccagcacatcctcctcgtccgcctccaacttcatgccctcctcctccgcagtgtctccggcacgttcttctactgttggtgctgcctcagttgttcatcaccaccatcatttccatacgccgcttccctcatttgcggaacatccgcttcaccatccgcaacagcagttgggcctcgtcaacgagcgctacacgtcgcccatgccaaacagcaacaacatcaacaacaatgcgttcgatggcactgacaatagtgggattggcattggcatttttgccaaccgcactctgtccgcctctgctggcatggcgaggccgccgccaccgcatcagctgaggcgtgcctcatccgcatcgatggacgcaggcggcaaatggaaaggcggcgccatcaacaataatatcgccgcaaggcctgccagtttgcaacaccatgaattgttgatgatgggcggcggtggcaccggcgtcattgatccgcagaaaaagcaccggttgacaccgttggcacgcaacttcgagccgaccgccccgcgctggcggaggaggacatgatgataccggacaagcatgaaacatctgcaggacgatgatga

SEQ ID NO: 27551 - DNA, 1102 bp, Heterodera glycines
  unsure (1)..(1102): unsure at all n locations
tggcggtcagtcagatacctaaaaaatgacgatgggtagagaggaaaagcagaagcagaatcgcctaggcttttcgttttctgttttttttttgttgggcgatgagagaattgagaaaatgttttggggaaggacgcaggacgaaaacgacgacgacgatggatggattggagaagaaatggttggtgtggctctgctctggcgttgtgtgtgcttggcgtgttttcagaagaggaataaaattgtgaggaagcgaaaaatggggggaaagacagtggcgaaaaagtgggcgggtcagaacgatggcagagaagtgggaggcagtgaaaatagtgtgccaaatcgagagaaaggggtgcgcaacagttgcgacgaaatagtgtggggcctgggcgacgctcggacgagcgatgtgcgagcacgcggggacctccgccgagcgctcacatcgccaaacggccgccaatttgatgcctgaccatggcgcaaacatgcgcaaaatgcgcacgcttaccatggccaaatgtgggcggatgagtgcgcaacttgtagccaagaatttgtgctacgaaaaatgatgtaaaatttggcgaaaatggtccaggctagnccgggaaaaagagcaaaaaacaaacacattgcgccaacattcaccaagttcggttcgtttaggcgtcgtttttcgttgtacagtaattttggacaaaagtatactgtagcattgttgtagagcagaaaatgggcaatccaatgagctccaactttgcacacattttatcatgccaaggcgcgtaaaaacggaaaacattgtgcgcgtggaactaagtgcactcagtccagccagtgaaaggcacggtttttcgggcataaaatgccgtaaaaaatggttttttgctcagaaaaggtaaaattgatattgaggagtgttaatatgtgtgaaaatttaggcctatttatgtgtaaaaccgtgaaattctttgaaaattattattgtttaatagtaaaggtggtaagaagctcaatgatgggaggtgagagagaagagagaggatgaggacttctctcttaaacggttaacgcgattttaattgaaatttttcat

SEQ ID NO: 27552 - DNA, 1937 bp, Heterodera glycines
  unsure (1)..(1937): unsure at all n locations
cttcccctcctctctcccccctcgcttcctccctctccttttaaggctctctctcttccctctcttccccttcccctcctctctctctctctcttccctctcttcccctcctctctcccccctcgcttcctccctctcttcctctctctctctctcttccctctcttccccttcccctcctctctctctctctctctcttccctctcttccccttcccctcctctctcccccctcgcttcctccctctctttctctctctctctctcttccctctcttccccttcccctcctctctctctctctctcttccctctcttccccttcccctcctctctccccccgacggttcctcccaatcttcctctctctctctctccatcttttggtgccacgacccccccttccctttcaagtcaaacgaaataatgggcattttcgccgaggtgaaaggcagaaaagattgaaatggcccacctaaaagaattgatatatgcggaaattgatcaaggatgagtctccggccttctcacattgatgctgcgtatccatcgcaattgcagtcgtcgtcctcgccaccgtcgccactggcccaaacaaaaatggagccgagaccgaaacgaccctttggaaaggcacaatagcaaatacatatatgtatagagtagcaaaacgggattcacttttactaattgtgtcctcattatcttttgtctctcttgacatttccactttatctccccttatcccttatcattatccccttcttatcttcccaccccacctcattcactccctttacaatggctcgcattgtcgcgtttcttgggccgtccaccgttttcctgaaatgccatttttcagtgtccccgtctctctgtctcttcacccgtcgtctgttggtccccaactcgctgagtaaatgtgaattttgttcggctcgtggcccatcgaattggccttcaaagggaaagcctaggtacgtttgctccccattcgatctgacttcgatcagatcggtcatgtacggctggtcaagcattcgtatccctgccactttgctgtcataggcaacgccgaccccgcaaattccgttgtcgcgagcagctgaaatctctcccgcacagcgcgtgccgtgagagttgaacctgcgacgaatggcacaatccgtcggatgccctccacccccccccccctccaccaaccaatcgtcggtgtaccgcgggtacgggtaagggtcgttggagctgaagtcgtaactcgcctcggcattgaagttgaagcggagatcggcatgcatgtaatcgaccttcagcagaagtgatcaacacattcgatcagttgatggacataaacccttccccaacattcgctcatccttttcccaccccatcgtccattatcgccgttgtaatgtttttgccggtgtatccgagagcccacgccttctccacgttcagatcaagccgcggtttcccatttgattggccgtcgttcttctgaaatgtgactgatcagtggaggggggggggcaaagcgaagggcaaatgactgaccaaataccattggaaagggtacaaagggtcggtgggcgattgaactgaaatgggagaagtgcccacccttaacatggcgtccttccccgcccacctgaagtgaagtcgagctgtttttgaagacggtcagccagcggacggtagccgcgttttaagcgcttataaccttcgaattttattcggattttgttggctttttgtttgaatttgtcaataatactgaccagtcatttgttccacataagcaatctgagaagaaaggggaaagtgaaactgaagcgaaagggaattcgttcattcgaattacgtctttatcctgtgagagtttggcgttgtgtccgaccgatcgacganngtccgcgcgtgggaaanngtgacctgca

SEQ ID NO: 27553 - DNA, 1299 bp, Heterodera glycines
  unsure (1)..(1299): unsure at all n locations
gctcatttacttgccatgttntattttttattggcattttgtgccatcgttcatttttggcagaccaattaaagacaaatcgcgcactttaaaagacacaaacagatcattcattcatttgttttccctcctcaaatagcccccgtttattttgcttcgttttcgtttcggtgtccacactttgtgattgatgggacggaatggtcgtccaaattattttcgttttccccgcggaaaaagggcatagattttttactaataaatttcccacgacatttgagaccaaaaaaacaaacaagggatattattgcgcatcattaattagttaattagggagggagcaaaaggcaaaatttggtgaaaagtgcaacaattcgcaaaaagcgaatgtgcgtgaatatttcaaagaaatcaaacgcagaggccagcgaggggagaggggtcgcaaaatttggaaatttacgaaaattaagattttttgtcgatccccctccctcttttaatgtatgaaagaaaaaatggcaaaatgtttacactgtccaaagtgaacacgctgagcacgcgtccgtccggctgaacggtgccaaagttgtcacagatttgctggtgcaatcgctggtcaagccgaggaacacaacgcaaaagctaaacaaaaggcacaaaaattcaatttctaattttttggatgtctcttattgttagagttctcgaaaattagaaaaattcgcgacgagaatttgaaaatttgggtttgaagagaggttttgtgggatttggagaaccctgttttgcccttgtacctttcccttgccgatcagcacaaccaaagcgtacagattggccaacggttcgaccaaatcgcactcctcgggcggcacgccatgggccaggcacagatgaagcacagcgtagtccaaacggaacaattgctgacgaagtgccgactcatcggacggagggacggccagcaaagcgatgccgtgatgaatgttggagtagggcaaggaaaaatggaggagccgggtgagcagttcagcaagttgggcacaataggacagagcggcgacggagtcggacggaaaatggcgacgatttgcggcggaggaagcggcagagaggggcgactgaatgttggcacaggcggacactttggcgagaaattggacacgttcgagacatgagcacaaattaagctgaaagaggggccaaattggaaccaaatcgggaagacgattttgatgaacatctccaagagatttggccatgaagagtaacccccgaaataaaaaatccattttt

SEQ ID NO: 27554 - DNA, 1475 bp, Heterodera glycines
  unsure (1)..(1475): unsure at all n locations
ttatatttgcacatgctttggcgtaaagtgaaggtctcacacacatacataaagctaacattcgggggcctgggaatggttgcgcatcagtgggaacggtaaaaacccggtttggtgtaccgttttttcgacataaaatctccataataatttttttggtttgaaaagaaaccaaggtccctaaaatgtggaaaacatttttgattacctacctatgtgaccaatttgattatggttttctatgttcacatacatatatgtgtatgtattcccataaaattggtaagtcttctaggaccccaagggcgtggccaataccttcacttccggatcgggccagtatcgtctgtccagttgcgtctgagccaagtttagaccaccataacttttttctttgttgaccaaatccaacagttggtatcattcgaaagctcttaacaagctctatcggctatacaaaaatcaaaaagacattacgacatataaataagttataacattaaaatatgcaaaaattaaatcttgttgccaatgatctaggcgattgccccctacgtgctctaatttagacaattttgaaaaaatttcataaaaatgcgaaaaaacagacatcgatcgcgatgttcttttttggatttgtgtaaaaaaatgcaggtatatgaaaaacacagttgccaggttactctttttttcactatatagtattctaaaagagaacatagagctgtattaattagataaactcttttccgaagggaaaattttgaaatttacaaaaaaatcaaatttccgattaacttttgacgtccaatcaatgaccatcctgtttttggccataactttttgttactttgtcaaaataaacattcttggtatcaaactaaagcttagaagaaagcaaaagttggcacaagaaagcagtcacaatgagaaaacaccaaagtgcgcgaaaagccattttttgtatgcgacaaagtaaaatcaccttcaaaattgagatttaagttaaaaaaataggggaaaatataacaacaaaaaaacggcttaataaccatagagttcttagagtttacaacttgcgaaaaattgaagggaaacacaaatttttcatttttgtttctggattttttttaattgggcaaaatgccaaaataaaataaaactaaaatttttgaatttttagaacgcaaaaaggaaaaccgtaaagcagagaattaggaaaggtggccaaacatgaacaatcgcttctagggattgcatttcatcaatattgaacaaaattggacatattttttaaaattttaaacggcataaattagacattttttaaccacatgattttctgcctgcctacttaagttaatgtcaattaacattttaattaatgatcaaatgtatttgntggcgttgnntgtgggcgctcttnttaaaaacagtaattaccataaaactntgaaaaatcgctaaataaattt

SEQ ID NO: 27555 - DNA, 1233 bp, Heterodera glycines
  unsure (1)..(1233): unsure at all n locations
aaagtcaaatcgaaaagggagaagggacagaagagccatttgaagagaagaattntggaaaagcaaattgaggcaaggatttgttgggagagatcgtcggacgtactcacttcgttcttcgtccgattttcgtccgtttgtccgttcttcgttcggttatgtcggcttttcctttggccttccgctgattcgttccgttattaatccgtgcgtttgttggccctttctttctctgcttttgtctggtcattcctttgttgtcaaattcggtgtcattatttttaatttgtttttattgtgccatttgttcgtttgttgatgccactttttgtttggccatctgtctttttccttccttcctttattattattttttatttatttatttatttatcatccctttccattatataaacacttattattgtgatgcttttcctcccattccttcttctctcccctcttttcttcttttctcctttctgctattttctgttttgtgctttattttattttaattttatttaattttattttatttgattttaattggaatgtaatgacaaaaaatgcgctcaaatggtcgaggggcaaaagaatgaattacaaaatgcgcagaattgcggggaggggagagaaattcagaaaagagagggcaaagtttgtgtcccattgttgtcgccaatttggaggccaaattgtcgcgagagagtgaagggtcaaacactttcattttttgtacactgtgcaccccgggggcatttgggcgcaattcgtaattgaatcaaatttcacactgatcaaacgcaacaaaaaacgaatagtcactgaagaaataaagaaaattgttttttatggcagaaaattcccatcatttttaaattgaatttctaatattttaaattgctatttaaatgccaaatacgaacaaataaaaatgccgttatgggttccgttaaatttctccaggttttttatggtggggcgggggcggggtccaattttccatggtttttgtttctccttttctttggccttttccatgtccaattttgtttcacgttttccacatctctcatcagtttatcactttgctttcggtgttccagttacgaaaataattcaccaatcacccaattcatccatcactgatcagctgaacagaaagcacattttgaggaggaagagaaggaaagactgggcgggggagggcaacaaaatggggggggggga

SEQ ID NO: 27556 - DNA, 1987 bp, Heterodera glycines
ttcgattgactgtttgggtgggatttcaaggacgagttgagaataaaattcctttttaggttccatattgtgaatatttatatgctgcactttcgcgtttgccgtcaattaataatttagagccaaaaataggtgaaattttggccgcggaagtcaatgggagatgggaaagagttgaaatgatcagaccatcgttagccgaccccaatttttgggtattagattgaaatttaaaaagagtaaaaaatgccgaaggttgtgctggttgtcgacgaagggtatttccacgccgtacatcacaaccagctgaggcctctcactgaagtcagttaaagccttcacagcaaattcaaacaaaatcattttagacagtgaccgctttcaacaaaatttttctggcaaaatgtaaggtaaagcgtgttaatttttatggacctgcagattgtgaacatttagcttgaaatcggcacggatggccaaggccgtggttggagtgcggaggtgcagcactttgtcagcgagtcattgcggaaggtggccatgcgaagtgattgccgggtggagttgctgctgcaaaagggtggaagttggcaatacgcggagggagggaagattccgacatgtacagcgaaattgctaatcgacggtgccgattttgcagcacaaatggcactgatgggaattggccattcgaaagcaatggaatgaaaacgcaaaacgaacgacgaaaagcattggggaaaaacaatttataataatccaacttaattaaattacattttattttgtgataaatgtgtataatcgcattctaatcacattcgaatgtgtgcaactcgaggcccagtgacggaacggatggctttttggatggtccgtctctcagctggttgaaaataataaaataccgcaataaattttaaaaagaagaaagtttacccgtccttttctcattctttagcttggcataaagtgcagaaatgtttcgtctgatcagagccctttcaattgttctcaatgatgaagctaaaaaacatgtttaattttttggatgcccctcccctttttgaaaaaatcaaaattagttttatattgaaatatctcctgagattttcggtctctgaatatgaattagacatcattccgcacccctaaaatggactcgaatggaaagtcaaaattttacatttatctcaacattggtttaaatcagggttactcttgaaaatttcccgaaataagtacatcgctggtcaaaaaaagattttatggtaaaaataaagacattttttaaaacacgcttacaaaactttaaatcgcattttttattcaacaaactcaagcattagcaacatatttctcgccgccaactatttttctgagcaattccggtatagaaacgataaatttatattccgaagaattttgatcaaaattcacttttacttgcatcaggcttttcactgtttctacttcaagcaaatttctcgtattttttttcgcggtttttgagtcaattttaaaaaatagagaattttggggctccgtcggtgccgataggcgccgccgggaaaaaattttaaaatttaaatgcaatttttaacagattttgtcaaaaaaatatccaaatttttgcggttattttatgattttaaatgttaaaattatgaatgaattcccatcgataaaggaatcattttgaaaaattaaaagaaaaaaaaattgcttgtagggaaactgatccaaagatagaatgagcaacataaccaagagcacaacccactgaatcacgcatatgaaaacgaaattgaattcaaatagtaaatttctttaaaaaattatcatttaaaatctaaatttctctgaaaccaaaaaataagcctaaaataaggacaaaccttacaagtaaaaacattcaaaatttgtaagatttggaccctcaaaataatggcaaatcttacaaataaggacgaagggtaactctggt

SEQ ID NO: 27557 - DNA, 1876 bp, Heterodera glycines
catggaattccggacagtagaataggtcctgacgaaaacgggcggtatttgatcagcaaagttcatgccgtttatgtacaccaaaacaatagaagagcctattttttgtcctttcacggttatttaatgttttttaagaaatgaatttttgattaatcatagttatgaaataaaaatatattttgagaattaatcaattataaaataaattatatacgttttaatgaaaataattttataataaaacatcacttttattctgtctactctcgcccctgagactcctggggtcgcttcgttgtcacaacgaaatgacccttggaatttcagggtgaaatcgggttcaccctgggttcatatctgaaccttgggcgcccatcaccctcacatctctctttatttaaataatatattatataattaaaccttgtatagaatttaaatttattaaaaatcaataaaaatatattttgagaaataataaattataaaataaattttatacgttttaatgaaaataattttataataaaacatctcttttattctgtctactctcgcccctgagactcctggggtcgcttcgttgtcacaacgaaatgacccttggagtttcagggtgaaatcgggttccccctgggttcatacctgaaccttgggcgcccatcgccatcatgtctcttttatatttaatattaatactataattaagattttgtatatgaatttattcaaaaaacaacaaataatttattcataaaattaataataattttattgtgtaaaggtttattagagcaaatttgtatttttctagggtggcccggatatgaagaatggacgatttcagaagattgcgaaaatttggagcaaactaatgagtttacggaattggtaacagttgaagctatcttcgacttgatgctaaatagaccgattgcgcgtcatttagctaaaatcgtcgaagcctgcccaaaatatgatcacggtagaaacaaatcggaatgaaacctattaaaatgattgggttgcttctttagttcgccaaaaacatgggctcaaaaacacaaagatcaaaaagcttgacatttcgttcgtatctaatacggaagatcgaatcaagaggaaggccgttaacggattacaaaaatttatcgataatgtatttaaatcctaatttattttggattgaactgttgttaaataaaaaacacaaagatcgaagccgagtaaaaagagggataaccgtcacaaaaaaaaccaaactttgatgagtgagatctgttaatggtatgataataataacaataataattattcgattaatcattttaattttgggaagtaaatttcattattgtggagcatttttatataacaagattatgttagccatttgtaagctatatatttatgtttgataaaatcagtttttaaataaatattatgacaaaaaattttagaatagaacaatggtttgaaagttgtgtaaaaaatctgttttttttttgttgagtatgatcattttttaatgtaatttggttaaaattaaaaattggtagttcaacatttttattcaacaacaacaaataataaaatatttggtttttgccagttaccaaggggaggaaatttctcctcaaacctctctccgaataggaaaaaattcaacagttaactaatttttaaacaaattttttctcctagaattgacaattttccaaaataaattcagaaatttttaggcttctaaaaaatttttggttacgggcctatttggtttatggcataaatatttggtttatatcaaataaaaaaatcgggcccgtgttaaccaacacagaagtgtctgcgccgatcatcgaaacagtggaaa

SEQ ID NO: 27558 - DNA, 1198 bp, Heterodera glycines
tttaaatttattctctatgccagaaaaatgctatctcttttttgcgagaaattttgtaccatacaaatgtgcccagcatgggcagaggggcgcggagagcaatggccattctattctacagggaatttttaaattatttctctatgccagaaaaatggctatctcttttttgcgagaaattttgtaccatacaaatgttcccagcatgggcagaggggcgcggagagcaatggccattctattctacagggaatttttaaatttattctctatgccagaaaaatggctatctcttttttgcgagaaattttgtaccatacaaatgttcccagcatgggcagaggggcgcggagagcaatggccattctattctacagggaatttttaaatttattctctatgccagaaaaatggctatctcttttttgcgagaaattttgtaccatacaaatgttcccagcatgggcagaggggcgcggagagcaatggccattctattctacagggaatttttaaatttattctctatgccagaaaaatggctatctcttttttgcgagaaattttgtaccatacaaatgttcccagcatgggcagaggggcgcggagagcaatggccattctattctacagggaatttttaaatttattctctatgccagaaaaatggctatctcttttttgcgagaaattttgtaccatacaaatgttcccagcatgggcagaggggcgcggagagcaatggccattctattctacagggaatttttaaatttattctctatgccagaaaaatggctatctcttttttgcgagaaattttgtaccatacaaatgttcccagcatgggcagaggggcgcggagagcaatggccattctattctacagggaatttttaaatttattctctatgccagaaaaatggctatctcttttttgcgagaaattttgtaccatacaaatgttcccagcatgggcagaggggcgcggagagcaatggccattctattctacagggaatttttatatttattctctatgccagaaaaatggctatctcttttttgcgagaaattttgtaccatacaaatgttcccagcatgggcagaggggcgcggagagcaatgagcattctattctacagggaattttttaaatttattctctatgccagaaaaaatggttatcctctttttt

SEQ ID NO: 27559 - DNA, 1015 bp, Heterodera glycines
aaacaaaaaaatcggatttttcaagtgttcgtttggggttctcaaacaattatggggaagcaaaaatcccacgcagaattaaattacagcttttaggggaagttatttccgaaaggatttggtctccccataaatctgggggcaatggtttcggggggggctgccccggaaaacaaaaaaaatcgattttttcaaagtttccgtttggggttactcaaccatttaggggggagcaaaattccaacgcagaattaaagtacagcctatagggaagctattccggaaggattcgttctccccataaatctgggcgcatcggttcggggggactgccccgaaaacaaaaaaatcgattttttcaagtgtccgtttggggtactcaaacaattatggggagcaaaaatccaacgcagaattaaagtacaggctatagggaagctattccggaaggattcggtctccccataaatctgggcgcatcggttcggggggactgcccagaaaacaaaaaaatcgattttttcaagtgtccgtttggggtactcaaacatttatggggagcaaaaatccaacgcagaattaaagtacaggctatagggaagctattcccgaaggattcggtctccccataaatctgggcgcatcggttcggggggactgccccgaaaacaaaaaaatcgattttttcaagtgtccgtttggggtactcaaacaattatggggagcaaaaatccaacgcagaattaaagtacaggctatagggaagctattcccgaaggattcggtctccccataaatctgggcgcatcggttcggggggactgccccgaaaacaaaaaaatcgattttttcaagtgtccgtttggggtactcaaacaattatggggagcaaaaatccaacgcagaattaaagtacaggctatagggaagctactcccgaaggattcggtctccccataaatctgggcgcatcggttcggggggactgccccggaaacaaaaaaatcgatttttt

SEQ ID NO: 27560 - DNA, 1157 bp, Heterodera glycines
tgaaacggaagagtgccatttgactggttttggcgagaaagaagccaaacgctacgtgagcaatgttgtccgcgtaggatttctgggagtcaacggagacccatatatatgcgcactcaatgaaatggaattcattgtgaaagcgatgcccatcgtaacgctgaattcgatggatgaagcggaattaagcaagaaaaaactttcccttccatcgcggccaagacagccagacattctgttgggaatggatgtcagacatgacctgaaaataagagacgagacagaaaagttgccaagtggattcacattgtcaacgtctcgagtcgggcggatgataagtggttatggccaagtccagggcccaatggacatgagtgtgcaagtgacgtacactggagcactcataagtgccttacaatgtgccaatagcagaagagatgctgacgaagaaattgaagaacagataaagacatttttcgggctgaacataatcggattgagcgacaatcctgaagaagaggacaagggagaagtgatgagaacgttcagaaaaggcttgacattcaaagaaggaagatatgaatgtggcctaccatggaacgaaagagtaaaggatttgccgacaaattttcaacaagcgagggcaagactttgtggcacagtgaagaaattgcgagaattgaatttggtggaagaataccaaaaaattttcaatgagtgggagaggaacgggataatcgaaagagtgccggatccaacacaaacaactggaccggtacattatctcccacatcggcccgtgataaaaatggacaaggccacgacaaaaataagaattgtgatggatgcatccgcgaagccagcaaaccgcaaaggagccccatcgttgaacgaatgcttgcacacagggccgttgttgctaaacgaattgaccgggatccttctaagatggagaagaatgaaggatctaatcctggcggacatcgaaaaagccttcctccaattatcagtgagagaggaggacagagacgcgaccagatttctgtggctggaggatccacaaaagacagaaatttcaagcccaacatatgtgagaaccgttgtgtttcggttctgtcaggtctcatttggattgacaacttcaccatttcttttaa

SEQ ID NO: 27561 - DNA, 1267 bp, Heterodera glycines
  unsure (1)..(1267): unsure at all n locations
ggggggagggggaataaataaaatnaaatatattttatttaaaaatggaaaaagggacatggnnttaatgaagggggatgggtnatgtgatggaggggaagagagagtgttcacattgaagagagacggatagaaagaaaacgaaagagataggagagagaacaagaaaagagagagagagataaaagaaatagtgaaagaaaataggatgggcgagagggaaaataaggaaagaaattatgaacaaatgagataagggaaaataaaagaaatcagagcatttaaaagagtgaggggatagaaagaaagagagagagagggagagagaagagagagagaggaaagagagagagaacataaaagagagaaagaggaaagagagggagagagagcacagaaaagagagagagtggagggagagagagagagggaagaggagagagagaatataaaagagagaaagaggaaagagagaggaaagagagggagagagagagagggaagagagagagaatataaaagagagaaagaggaaagagagaggggggagagggagagagagaagagaaagagaacagaggaaagggcggggttagccagccaaaaagcgattaaattcactatttgaaaaatatagcttttattatgtatgtaaatcctttttgtgcataatctaaaaattgaaacttttctttttacaaaaattataatctaaaaaatttttgactaaatcataattaaataaaacgaacgaaaagtaaaaagagaggaaaaagaagcattcatttggggcaattagctgctgaaatgggcgaaatatgtgcaaacagtgaataggaaaattatattcaatttgaaaaagtgaatttgaattaatttcaacaaacataaaattatcgttaattaatttaaagaattaaaattaatttttatttcgataaaccaatagaattaaattaaaacaataatatttttttcaaattattatttttatctaatcaaaatttataatttaataaaacaaataaaaacgaaataaatattttttaatagttgcaaaattaaagtttactaataataataatatcaaattaattaacaatatttggttttccatataataatttattaatttatttaatataaaataaaataaataacctccaaaaaatcaaaaacaaaattanaataaattttaattatgtagctaaattaactaattttanatatttaaaaaaaaaatttttttattatttttattatatca

SEQ ID NO: 27562 - DNA, 1515 bp, Heterodera glycines
  unsure (1)..(1515): unsure at all n locations
ttttaaaaaaacctgaaaatttttttaaaaatttttaaatttatttttttttttttaattttgggaggggatttttcccttcccaaaaatttgttaaaaaatcccaaaattttcaattttttgattggctgcataaatatgaaaatcggatttttttattttcgacattgttcaagtcagggttcggggtcggacatagctttccctaatcatcaantatgtaaattaaaaaataattttctttcagtggtggagcattgcattgataaaatcatggcgttcaattcggggctccccattgacaacatttactacagaacacaggcncaaccatgtgctggtcaacgaatatttgcctggacaaggcattatggcgagttattgttgccaaaaatataaatgtattaatataatttttcaattatttttaaaattaaattagtaaaaaaaaattttccattatttttaatattaattaattttattattattattttcagcctcacacggatggaccagcattttacccactgatctccacaatttcacttggctctcacacagttttggacttttacgaccaagtcagtcatgtctagggctccaatttttagccaaaagcctatttttttcctgagctccccgtggcctgaaacgcacgaaaaacatttttttgggctgttgttaagctacttttcgagttattagtgcctattttctagccttttatttttagcgcctaaaaagcctaaaaaattttgaaagagcctatttttgcctattttggcgttttgccgaaaatttgttaacaaaaatgcaataaaaacaaaaaaacacccctaagaatagacctgaaaattttataaatacacccttaagtaattaaaattttatcaaaaattccatctccaaaataatttatttattttcttgacaagaatttttgattttaaaaattatttagctcaatactgttttccctaattttttgctaaattttttaattttacacccaaaaaatttgagactttttagggcctattattcgaaaccttttacagattggaaagacacttttatctttttagaatagctttagtccctttaagactgttttcgagcgttattaaacagtcggacgattcagtccctgttgaaaatggacacttcagtatgcgattgtttacagcaaaatggcaagcgcgcgcctaatttgcatttttctcaccgttttgggccatttttttacaaatgttttgaattttttgatgcaaaatattttaatacaatcatacaataatcttcatttttaaaaattttcttgaaaacatttagctgaaataatttcaataaaaataaaattaaaccatcaccgtaatggctgacaataacgtaagcactgataaaaaaataacaattaaattttatattatttttgggaaattaaattttatttgacagtcataattcagagatttttttatatttttgtagttttatttggccttcaaagat

SEQ ID NO: 27563 - DNA, 1179 bp, Heterodera glycines
  unsure (1)..(1179): unsure at all n locations
aaaaaatagcaattttaggggattttagttttgaaaatcatcaatttaaaaagaaaaattttcattgacgcctttgagatcagcaaatgatgatacgaatcaaactacctatcatttcttctctactcaaaattatacaaaaagttgatctcacaaaaatcaaagatttacgcattttgattaacaataataatagcgttttgatcaaatccatatgaatgacgacaacaagattagcaaccacaataaacacatattttgtttgtagggtcgtaaattatatggattaacatattttttctgctcaaatgataggttctttcaaaattttttaggcgctaaaaataaaagccgagaaaataggcactaataactcgaaaagtagcttaacaacatccccaaaaaaacatgtttttcgtacgtttcaggccacggggagttcaggaaaaaataggcttttgcctaaaaatattagccctaattattagtacaaaatttgagatgtatttggtttgcaattgtgaagctagaatttgataagatttggcattttaaaatccatttttagctgtttttagtgttttttattttaaaactttaaatccatttttagcagttttagtgtattttttaagtctgctttagtaaagattgaatttataaatacacatccactttttggaacttttgagagtttaaaacttataatttgtagtttttagtccatatttggcccatttttgagctttttagtccatatttcgggcttttttaatccatggcatttttggtccatataatttacacgcctattttatgcttcgaaagctatggtgatagcgcaaaatcacatttgcttgattgccgtacgcccgtagaagctggcggacgcgtacggctgcgactgatttgccgactggccccatatggcgtttccaagccgacgcaacacgctgggatagagaacgctgttgtcgtttccacgccgacaatcgcctgcagggggaaatattttattgaggaaaaattaagggggcctaaaccttcaaaatttaaaaagaatttctcataataaattttattattttttaacaactcagaaatccaaatttttcagcaaaaagtaaattttttttaagttttttaagcgaaacactanaacatttgtaattttttaaa

SEQ ID NO: 27564 - DNA, 925 bp, Heterodera glycines
cagatttcttcctccagcggtcaacatgttggtctcctgcctgacgcttgttttggtcagtcaatttttaattttgatcatttctgatcacttttcttgcttgtatttgtgaccgaagtgtgccccctgctctgatcacttttccattacgttaaatgatccgaaagactgatcgaagttcaaagcaaaaaaaacaaaaaacaaatttcatttcaccattcatctctctttattaacttctgctgatcaccgtgatcactgctttgatcaaaatttcttgttcagatcgcaatggatcgcttcttgttaacactgttccccgtcaaatggtcagttggccaaggccaaaaattaaaaaaaaaataataattaattactagagctcgacatggacatggatccaggagttgttttttcctggatccaggtccaggtctaggacgttttctgcaacctggattttgctggacctggatttttgtccgggtccaggaaatccaggtccaggtcaaatatgaaaaaaaaccaggtcctgatccaggttaacacaaaaacctggatttccttgacaaaatttttgaacaaattttcaaaaaatgattaaatggatttaaacacattattatagtaaattatagatttttatatgttcctcagcactagaaaaagttttttttcaaaatgtagagctttaaaaattttaatttctctaaaatttcaaggcgtatggcagccaaagcaccgctgttctgctacctgttcgcctggttttgtgccattattgttgcagcaccgtacggtgccgccgtgtccgttgaagatgccaccattttggacccgtaagaggccatttaaaatttaaaaaaatttggcataatgcttccccaatttttttccagctggaacacaccacacgtggagcatc

SEQ ID NO: 27565 - DNA, 1690 bp, Heterodera glycines
ttgtataggcatctgatcagttaagaaatcatcagagtgatcagtttgtataggcatctgatcagttaagaaatcatcagagttatcagtttgtataggcatctgatcagttaagaaatcatcagagtgatcagtttgtataggcatctgatcagttaagaaatcatcagagtgatcagtttgtataggcatctgatcagttaagaaatcatcagagtgatcagtttgtataggcatctgatcagttaagaaatcatcagagttatcagtttgtataggcatctgatcagttgagataatcagagtgatcagttctgtataggcatctgatcagttaagaaatcatcagagtgatcagtttgtataggcatctgatcagttaagaaatcatcagagttatcagtttgtataggcatctgatcagttgagataatcagagtgatcagtttgtaaaggcatctgatcagttaagagaccatcaaagtgatcagtttgtataggcatctgatcagttgagataatcagagtgatcagtttgtaaaggcatctgatcagttaagagaccatcagagttatcagtttgtataggcatctgatcagttgagataatcagagtgatcagtttgtaaaggcatctgatcagttaagagaccatcaaagtgatcagtttgtataggcatctgatcagttgagataatcagagtgattctctatgatcctgtcttgatcaaacattgtcaatggaagtgatcagtagggtaagatcagttaacagaaatcagcggaatgatcacctttgtcgatctcatcctcacgaaatcacttttcgaatctgacaaactctgtgtcctttgtttcaggcgaatgtgcagtggcggcacggcgtcgacgtcagcgaatcggaagtgcgtgcgctgtgcatgctcagccgcgacttgctgttgtcgcagccgacgatgttggaattgagtgcgccactcaaaattgtcggcgatatccacggccaattctcagtcagtccttttgatcgccatccgatcagtcccattttttcctcccaaaattacttggacaattctcagtcagtccatttgttcgttgtccaatcagtcccatttggtattctctcactttgtcagtcgatcaccgtccgatcactcccactttttcaaccaaccaaattcactccttacttaaaaaaggatttgcttcggctgttccacgcctgcggcttcccgcccaagtccaattatttgtttctcggcgattacgtggacaggggcccccgcagtttggaggtcatctgttctccaattggccataattagctattccaccgcttttgcagacgatcattctgttgttgtgctacaaaatcaaataccccgtcaatttctttcttctccgcggaaatcacgaagtcgcctcgctgaatcggatttacgggttttacaacgaatgtgagcccattttggcattttgttgacattcagtgaccatggcaattccaggcaaaaccaggatgaacattcgggtgtggaaggtcggcaccggttgtcttgatctttgtccattttggcatttttaggcttttcaagacgttttcaattgtctgccggttgccgcactaatcaacggcaaaatcttttgctgccatggcggcctttcgccacatttaaggacattggag

SEQ ID NO: 27566 - DNA, 729 bp, Heterodera glycines
tggtcccacaaaaaaaaaggaataaaaattcaaaaaacactttttaggggttatttgatgcgctgagcacgaatttgaccttcttttgacttaatttcgaaccccgaacccggattctaacatttgaaaaaattcaattttttgcaaatattgctgatgcattgcttggtactgtaactacaagatgagtaaaggaaatcgaattcttcctatttacatacgtatgatcaataactttgaataacaaacggatcgcgtcagttggatgaagtcgtaaacaaaagcatgaaatcaggcaaactattgaagaacataataggcggtcaataataatgaccagatcaaaagagacaatgagaacattttcaactaaccttaatactagcttattaacaatttagccatggatatctttgatatttgttcacaatttcaaaccaatgagcatacaacttttacgacaaattgcccctatctgtggctattatttatcacattgccttttattaccccgtgaataactgaattgattcgatttcctttactcatattgtagttacagtaccaagcaatgcatcagcaatatttgcaaaaaattgaattttttcaaatgttagaatccgggttcggggttcgaaattaagtcaaaagaaggtcaaattcgtgctcagcgcatcaaataacccctaaaaagtgttttttgaatttttattccttttttttgtggga

SEQ ID NO: 27567 - DNA, 1313 bp, Heterodera glycines
  unsure (1)..(1313): unsure at all n locations
ccaaattacattccaataacaaataattaccatcactaaaatttaaaaaatcactcacaaatcctttctcattattcccacacaatttcacctttcatcttcaccatcactattatcattctccacactattcttctttttatctatatttattaanttttaaataatataaaaacatttaaataaaatcttaactgttttttacgcaaattgcacttgcaattaccacagcaaagaacaacgaaattgcaaaattcatttagctgttatataataacaattataagactttctaaatcataagaaaatcacttgataaaataaactttggaaccaatattctttgggattatattataaattcctggctatagaatttattttcagtggctttgagaactggaaataaagcattggcaagatgggaaaataaaaattttattttaagtaatatgacggaattgaaaattatacaaacaaaaaaaaaattatgcgtaaattaattgagtaatgacagcgttttatgcatattgttctacttaatgatgtgaagaaatcctacacattgacgtaatgttactagagatgagatactgttagaataatagcaaaaaatatataataataataataatgtggtaaatttttgatttttttaaaaatttattattatcggaaaaaattatttttttattttattcctctttttatatttatttgttttctttttaaacctttttttcgaatttaaaactcatacaaacacggttttcaagaatcccacccttgtaagatacgggaactaggcaatcaatatacataaggtattatggccaagatcgggtaaagattgaaatttttaatcttgaaaataatattggcctaatgcacaagacattatattaatcgaacagttttcaaaattccataattttctaaatattaaaattttaatttacaaaatatatgaaaataatgtcgtacacagtgccacccgaagaaagacaaaattttttgaaaaaagctaaagttaaaaaacctattaatgacagtccgaagtgattttgaattttaattataatttaaataagaaatgacaacaatttggcatcggccaagattcacaaaaattataaatattcgagacaaaatgaattttttgcaattatcgttttcatctgattcattccgctgtgttcatttctcaaaactgatgatatggtgtatcaggaaaagttgttgccagtgagtcggttaatgccatgctggaatagcactaaaaagggaaaataaatttaaatgatgcatttggc

SEQ ID NO: 27568 - DNA, 1868 bp, Heterodera glycines
  unsure (1)..(1868): unsure at all n locations
tttttatgtttcatctaataggctactaattcatgatttttaatattcaaaaatgctcccgattaatgatttcgggtctctaattgtaagttgtaaaattattaaatttgttaacatgtgctcccaatttttcataatttttgccatttcagccgcccgattggctgagngtggacgagttgaaacggatgattgttgcggaggcggaacagagagcatttgcgcccattccggagtgctttttcgagctgtccaacctgttgatgctcaacgcgcgggaggatgtcgagcagtatgagcaggttttttttaagtgtccgctttttcaatgaaataggttaaaaatgccaataaacatttagggtataattgccaccgtggcgtagtggtgtacaaccccatctctctgtcggcagttcaaataccattggagggcgccaaaaactagaaacaaaacaaaaaaacattttctctaacagaagagactccattcactagtcagcagacactgtgtgttaaaaggtgtcgctcacgccgagtggccccttttatgcatttgtgcaatgtttgtgttacgtggatggaaaagcgaaccccgcgaaagggggacgaaacgcgagagtttgtgccggacacaaaattaaatgtttggtgcattagtgctgtctcgaacaatccgtaaaaaactttttgtttgaaaaattcatcgtattcctctacccctcctacagaaattttcaaacccatccaatcgaatttttttgtatgcattttccccaagggtttaatggagacataaaataggacactttgaatccgaacttaaacatttttcgttgccaaatttacattttcaaacaaatttgaattaattttttccattttagttgaaaacacttgtcaaggacttgtgggacaaacgggaggccaaaatgcgcacgtcaaccatcaaatttcttggccaggcaagtcttgtgaaaaaatttctaaaattgcttttaaattccaagtttttgccccaatttttggggttggacattttaaagggggtcgaatttggtgcaatttgtggggccgtttcttaccatgtaaatcatggacatgaataaacggggcatttttcagtacgaaattggacatgcccaactggacaatttgacgcgcatggaaatttgttgtgcccgtgccacgctcatcgagggcagcaaacagcttgaccggctgaccgccacgctgcattccgtccgggactgaattttctggacggggaattttaaatttttttttcgaaatttgtacgccacacagccttttgaccggataggactccaatttttgaatcgaaaatctgaacccctgtcgttatcctgaaaaaaccaagcaacaaatccccatcctcggatatacatacatcaattctccttgcatttttgctcgaatttcctatttttagacacggaacccccaattttaaaatgaacagaattccattttcgaataaacgatgatcaaatgtccccatttttattggacttgtataagaatttaacagccaaaaattgaccaatccgcgtccgatcaaatcaaattccatccaattttcatttggtcagtaactctttttaatgtcctcctttttcttggtgcaaatatcatccggtcttctgtcagcttttccattcatctgatttgtttttttatttatttttggatttatttgcatgcattttgtttaaattattattttttgttgtgtcattatatttccatgttgtttaattgatttgtctttaaagtgccaattctttaatagctttcgtcctatttgtcgcgtttacacttttttttttggacctgcagnngcatgc

SEQ ID NO: 27569 - DNA, 897 bp, Heterodera glycines
atgccatcggtcgtcagttgatcactgactttcatccaggtccctctgccggtccattcaaatttcgtccattttgtctctcatttcctttagctgtcaaaaacgtcgcttctgccagtcaaaatttgctccgttccttccaaagtgtgtttaattttccccgataattttgtctgtcaaaaaaaggcctaagtcatcacttttacgaatacaccgccgctttatacgctttgggcttttcgggcataaattcggatgagttcgaagtgagggaacagtcgaaaactctgcagacggtgaccgaagtgctgaagaaagtccattcggaacagatcgattgggttggtaacagtgaagggaaagcaaaaacaaagcccaaaagatggattacttcacggcgatggcactgacaatcaatcaaaacagcaaaacggagaaggaacggctgaaagcattgattagcggcttttccgagagagagaggcaattgagcaaagcaatccatcgaggcaagcaaatgccggacacgcggagtaacttttacgagacggagttggaggcgatgcgggaccaacaagtcaattggggggggaggaggagggggagagggggactgggccgaacataattacgaacgacaaatcggatgacaaatttggcatttgtcaccaatttaccaagtcgtttgtcacttgcctatgtcgatttgtcttttgtctctgtcgttcgaattgtcagtccaattagaattgacaaaatctaccctaattcgtcgtttaataaattttctttgataaaacaaaattttagaaatgcaaagatttaaaaaaatggtaaaagagtttctttgggtttttgaatcgttgattccgaaactaacgtttatttgctctaatt

SEQ ID NO: 27570 - DNA, 1005 bp, Heterodera glycines
aggggaggaggaaagtcggtcagtggaaggcaatggcggtcgagggattggtcatgggcatgggcggatggacgcatggactgcgcaaaggacggggacagacgaatttggggccgaatcggcgacttttgctgtttgtgctgctgctcttctcctgtcttcttctgtgccaatttgtcggtcccttttcgttgctgttgtttctgtgcctgctccatctcctcgtcgtccattccatcgaatggatttttgggcgctgtgtcaccttccgaaattccattgttaaccccctgcgtttgagcggaagtcagtagccgaacgtcgtcaactccgacgatgtcttccgctgaaaataccaatagggcgaatgcctttcttccgtcccttggccatcccttccgtttctccattcacctgacaaaaggtttcgcgccctcagcaccacgcggaatgccttttgcgcctttggcaattccaccgcccgccgcacccatcgcttctgtcccggcccctgaatggtgtcaacacaacgcagtggctcgagctcgtcctcctccacgcaaatgtccaaagacggagatgcgctggccttccaataggacaaagtgagttcgcacggctcctccaaacggtcgacgaccagcggagaccgaagggaaccctccgtcggactgtcgaaatggccttgggcataagcgaagcgattcacaactgcacattaattgacaaatcaattaactttgaacacagctaaatttataagtgcgccatcgtttagcaccaattaaacccaattagcctaattagcagaattatgccaaataatcagcagcagtacgctgcctttccgacctcctcccgccgaatggaccaatgaattggccgcgtccacaatcactgcatcgccattgtgccaaaggagggcgctttgtccgtttttgggacgccaagcacaaaagcctttggcattggatgggcccggctcaaaagaacagtcaaaggacg

SEQ ID NO: 27571 - DNA, 1068 bp, Heterodera glycines
ctattttggcgttttgtcactattttgtcactatttcgacattttttggaaaattctttaacaaaaatgcaataaaaccaaaaaatacacccctaagaatcgaccaaaaaattttttcaaaaaatacacccctaagaatcgaccaaaaaattttttcaaaaaatacacccctaagaatcgacctaaaaaattttcaaaaaaatacacccctaagaatcgacctaaaaaattttcaaaaaaatacacccctaagaatcgagctaaaaaattttcaaaaaaatacacccctaagaatcgagctaaaatttttcaaatatactcctatgaaatgaaaaaattttctcaaatatttactttcttggcaaaaatttttaattttaaaaacttttttaggtaactattttggttttttgctcttaaaaatcccagtcctactcattttgcaactgcaatcagtgaataaaaattatttttgctcaatttttggctgaaaattatgtcactattcgtcactatttcggactttttgtcactatttcttcactattttggcatttttactcactattttagttaactatttctggatttttcgtcactaaaagtcgcgaccctactgatgatggtcaaaaaagtgaaaaaaagtttttaaaatgtatttaaaaaatgtatagaaaattatcaaaaactaaaagttcaacaattttccattttatttttcaaggcggggatgaaaaactgctccaagttactttacagtatggaatttaattttgacaaaaaagattttctacaaaaattgggtataatttctagcaacaaaaaagaaatttaacatataaaaaaggtaaaaagaattcgaaaaaatatatttacttaatttttgttaaaaataacaattcacattttatgaaattatcattcaagaaagttatcacaaaacagaaaaaaagcaacgatttttttttcaaatgaaaatgcgcttcagaaatttttccatggaaaaatattgtaaatgccacgcggcattgcaaacaaacaaaaaaaaaaaatttctccgtctgtctc

SEQ ID NO: 27572 - DNA, 1633 bp, Heterodera glycines
  unsure (1)..(1633): unsure at all n locations
cttttgttgtccttncactcggaatttaattggaattctttcaaagcattcgaattcggagtccattgagttcccaattttggcaaattcgtagtcatgtgcttgcaattcgatgcatggccacactttaatcaattcaggcccggccacttttgccaccagtttaccagattggaataattttctggcaaaagttgttggatctgagagaagtgccgtcgctgcccatcttctcgtctccaacatataatcacaaatcgatttaattgtctgagaaaaggaaagagtcagcatttctcttacttgttcatccaaatagcccaatttggagttcatttccgattcggtgacccaactttcaagtgatctcgtctttctgcttctctttgaggattcgttgctatcgtcggaaggcaagtcttgtacagcaaatccttcctccgattttatcagattcagaccacatgagttgactttctttgtgttgttcaaaaatgtcaaacgaaaactgacctcatccgaaatccaaatattgtcaagttgtagtcctttccatgtgccgattttcgaaaattcacaggcacgggtagtgttggtgtcccacatgagcaatgtcttgtcttccatctcacattggcctgccttgaattcgcaattgttcactaacccgaggggactttgcataactgtgctaccgtgttgtgacataattttagtcttaaaaagataacaattttcagttgagacagtcgaccagctaaatgagccaattagccacattcggggtgaaaaatccaatttcttgtcagtatgcgagagtcccgagtcattaattagcaagcctaagctgcactttccattttcggccatttgcttacattcactcggagtcatttgcaacataagtggttcaagagtctcttggatcggaacattagtgattgaagtgtacttacgcacggattttctcacttttcggcaagcccaagcatctgccgagtgctcaaataaatttggcgaaaagacatcgaaagttcgaacaacaggtgcttttgaatgatcaattgacagctttgaacagccagtaactgccggcaattgccaaatttttcctccgttttgggtttgacagacaaggggatgcattggcagatggggcatattagcagtagtaaagggtaaaatcattccaacaagcattaatgtaatgaacattaaagaagcgactttcgatcgtacgcttggccgttcccaatttgacgttttgggaatgtttgtctttgtttccggcccacaggctggggattcactagaggatccttttgctaattcattttcgacctgacaatccattgctgttgttttgggtttgatgtgtgtgagcgcattcattgccccagatcttggttcctcatttttgtaattgcgattgtcctgaattttgaggtcaagtaacgactgggccaagttctcgaaaaatcctggtgaagtgttgaaagagtttggcacatccatcatgttaacaggattctgccgattttgccattgtccctgagattgacgaggttgctgatttgaccattttccttgacggaacgattggttggaatttcctctgaaattggcacggcgt

SEQ ID NO: 27573 - DNA, 801 bp, Heterodera glycines
aagcaattgttttgttttcacttaatttcttaggagtgtattttttttaatttttgggacgattttaggagggtaatttttctgaaattttttaagtagattcttaggggtgtattttttggttttattgcataatacaaaataaatatgtaaaatgctaaataaatcgttaaaatctagtaaattttaagaacccttgtgcttaaaaatttatgttttcttaaaaaagggtaaataattaaaataaataggggagcaaaatagaatttagtgctaatttggattttggtgatgaatggatttggcatctttcatttgtgcttttatatgccatgatttccctgcccatctctgctgttcccattttggttctcttctctcagattaattgccattgattaatctgtccattgattttccttgggttaatttgagtggcttaatgccctcctctgccagtgaatgggaacggacggcattttctttgctcgcacaagggcactttgggaaaagcaacctaatcctcaaccaaaaaatgaaaagcaaaatgaattgatttgatttatgcttttctgaggccgaaagtgatcatttaaaagtgaatttttgtaaaaattaagcatatgtctaaataaaaaaaccggagaaactaattagcaactccttaaaataagaatcaactaaagcttataaaatcttttgagaaattattttttcatattataaaattggtaattttacatacaataaagaaggttgacgcaaattccgagtgaaaaatgcaaaaaaaaaaattgttcg

SEQ ID NO: 27574 - DNA, 725 bp, Heterodera glycines
aaaaatttttttaaaaaattttccttatttttctggtaatatatttttgttttcggtgggcgctttggacagaaggattaatccccacccttcccttctgccaggtaaaccacaatttgtggcttggcaaaaagttaggttgccttaatacaccaacccaccactcctacccccgcgcaccccgaacggttccccgaaaggaaggattttaataaaattttttcttcggggaatttttttccattagttgttcgttaacctttgattactttaattcatttaaaaaattttatggagatatatgtgttgttctgtaaagcgggggggggggggggcgggggccgaaggccccccacgaggccgcgaagcggccgagtgagtaccttgggcgcagaaaaattattaaggaggagggttcattatttatttatttttttacaaaattaattcataagtatttttacagaaactgctctgaaacgcaccaaaatttatttacaagttgaataaggcactctgactcttatattatcaaaaagggagatgaataaatattttaaaaatttttaattcctttttaaacatgccaaaaagtttaggcttaactttttttatataaactgatcagaagcgcaccagattttgcaagggcatcaaaaagacaaggaaaagcaccgctatgatgctaacaccagtaactcttaatttaaaaatttttattaatt

SEQ ID NO: 27575 - DNA, 1208 bp, Heterodera glycines
accattcgcagcaacgacaacgacgacaaacgcaacatctttccctccttcctctcccattcactcatcacaatcaattttgctgttcatcctcacatttttcatctttttggtgttcatcgcgcaggtagcccacacccctcaatcaatttgaacctaaccccttcccctctttaggctgttcaaattggagcacttttgcgacgcattctcaaaaatcgtgtcttccagcgcaaattgcagcagcgtcagaagagtgagttttttttttttttaaattgaaccaaccaaatattaagaaatcaaaactcttcgcaaccaagtgggtcgccaaacgatgccaatggtggtgaattttggccgggtgggtaaaaactttttatttttattttactattttaaattttcaaagtatttcagactggggacgcgcaaaggactggacaagtcgggggccgccgatcgatgccaccctctgttgtgccggcgaatttgggcggcgtgccgccataccaggtacaaacacaacaaatccatttgcttccctttcttataccatttttttttaaaaaggagccgcaaacgcagcgcgaggtgatttacgatgtgccggcggatggtgtgccggaagacgacgatgacgacgacagtttttgaacgatgagccgatacaacaatgagctttaattcctcataaatttttataaaatttgggaattttcatttcacatttaacaaattttggctaataaatgtaattcaaaaatgattaattggcaatttataggagaccactaaataggagaaatttcaaatgttttactgttgggtattcagatcgttaggcgagattaatgctctttacgcaaaattttaaattttaagcatttgatataatctttttgaatgattaatgtgtgatatagtggagaaaatctgtcggtacatcaaatgagcaatttgtttaaaaatgggtcacatccattatcgggaattcgggatgctttggtgcataataaagctgcctcccatttggagaaaaataaagatgttttgcaaggtcaaaagcgcaccatttaaattcatccctcccgtctcgctctctcatttgctcaatattttcacatttatttatcctctacattttgctatatcctaatcatatcatttaagtacaccaaatttacttcaaattaaaaaaaaatgtc

SEQ ID NO: 27576 - DNA, 1005 bp, Heterodera glycines
tacagtgcgtagcacaggttgccttttctcatccggccaaacgaagcattagtagggtgttggacaccgacagaaaaatcgtaacgtgcccaaaaatagctatctcttttttgtatccaaattgcgcattaggtatttcatacagtgcgtagcacaggttgccttttcttatccggccaaacgaagcattagtagggtgttggacaccgacagaaaaatcgtaacgtgcccaaaaatggctatctcttttttgtatccaaattgcgcattaggtatttcatacagtgcgtagcacaggttgccttttcttatccggccaaacgaagcattagtagggtgttggacaccgacagaaaaatcgtaacgtgcccaaaaatagctatctcttttttgtatccaaattgcgcattaggtatttcatacagtgcgtagcacaggttgccttttcttatccggccaaacgaagcattagtagggtgttggacaccgacagaaaaatcgtaacgtgcccaaaaatggctatctcttttttgtatccaaattgcgcattaggtatttcatacagtgcgtagcacaggttgccttttcttatccggccaaacgaagcattagtagggtgttggacaccgacagaaaaatcgtaacgtgcccaaaaatagctatctcttttttgtatccaaattgcgcattaggtatttcatacagtgcgtagcacaggttgccttttcttatccggccaaacgaagcattagtagggtgttggacacagacagaaaaatcgtaacgtgcccaaaaatggctatctcttttttgtatccaaattgcgcattaagtatttcatacagtgcgtagcacaggttgccttttcttatccggccaaacgaagcattagtagggtgttggacaccgacagaaaaatcgtaacgtgcccaaaatagctatctcttttttgtatccaaattgcgcattaagtatttcatacaggcgtagcacaggttgcctttt

SEQ ID NO: 27577 - DNA, 1465 bp, Heterodera glycines
  unsure (1)..(1465): unsure at all n locations
tgttcgaattcgggttaggggttcggaataggtctaaatggatgtcatattcgtgatcagcgccctcgaaaacccccgagtactactcagaatcgcataaaatcctttattctttcttttttttagggaccaataaagtacatgattaccctatttcgtcctttctctttttctttataatttctcttattttgtcgtactaccaatcatcataagcagggatgggattcttaggtttttactttgtgttaaaaaatgcaaaaatatgtgctaaaaattggaaaaaccaatggtatttttgcataaaaattccaaaaaactcattctttatcatttttgcccgcacaattgcaaataaaaaacatttggaggtgtttgggggtaaaattagtccttttttgataaattgtttttaaagataatttttccatcagttgagtaagtgccagcaagaaacttcgatatccagtaacgaattaatgaagaattcgattttcggtacacgaaataaataaagaaaattttgaaagagcctataaaaatggcaagaaagttgatttttaggggtgcatttttgaattttttgtgtttttttttcttagatatttttttcaaaaatgccaaaatatgtgcaaaatatgtgccaaaccccgaaatatgtgcgatatgtttttatgtgcgaaaacgccaaaatatgtgtttttatgtttttataagtcgctctaaatcaaaaattgttcggagaaaatgctatttttgggcttctctcgccataactaagccgcaaaaaaaatatgttaaaacataaaaatcccagccctatttattatacatatttagttttggtgaatttaaattcggacagatttacgaaaaagactttttaccattttcaaggccatcgttggaaaggtaaaagcccaaccatttctcattgctttcgtttttcgtttcgatttgtgccattattttccatggaaatctcccaatgtccatggcatcgctaaatcggccacttcccacctcctccaccgcaaattcggacactttttcaatttccatctcaattgtgccttcgtttttgtagcgttgatgggtgggaaatttcaatttgataagcccagtggcatcacttaactttggatgggaataatgctgatacacgctgttcacttcttcaattgttaacacaccagttggaactgaaatttgattgaaatggataattaattagacaattaattcattcataaaatgagtcatcaattaagtttgccttgacctggggcattgtaatattaaaaaaacgacatacggtcttttaaattttaagtctatggaattaggttattagaattataattagtgcaaaataaaaatttgattccgattcgataagaaataaaggcaatcttatagtgaaaagaattgcagattttttttcgtatatttctttcaanaaata

SEQ ID NO: 27578 - DNA, 1712 bp, Heterodera glycines
ggcgatgataaaaaatatttaatttcaaaaaaaaaattttctgctttttgagagaaattatttttaatgtttacaattacccataaacaattttatacaatatatttgttcgaataaccctatcttttgggtatcattcgaaagcacaaagtctaaagcagctaagctatataaaatctcagcgtttaggcaattgccaaaatattataattaagtaattgttggaaattttcgtttgtaactttctttaagtgttagcattttctcgttttctcaaattattaatttgtactttgtgtttcgaaaaataccaaaaaatagggtttattcgaacatgaagaaatgttgcgtaaaaaaaccatgaattgttaattgagtggactcataaagaagtgcattagaaccattcctagaataggaacgataccaagaatgttagattgggtttttaagaatgtttaggattttttaaaattttatttccctttgccggatttaggaaaagttgcggaattgaagaaacgaccaagcacaacttatccatttttaagaggaatggaacgccaaatttcatcgaattctcgggcgttttcttttaaaattttaagcattttttgtgtcgatattttcgcttttacactgtcaaacaattaggtaattcactctgtgctttacggtaattaccgtcgctcggtatcgtatcttttcgcctccgttttgctggtgttcctcaaaagtagtaccgtttgaatttgggcagttgttgttgctggaagaagctgtcatggggttgttttgtttgtgctgaaattcagcaaacctttcaaaaatggcatcaaaattaaacaaaatattctccggttctttcttggcgaaacagaacgccaaaaacgggagcataaaaaggccaacaaaaaaagggaaacacatttattttattactgtcgtagaataaaaaggaaaagattattactaattacacctaaaaaacagtgaaaagtaattatggcatttttttcaacagtttaattttaatgagaaatgaacgaaagacaacatttttagccggaaatagattgttttgacgtttttaacgttaatatccataaattaaaaatatttttttaatttcataaataaaatatttacgaatatgtttttttaactttttcattattttgagaatatttcggcaattttaacaaaaatacaataaaaacataaatttaacgaaaactatttcccaaatcgcacccaattgtccccttttacaaatatggcctttggggttttttcgtaaatatttatttaaatgtttcggaatttttcataaatatttataaatctcagcttcagtgataagcaaataaaaattgccgaataaattaatttaagaataattacaactgaataattcatttttatttttgcgaaaaataatattcattttaatatgccataaaatcaatttttatattgattgcttttttatattatataaaaaaagttatctacgagaatgaagcgtgcaaaccaattacatattcgctgaaaaataaggctaatatataaggattcctttttatgtaagaaaaaaagcaaatatgtaaataaaaaatgtaaaaactatgtatgaattatgtacaaaaacccaggaatatgtacgaaacaaaatttttaaaatggttattttttggaaaaaattattcata

SEQ ID NO: 27579 - DNA, 1858 bp, Heterodera glycines
  unsure (1)..(1858): unsure at all n locations
atactantcggcattaatgtttattttaaaaaatgggcccctcctttatgcgaaatcatcagaaagtcacgctattataaccctttgtgaccaaaaaagccaattgcaccaatgtgatcaatcagatcactcctacaaggcaatctgaattttgagtttaaattctgaaacaaagcataccgtatttccttaagtacaccccccccccattttttgacgggctgaaaaatacggtacacatatgataaaaaaaaacatcaaaaaatgtgctaatgacgaaaaaaaagcaaattccgtttttttgccaaaatcaacaaattaaaaacaaagacccatgaactctattttaggaaatacgaaaaaacaacaaaatttgtgctaaaacccaaaaaaggccaaaatatatcctaaaaatcaaaagtttcggggtttttccccaaaaacaacaaattttcatattttgtacaattttctaaattaaattccataaactgttaatgtgctaatccttcccaaaaaagctttgctaaaaaaataagattttttaaaaacaggtgtacatccatccgttctacaacggcaacgggaggactgctcggctgctgatgaacttcgttctgatgcgccgcggcttccaaccgatcatcctgcccgaggagaagcgcgatgagtactacgagtgcctggtggcggcatcgtcggaggcgaagaacataacaccgttcatcaacttcgtcagcttccatcagcagtgtgctcaagaccgtgcgcccgcccccatctcttcccttccatcctcctcctaattattttgtatgtaaatattttgtatatgttatgtaactaaattgtccacctatgtaaccattttatgtaattcaccattgtatgtaaactgtatcaattgtatgtatatgtaatttctgtgtatgtaaatattttgtttcaataaaatgtgttaaagcgaatatttctgttgtgtattttgctttccaaagtttatttagctgattgaccgggccccgggcggagacaaagggctaaaagttcatggcaatttgaatgaattaaacaaagcaaatgttatattattcatatgcaatttatgtcataacattaataaaagatgagattaatagttcagatggtatgactctttttttgaatgtcgaacaaaagtcaaaaattcattttgccaaaaattccaaaaaaatcaataatgcgtcttattgtacgttcgctttaatttttaacagtagtttggcaaaaaaaaactgaaatatacggtatataattcattttggcgccatctttttggcgatcgcaaaaatgtgttttctaatttttggctgcatgcgaattccgttaaaacccataggaacaagtttacaaaaagaagtcgtaccatctgaactattagcaaaattaaatggaccggtctgctgaaccgccgccgtctccccaacagggcgatcggtaaaccaaatcatcttcaatatcagcttttcattggtccaattcgttcaccaatccaaatggcacaattgcggggcacatcaactgacggtcggattggaacggattcaacgtttgagtgcccttgcccaaatgcatcagtctgggtgatccggagcagcatcatcgtgttctgtgtgttggatgtgcatttgtgcaaaataatgttttttttaaaaaacaagagaaattcaggggaaaattaattgctgacacttttatgatgtagagtattgtcgatttactattgccaattttcggctttttttgttccggtgccaaaagtgatcagaaaaaatcgaacaaagttgctaggtggaatgatacttagaagaaaatcaaa

SEQ ID NO: 27580 - DNA, 1756 bp, Heterodera glycines
ttttttgataaattttatacacatacaaatgctctcgagcatgatagggagggcggtgcgcgatagaccttttatttttgagggaatttttaaatttatactctatcccagaaaaatggctatctctttttttgataaattttatacacatacaaatgctctcgagcatgatagggagggcggtgcgcaatagaccttttatttttgagggaatttttaaatttatactctatcccagaaaaatggctatctctttttttgagaaattttatacctcacaaaagcgcttgcgtatgagacggagggctgtgcacaatcgccattttatttcacagaggatttttatatttagaggttatcccagaaaaatggctatctctttttttgagaaattttatacctcacaaaagcgcttgcgtatgagacggagggctgtgcacaatcgccattttatttcacagaggatttttatatttagaggttatcccagaaaaatggctatctctttttttgataaatttcatacacatgcaaatgctggggtgagaagctagggatgggccgtaggtttcgcttttcgcatttcgctttttatttttcaatttggcccatccctggtgagaagtgtgtgtttccgccagtgttctgttttccccttttcgctttccacgtttccctttaagccctccccatttgaaatggctcccggataatccttcaaatgccaattctaacaaataagtgatgagttttttaaaataattactttaatttataaattgaaacttttttggacgatcactgtataaataataattttactaaaggattcctcaaacccttttggaaacgtttcaaatcttcaattatccactaacaaataaatcaaaaagtgaaattattcgttttttacatttattattatttatcataaaatcatttatcgaataaaatttgcttttatttgattagagggaaataattttcgttaaaaaacagagaaaggtacaactataagcaaaatttttatgaacggggaaatgattttgtcctcataaacgtacaattaacacataaaaaatctttcaaaatgccattaaaatttaatgagggagtaagttcgacaaatggtaaaaaaagagaatagacacaatacttatggcagaactatgcaatttatttgagaagggcgcttccgttgaaaaaataaatgccattcccatcccatcgtggataataaagtattatgtctgatgactgctggcattagggaatgccggaaatgactcaaaaataagtaattaagagggaaccattggtttcattgatgaaactacccttggggacgcttttcactcttttcacacacaaatacaacgtgaccacacgggaaggggaaggactttgcaaaaggatagtgttacaaaggagaaaaaagataaggagacggacattcacccggggggggggggaggaaaacatttatcttctaaattgcaaaaaggaggtgggtggaaacgaaagaaagaaagtaggcgccgttcagcagagaaacccaaaaatcacccccccccctctctctctctctctctctctctctgctgctccaactttaaaatccggatcacacagcctgtcattggattgaatattttggatacaactggtaatcatgtggtctgtcttctgtcaaaagtcatattattcccatcatttaaatgcagccagcagaacacagacaaaaggtagggctgct

SEQ ID NO: 27581 - DNA, 906 bp, Heterodera glycines
ctttaactttcaattaaaactagattttctaatagaatctccttataaaaaatttaaaaaattcttgaattttttttttctttagagaaaagaaattcattaaaatttttaagaaaacattctgcttttaattggaattttgaaaatgtacatgacgcttggaagaagacgacgactgctgctgaccctcctcctccgccgtcttctttggagaacttttgacagagctggctgcagatgttggtgatgcgtaaccagtataatccacgaactgacgttgtccaaattcaaaattctggttgtggccctcggtttgctgccgcttaaacgacgaattaattgcctttgtacgacgcgagttgtcattgaaccaaaaatgcaccacccaccgttgaatctgaatgttcgccaatatcatcatcctccactgctgctggcactgatgacgacaacgatccttcttcatccttttccttcagtccatttatttgggcttccattccatcaattcgagtcaaaagtttagcgaattggccaatacaaactgaaaaataaatgcgtttatttttataaattaatttgtattatcagcttttcaaagctcatcccatttagttttttgttactaaatccagcggtaaggtggattatgggactcgctcggtgcaaaatttcgaaagattctgttaagtttgaacaaagttatggcataaaatgttcgaacaaccagtttttgaattcttctggccataattttttaaccttaacgaaattttcgaaaatttttaggctaatagagcatttgaagggctctcgaatgataccaagattgttggatttagttgcaaagaaaaaagttatagtccaaaaacatgctggggcccaaccgtgccggggcacaactga

SEQ ID NO: 27582 - DNA, 1406 bp, Heterodera glycines
  unsure (1)..(1406): unsure at all n locations
gcaattttttcgcactcattttcggatttgttcttttaatttgataataattattatcaatcactttttttcttcatttgaatagcgatttccatctaaaataacaacatttaacaattttatccaattaattttactnttgccaatttcaatgccaaattcctttttccaattatagtgtcactccgccaatgcccaactctatcgtaaattgcttcttttttccttttttggacattcttttatctcatcaattctttctaaaatttttttcttttcataataattcttttgatttatttttatttttcggcttaatccaaatttatttttccattcgtaaatttttgttcggccaattcccaatttttttgcaatttttctttcaattttaatccaaatttttggctaatgttttccctttttcttaattccttcctttattgcatgaaatttatgaacaatttcgcgtttgtgctgattaaaaataatttggaaaaattctgagttaaattttgcaaagatgtacggacgtttaagccaaaatcggacgtttcgccaactcgcctaaaatttgacatttcgccgactgaacatttcgcctaaattcgcatgtttggcctaatgtccaaaagcgaaattataacaacgaatttacacctaatatgtattctaaaatttctctgtgctttattgataatgattgctgaagtgcgccgaacataaactggcggaatgaatgccaaagaaagaaggatctaatttagaattgcaatcttttcggtttttgataaatcggaagccttaaaaataaattatttatattttttattttcttgctatcagtcgatagccctaagtgttttctactagcctgcaaaatttcagaaaatttcattaagtttcaaaaaagtcatggccaaaaatcttagggaacctggttgcttgtgtacttttggccataactttgttcaaaattgacgaaattttttgaaataataataataatatgacagaggaaaaaatattgaatactttcttaatatttaaagatggaaaaggacaaaagaagaagaagaagcattcagcagagttttctaattttcaaacgaatttggaaaatatatatatttttcaaaaatttatgaatctttatttgggcacttacactcaaaaaatccgtacactcggatgtccacaatcaatgatcgagtctaaaaattttatatacatgccaataaatttagtgaaaaattaaattgttcatgctatttttttctcataagtagtataggggtaaaaatcttgtccccccccccagggcagagagatgcgcattcaccatatgagagaagagagaattagagaaaaagagtaaaaaaatatgcgcgagaaaaaaaggaaaa

SEQ ID NO: 27583 - DNA, 1440 bp, Heterodera glycines
  unsure (1)..(1440): unsure at all n locations
attaaattagtgacacaggcagccanttcgaaaaaccaatttgtaagtgatggacattttcgtttactttgttttcagcaagaaatgggcacgccgtcactaatctacttttctgtccatttctaatcttttacatcgacgattcagaccatttttaagcaattttgaattggtgactatgtcatttaccaagcttttttccaagtaattgatacaattgtttttctgcggaatccaatgaggtgaatgaaataaaaaagaaatcatcgaatggcatcatcaaaagtcctcttcctcgctggacgaactgctgcttatcatgaacagttggtgttccgtctcctcctcctcctcaacatgttcttcttctgctgcttctgttccgtgcccaacttccttctgctgattttccgttgccgcttcgtccgataacgaggcggaggagggacaaaagccgtgccgaagccgccgcctttgcttctctttcgttatcggccgtcttcggccgctgttgaggtcaatgaacatgccttggatagccaaaaatgccatgtacaacacctggaaaaatttattatccaaaaacgagtgatatatgaatggaaaatgtaaaaaataaaaaagaatttgaaaataatcaccatcgacacccaaagtcatgaaaaatcaaaaaccctctttttgtgcctttcgaaattaaaattttctattttttaaaaattttggtcggaggaaaaatgcgaaagatgctcggttaatcccttcctcaacacacctcttcccattcggacacgcacagagccaaatgccgaagcagcaggcggaacggagttggcattgtgtactcagaagcggcaaagattgcctgaaggagagaaaggcagcaattaatttaaatgaggggtaattagaattcaatttaattagaataattgattccgttgtgcaaaacatggcacacccacccgaagccatttcatacggcgcaatggttgggccacaattgcggacatccgcgggggatgaattttgggatgcggaaaacgctaaaccgagaaaaacacggggaatgaaaaattgtgagattttccgaaacttagtgaatatttgtcggagcgagggaacagtttttgcagagggctaatcggctgtaaaagagaataaaatgactgcttaattttgaaagtattacaaaatgatggaacacccgtaggaaaaggaagcacatatttccaccgactactctcaatcccgacaattttttgggagcagctagtttcccccccccccgtatcagttccccaacgcatcgtttccgaccgagaaaatttaaaaaattatttactaactcacaaggggacattccgagctgtaactcggaaaatgcatatgtattatataccattcgatagagccgggtcgacttccattgagaatttt

SEQ ID NO: 27584 - DNA, 932 bp, Heterodera glycines
atattttcaaaatctcaaaaaaaaatgtttccgatcactctgatcagtgaggatgtagtgggtcatttgttctcttcaaaaaatgaccactttaacgtcgtaagagaagtgatcgattttggacaaaagtttggggtgggggcggtgcgccgaaaaggtgaacaaaagtgcaacgggaaggaaactcgagactttaaatgctcgagattcaacacaaagatgaactttgttttggcaaactttgtaatagagtgagagagtgggaaatttcggaggtgggatagagagaaagagataaagtgagtgtgattttaaagtggcacaaagtggagggtaaagagagagagagagaaagacccatccaatccttgggtttgaagatgaccagagggcattggcaataagtcctctattcgaagatgatagtgtccgaaaatttttttgcctctccatcccttcggcccatttctgatcactccgaccagagcagagcagtcaaaaaatgatcttttctgctccttggatcacaccgattagagcagcgcagatcaacaaagtccccaacaagaattgttggatcatttgtccacttcaaaaaatgaccctctgatcctagagcagagcagatcaaccataagccccaacaagaaattgtcggatcacttatccgcttcaaaaaaaatgaccgttttgaaacgcggcgcgaaaatcactgtgtggttggcgttttgtggtgatcgatttcggaggacggggggggggggggggggttattgggcttgggctcgggtggtgatggttctgctggtgttggagggattggttggttggtctgcggagatgtgaggtttttgtgggctcccccctatcgtccgtccgtccgtccgtccgcctcgtcgtttttcgtcgtcgtcgccgtcgtttgtgtcaat

SEQ ID NO: 27585 - DNA, 1174 bp, Heterodera glycines
  unsure (1)..(1174): unsure at all n locations
ttccattttccgttccataagtcccaactatttaatggggagcattctttggataaggagtcagttgggggggccagttattggcgagggggaacgagaacaaagcgcgggcggaattatattttaggggatggcccaatattattattatttatactccttctcgcccatccccgcacgcgtattcgatcagtgcgcacccaagggattaccaatttggggaggtcatttatccagggcccggattttggcttattcctttttccccccaaatccaatcctcgttctcactcgttcccttcctcatattctgggctggacatcagcaccttcactggtagcaccggatggttgctggcacgccgccggcaatccatccccaggaggacgagtgggatttgcgcgtgttggggaacgagaatggaatgaggtgcaccgctccttcgggagatcagtcatgttcggatcaaaaaaattaaatggccaatttcgaaccaatttgaaaatattttaaaatttttgccccaaaaatgggaagtctattattgttgccccagaatgggaagacttatattttttggatattttttgccccaaaaatgggaagtcgatttttaattacaaaaaaaaaacaattttatttttgcgccagaactaattgcgccagaaaggcaagtcaagcgccgcgccaaaacgacaattctattattttgccccaaaatgggaagatcatcacattcttattgctcccaaaatgggaagactgaattttattaaaaaaattgtcaaattcattttgcgctaaaaataataggccaatttacatattttgcgccaaacggcaagtctaatgttgcgcccaaaagcaggagtcttttttattgcgccaaaattcgtttctatttgctctgccccattcgccgtgaccattttataagaaatttatttattctgctcgctctcttcgaatatttgctaagaaataagaattttctgtattcctttttttgtcagcaaaaaaaaagtttaatatttattgaactccnttgggagtaccgtcaagtaagaggccaaaatanaatttgtaaatcatccatgantatccgtcagatcaaataaaaatctcgatatgcttttattttactaatgctgagtatcatttttgtgattttta

SEQ ID NO: 27586 - DNA, 1034 bp, Heterodera glycines
ctatatcaaccaacaccttttatggggtctaatgagcggtcactttggcaccttaactccacgtttggttcatcccacatcgccagttctgcttaccaaaaatggcccacttggagctcaaacattcaacgcctgggttcagagtcaagcaaccctggcttcatacccatttagagtttgagaataggttaaggacatttcgtccccaagtcctctaatcattcgctttaccgagtataactgcttaacgagctccagctatcctgggggaaacttcggagggaaccagctactagatggttcgattagtctttcgcccctatacccaagtcagacgatcgatttgcacgtcagaatcgcttcggacttccaccagagtttcctctggcttcatcctgctcaggaatagttcaccatctttcgggtctcagcgcatacgctctgtctccgccccatcgcatgcgatcgagacgggactatgttgcgccccaacaccgcagtgccagggatcacacatcagctccgtaagaagccttcactttcattgcgcctttgggttttgaacacccaatgacttgcgcatacgctaaactccttggtccgtgtttcaagacgggtcgaacagatgaccggcttttacaccgagaacgcacaactgagagcccgagctggaccgaactggttgctggtacgtgtcgcacgcgaccgccaccgacccccagctcgagtcaacacggacccgaaaccattgcacaattcacccagagtaaacagcactcccccgatccgggtaccagaccccgaaaggctggcctcaagaccgagctcacgcagctactccgagcatctcagcgcactccgcctgcaaatgccccattcgccactgaacagaaggacagcaaaccccagtctggaggctagcaggccaacgtacagcaacaaacgggtgaatgcagaccagatacgccagctctgtccgtttcacctcatcggtttcacgtcctctttaactctctctttcaagtgctttgcaa

SEQ ID NO: 27587 - DNA, 1739 bp, Heterodera glycines
tccacggtcaagaccggcataatcaaaaatgtccacggtctgggaccggcataatcaaaaatgtccacggtcaagaccggcataatcaaaaatgtccacggtcagggaccggcataatcaaaaatgtccacggtcaagaccggcataatcaaaaatgtccacggtcaagaccggcataatcaaaaatgtccacggtcagggaccggcataatcaaaaatgtccacggtcagggaccggcataatcaaaaatgtccacggtcaagaccggcataatcaaaaatgtccacggtcagggaccggcataatcaaaaatgtccacggtcagggaccggcataatcaaaaatgtccacggtcagggaccggcataatcaaaaatgtccacggtcagggaccggcataatcaaaaatgtccacggtcaagaccggcataatcaaaaatgtccacggtcagggaccggcataatcaaaaatgtccacggtcaagaccggcataatcaaaaatgtccacggtcaagaccggcataatcaaaaatgtccacggtcaagaccggcataatcaaaaatgtccacggtcaagaccggcataatcaaaaatgtccacggtcaagaccggcataatcaaaaatgtccacggtcagggaccggcataatcaaaaatgtccacggtcagggaccggcataatcaaaaatgtccacggtcagggaccggcataatcaaaaatgtccacggtcagggaccggcataatcaaaaatgtccacggtcaagaccggcataatcaaaaatgtccacggtcaagaccggcataatcaaaaatgtccacggtcaagaccacataagcagaaaatgccatgccacgacgatgactcgcagcgttatggatgagttgggtatggatgagtcttttttaaataattttttgtttttttaatgttgtagcctagtaactcctcccctaaaatgcatgttgtatttgagaaaatcaatcgaataattttccaaattattattttaatttaaaataaatatacaaattcattcatttccttaatataaacgctaaaataatttctttttatcattttatgaaaataaataaaatgttttgccatgtttttgctatttcttttggcattatttgcctccttttcttgttttcattttccaatgcaaacacatcggtgagtttcactttaattgtttattttaatcccattttaattagtttaatgatgataaaatgcttattggttttatgaaaggccacaaaaatattcgaaccaatcaaatcagaacgctaaaatttgaggcataccttggcattgtgtattttttgaaaaagaattggcaatgtgacaaaataaagaaaaaagttgaagaatgccaaaaatattgcaattatttggacattttgtacgaatatttgttcagagaattcgtcggacttcccgttgttaagccaaaatttgtgcataaaaaacgccaaaaggaaatgaatgggtcaataattaatgtggtgaattatttggccaaaatttcatgtttttgttttgattcaaatttgaagaaaaataatttgattatttcaaaagcaaaccctaaattattgaataagaaaagattgaattatgaagcacagaaaattgaacaattagtgccaattaatgaattggttttacaattggcaattgatgcggccaatgaatggccaccaaatcaaagtgtggacagatttatg

SEQ ID NO: 27588 - DNA, 833 bp, Heterodera glycines
  unsure (1)..(833): unsure at all n locations
aaaataaccaaccaaccaaccaacgcgttgaacaatcatccgctcgccccgttcgaccccccccccncccctcacacgcctcccctcccccgtcctccaccacgcatcccatcccagcatcatccaacgatataaggaaggaggagggaagaggggaggtgaggttgggacccccgacgggacgaagggacccaatctcgtacaaaagtgaaagggcggaggggaaaataatgggggggggtggacaaaaagaaagaaaaaggaaggaaggaaaagaaaggcggattaaggaggaacaaaaggaacagataaagagaaaagaagcatcattggaagagaaaatacgaaatggagaggagcagagaaaaggaggagagacgaagaagaagaagacggggagggaggaagaggaagagaaaagggaggaaagggaaaaggcgaggcagatgaagtggaggaggaagacgagtagagaagggaaaagcaatgttggaagagcatggagagaaaaagatagaggaggaggaggaggacatgacgagaatagcgcccccctttccttttaccctctcgtgggttatgagcaggaggacactccgcccaaaagcaacccctacaggagcagcagactgaagaagaacatcacatcatcatcatcagcatcgtcctccattctcgacggtcgtcgcatgggagagccgaccgaccgacggacgaccgggcccattcggttgctgccagcacggttgccccaaatcactttcacttttccctttcacgcgacgacgacagccaatggtcctcactttgtgggacactatcggagagggaaa

SEQ ID NO: 27589 - DNA, 1384 bp, Heterodera glycines
accccgcggcacccggcacggtcccccgaaggaatggatttaattaattctctccttcggggattttttccattaggtcgtccgttagcgttcgattgctctagtcaatttttcaaaatttttgttgaaatatttgtcgtgctctgaagggcgtgggaggggggggggcgaaggcccaccacgaggccgcgaagaggccgagtgagtaccttcggtgcaggaaaattattaaattttaaaaattttttaattgctttttaaatatgccaaaaaatgtaggcttaacttttttagtgaaaattcgatcactcatattttttgctaattgagcagaagcgtaccaactttgcaggggatactccccggtaaaaggactaacttacactgaaatgagcgccgagctagctggctcaaaaaaaattttcgaaaatctgagtctttcgtttttatttattttttgcaaaattaattcttaaatattttttcagaaagggttctgaaacgcaccaaattttatttacatgttagtttaggcactctgatgctttttctatcaaaaagggagatgaataaaatttttaaaaatttttaattcctttttaaacaggccaaaaagtttaggcttaacttttttttcagaaactgatcagaagcgcaccaaactttgcagggatactgaaaggaagagaaataacctattttaaatattatctagtcagttcatttaaataatttttatccaaaaaatttttttttgggttttcggggcagtccccctgaaccgatgcgcccagatttatggggagaccgaatccttcgggaatagcttccctatagtctgtactttaattctgcgttggagttttgctccccataaatgtttgagtaccccaaacggacacttgaaaaaatcgatttttttgggttttcggggcagtccccctgaaccgatgcgcccagatttataaggagtccgaatccttcgggaatagcttcgatatacctctactttatttttaccttggatttttgctccccataattgtttgagtaccccaaacggacacttgaaaaaatcgatttatttttgttttcggggcagtccccccgaaccgatgcgcccagatttatggggagaccgaatccttcgggaatagcttccctatagcctgtactttaattctgcgttggatttttgctccccattcggtgcaggaaaattattaaattttaaaaattttttaattgctttttaaatatgccaaaaaatgtaggcttaacttttttagtgtaaattcgatcactcatattttttgctaattgagcagaagcgtaccaaactttgcagggatactccccggtaaaggactaacttacactgaaa

SEQ ID NO: 27590 - DNA, 1182 bp, Heterodera glycines
  unsure (1)..(1182): unsure at all n locations
tcatttaaccataaccacgttcttattctacgggcccggtgcttttcggaaaattggcgtttggttactctcgagagcaaatttaattggcactttccttcacttattcgttatagaaaatgccaatgatttctcattaatctctcaaccctttcactctattgccacttttacttttctctctcatacatacactctctcctctctcccattcctctaatattctcaccgtctgatttattctttcaaatttatgctctctctctccctctgtctctctcaatctcccccccccctatctctctttttctcccccactcctccaacgttctcaccatttaatttttctctctctctctctccatctttctctctctctctaatgtgccatttctgaccaatacgaaaattatttacttaaaagatgaagccccggaggcggctttgcggtgtggtgtaggattttttttgattctgctaacagctaatatgtacatatatgtgctgctcttaggaatggtgatggcggtgcacattcatttgcatcggcggatgcgacgcggcggcggcaaaagattaaagagagtgcgttccgtcgtcgtcgccgccgttttcccccggacgccccgccggcgtttgtgtttttcttaaccccctttggtccctctgtctgtcccctctcaatctctgccacactcctcccattatatcatccctcgtttgctgctgatgctggggtccctgccctcctccctttttttggttttggcggtgatgtaattgagtagaggggggggggggggggggggggtgacggcgagaccggcggcggcacggtgcagcaacaaagaaaaatgaatgggatgatgttggggcaattaattaaatggaaaacccgagagtgatgggaggggggggggagggagagaaagagatttggcgcggatggatatgtgacagactgcggtagaagcggcatagccagcagcagaggcattggcacactgtccggccggcgtcgggccaaccacaacggcattttttttggcaaggcacacagcgcacagagtaagtgctgtgagtttagtgcggttgcggtgggcgaccgctaaattaagacgtggacgacggagcggcgggaagagttagaatggattttggattgtcgtcgaantgggggga

SEQ ID NO: 27591 - DNA, 1330 bp, Heterodera glycines
cctctgagattttgtagatgaaatcgcaaagagtgcgccttacgatttgtttcgtttggacaccatttgtaggttagcaaaatatcgaaaaaattaagaaaaatacgcggaaaagaacggagaaaggcaaaacaatgaaaactaaatgaaaatatagcgaaaattaatggtgaattaaaaatataaaatgaaggaaataattgaaaacgaaagaaaaatgcttaatgaatagattacaggaaaaaaatacagtaattgattcatcggtgttaggttgagacgaaaaaagtatcattgaaagtaatatttaaaattaattgtttaaaaatcttattttcagaataataaacttaaataatattcctttttgaaatgtaattgaatgccaaagaaatcttagggtttccaaatgatgtcaagggtggtatcatttgggcttaattgaacattgaacattttcatacattaaaacccttacattttatgaccataaaatatgacacatttattgcttaacaactttttcagaagcaatcttttttaaagtttcttaactcaatgttcagcagtccaaagatttctgtaattttcagttacaaatcatcgagtctaaatttttcgttcgctcaataccaaaattgattagtttgatcaagtttaagctaatttgtaagccaaattatgatttattaattattcttaaaaatgaaatgcaatagaaactgagtttttgaaaggcataaataataatgagagggaataattagcaaatggagagggggaggagggagggaatgagtaatgtaaagattaatagctattagacaagtgagtgccggaaatgccggatgcaaaatgagtgatttgaatggatacatataaatgccgggtcggagcccaggcacaatttgtcggttggatggcatcattttgatggatgggtgagaggggtgtcaccgttttacgtttatggtgtggttgtcctttcgctcccccccccccttttgcccacccttttctaccgcaattaacgtcggcaattacataatatacgctaatcactgatcactgacccttcctccttgactgaagcgaaaatgccactataattaggaacaaattcgcctcattaaccaacgcgtcacttaaaagcgcgtcaaatttgaattggggacaaggaattgcacacaatggacgaatgaataaatgaatatgcatgaaggagttcattggctccctgaaaatgcgacacccgtaaatacgacattggaaaatgcgacaccgagataaagtttttaatttcaagaaaatgcgacactaataaaatacg

SEQ ID NO: 27592 - DNA, 894 bp, Heterodera glycines
aaatgcgccgattgcggtgcacatctcttctcacatgaagacagtaacatttgctgccggaagggaagagttgtgctgccaatgcttaacccgcatcctgacgagctcaaagagctgattgtggggaataagcaatcccgtgaagggaaagaatttgtgcgacacatgtcgcgttataacaacctgttccaatttgcgagcgtttccgctggcaacaaaccaagccctgctggcggtccgatggccgttattcttaacggagaattccatcgccgcataagcagcatgcaggctggtacaactcagattcctggctttggccagttgtacattctggacccagtcgaggctatggaacagcgtcgaaacaaccccaggtttactggggagaaaatcacaaacgaagatgagtttgtgcagggtcaccagctaggcgggcgcttcgcgaccgttttttaaatttgtttgggccagacgggcgcttcgcgcccgtttttaaaatttgtttgggccagacgggcgcttcggtaattgtgcgtatttttttacgtgataacttgttttacaaccaacacgccaatttatcactttgccccgcggaaccgcccggccccccggacattccgggagcgtatggcagagcctgagagagcgggcgaagcaggcaccgtcggactgcccggaccattaccgctaattcaaaaaactgttgacgcggagtcttgccgagagtgcccgtcagggcctcccgggcagcctggatatacaggaccacctgggtcaccgggagcagatgtaaggacaaatctatgattggttattgaaaaaattatctttttagggtccatctggatagaggtgcgttttcggaatgacacgaaatcccggaaccat

SEQ ID NO: 27593 - DNA, 1388 bp, Heterodera glycines
  unsure (1)..(1388): unsure at all n locations
ttaaaaatttttaaaaattttattcatctccctttttgctattaaaagcatcagagtgcctaaactaacatgtaaataaactctggtgcgtttcagaaccctttctgaaaaaatatttaagaattaattttgcaaaaaataaataaaaacgaaagactcagattttcgaaaatttttttgagccagctagctcggcgctcatttcagtgtaagttagtcctttaccggggagtatccctgcaaagtttggtacgcttctgctcaattagcaaaaaatatgagtgatcgaattttcactaaaaaagttaagcctacattttttggcatatttaaaaagcaattaaaaaatttttaaaatttaataattttcctgcaccgaaggtactcactcggcctcttcgcggcctcgtggtgggccttcgccccagatgggcgcttatcttgtcaaattacgaatttgacattcgctacatcaataccactgcgtttggtcaagtcgacatgctttcacgacttatcgcgaattatccgcgacctgaagaagatattttgatagcgaaaatttgcaccgaaacagaatgtttcatcggcacaattttgcaggcacgaattaatcatcttcccgtcactgccaccgaaatagcagaaatgacggaaaaagatgaaattctccaaaaagtggccaaattctccaaggaaggatggtcacaaaagtgtaatgaccccgacctcgcaccgttctttccaaaacggaacgaaattttgcaaattgagaattgcctgctttatcaaaaccgggtgatcattccaacaattttgcgagatagaacgttgaaagcacttcacatggcacacccaggaattgtgcgcatgaaggctctcgctcgccaacacgtttactggcccggaatggactcagccattgagaaattggtaaaaagctgcgaagaatgccaaatcgcccaaaaagctgctccaaaagcaccactttctccttggaatgccaccaaacggccattcgaacgtgtgcatattgattttgccggcccatgccaagacggtcatgtttatctacttttagtggattctttttcaaaatggcccgaagtttatcagatgaatacaatgacatcaaaagcaacgatcagtgttctccgattaatcatccatcgacttggcatcccagaagaaattgtctcggacaatggacgacaatttcgttcgtcagagttttccgaattttgtaaagaatttgggattcgacatatgttcacgccgccatttcatccacagtcnaatggncaagtcgaacgctttgtcgacacttttaaaagggcaatgcagaaagtgtcgaaaaggacaaaaatgggctgagaaatgctcctgtc

SEQ ID NO: 27594 - DNA, 1554 bp, Heterodera glycines
ttatatcgttttccattattaattattctttttctttttctatcggtgaatccccctttttttgtgcctttcccaccgcttttcctccgccacttccaattcgttgtgcattttcagtgacacttccttggccactcgcaattcctgctccaattcgctcacttttcgccccatttgttcttccatgtcgctttctccgctcatttcctcaatttgttcagctccttctccaatccctcgttgaatttcttgcacttttcgtgccaacaaattcttttcagtcttaaaaagaaaaataaaatgttgtatcagttccaattgggatgatatgggcggatcagaagtgttagtttaattggagtgttgctgatcaaccaaggcactttctcatggactgaccaatgatcatttgtttcgatacaacgaatactgatccggcttaccttgagctgatcaactattgtctttccttttgatcagtttttctcatgtctgatcagcctttgagcctcattcccccacccctccgttttgtccacctgcaattggtccctttgccgctccgccttgcgcagtttgaactgcagaatgcgcccgttcttcgcgctttgctccaactcgcgctgcaactcgcggaactcctcgatctcttccactcggtattggtcctgcatctcttcaatttcgcgctccaactccttccgctctcgtcgtaactgctcgcacatggactcgctcatctgcagacgctcttccaataccgcgggagctgaacacacgccgttgctgatcactgtactggcagaggcgctcatcatgtcacggctatgcaaaaactgtaacggtgcaatccttcaattatcgtaccttcggccatctttccctgtgccatcccattaccgtaccccttcccgtcgttccaccaattgtcctttgagtgcgctgttttcctccctgtactcgttgagcatcgtctccatttcgctcaatgcttcttccatcatgcgttgcccgtccaacgttactgtagtcgttgtctgctgctctctcttgtctccgttttctctctctttccaattaccgtacttcttccttagccattctgtccaccgtttccgttcgtgccgaaagcgacggcattgctcctgcaaacgtcgattttctccacgaatatggaaaaattcttgttgattctgtgagaaaaaaaagctatgcatttaaatgtcgttgtttcttttcttaaatcccgttacaaattccatcgccgtcggtgtcatcgcccgttcaaattcgtcatcgtccgacccgaagaagtgctgcgcctccgacgtgcttttcggcgtcatgaacgggtcttccattgggtcgtcaaagggcggactctttcccgttttgaacgactcggcacaagacaaactgttcaaactctccactgatcgggcactgaacatctcgtcaaccgtggtggtcgtgaaggtctgatggacggatcgatccaaaagcgaatgccacgatgggaggaggacagcgacaacagttcttcctcttcatgct

SEQ ID NO: 27595 - DNA, 1326 bp, Heterodera glycines
  unsure (1)..(1326): unsure at all n locations
agcaatctgtatttatagactctggtcgcaattgtaccaaaaacgagtttagaccgcagtacctcggcttagagagaagattaagggacgcaaaagagtcgatataaaaacgattttacaattatatctaatgatataataacaatgcagttaccccccccccccccccgccgcttcccacagggccgtccgatgatggcaaatgccatcacttcgcactttgttgcttgagaaataaagaagatgaatgtgcgacagaagacaatacaatctgctctttagagacagcagatgtgaggcgttaaaaaggagaacaattggaagagaaaaatgacattttgacacttcggtcaattggggggggggggggaggggtccttttgtgtgagagggattaaacggtcatcctgcaaaagtggcacatcggagagagtgctggacagaaaagcagtgaccgttcagtgaaaagaaagcaaaaggacacgcaattggtggacaaggaaagacaaatagcaaaataaataattaaattagcgaaagagtaaaaaaaaacattgcttcccacaactttctcacgaaaaaaaaagaaaatgcgatgaaacagagcaaataaagcaaaaaacagcgcatcggtggtcatttttacaaatattcttcattgaaaatcaaaaataaaacttattgaaaaaagaatgggaagaaaaggcaaaaccaaaaacaacgaggtgaaagtgcggcattgaaaaaaaaatggaagaaaagagtttaagaaaaaagtttatggggaaaaagatatttattttttaaaagtttgaaaccacacccccaatttgcaattgtaccccaaaataccatatctacctgggactgaaaaccccaaaaaatcccggactgtaaatgtcggaacacggtattcccctccgctaaaaattgaaccgactttggccgtctccgtcgttgaagcgcttttctttttgtagtcgggattcagcttcgctgggagcggaagaccgcgctgaaaaacgcgagtgcgcttttgcagctccaattcttttttctttgccaaaagtgctgcgcgacgttcgtccaactcagccgcgtcttcaatccactgaaaaaaataacgaaatcagtgcatcaaacttattattagcaggaaatgattaaaacccattttaactgcttaaaatgaccaatttttgttttttgaaccttaagaaaatgaaaggaattttannngtgtaacagaacaaaaaacgcagtcgaagttttaattnnttcaacagattttttcagaaaaaatctttttttttctcgaattctcta

SEQ ID NO: 27596 - DNA, 1097 bp, Heterodera glycines
  unsure (1)..(1097): unsure at all n locations
aatatttttcaaaaaatcgcccttataaattgcatgggatatttcaaagacaatttagtcctgtactggggagtatcctgcaaaaaatggtggggttctgatcgcttttcaaaaattacttggaattaaatttttactaaaattataagcctaaaaaataaggttaattattttgaatattttttcaataaatcgcccatttccggcactatgccaagtttgggcgggacagacctaacggggagatataaagtatagggaatatcaaatctattcccgaaggattcatcctcccgaaactgtctgactgttcgaaaaaatttttaaaattaagcctaaaaaatttgtctaattattttaaatattttttcaaaaaatcgcccttataaattgcattggatattttcaagacaatttagtcctgtactggggagtatccctgcaaaaattggtggggttctgatcgcttttccaaaaattacttggaattaaatttttactaaaattataagcctaaaaaataaggttaattattttaaatattttttcaaaaaatcgcccatttccggcactatgccaagtttgggcgggacagacctaacggggagatataaagtatagggaatatcaaatctattcccgaaggattcatcctcccgaaactgtctgactgttcgaaaatttttttaaaattaagcctaaaaaatttgtctaattattttaaatattttttcaaaaaatcgcctttataaattgcattggatattttcaagacaatttagtcctgtactgtggagtatccctgcaaaaattggtggggttctgatcgcttttccaaaaattacttggaattaaatttttactataattataagcctaaaaaataaggttaattattttaaatattttttcaaaaaatcgcccatttccggcactatgccaattttgggcgggacagacctaacggggagatataaagtatagggaatatcanatctattcccgaaggattcatcctcccgaaactgtctgactggtcgaaaatttttttaaaataagcctaaaaatttgtctaatatnntaatatttttcaaaaa

SEQ ID NO: 27597 - DNA, 977 bp, Heterodera glycines
atgaaacggaggaccaaatgagaaacgaaatgtaaataactaattaacaatcaattaatggggctcacctccttcggacctgagctagtaggcttattgaagaatgctgacaacctccgatatccattatagcttattcctaaaatagagcacccgtggctttattttcacccactctcaaaaggggggctttattttaggggggagggtttaatttagggagggagagctgtattgtaggaaattctgtaaaatcatatagcatcagatactttttgtttgtaccgaacgaatccgaaagaattttcgaaaatacacctgctgattggcttataatttttttccactcagtttttatttgtccataaattctttcgcatttgaattatgaaaaatttgggggtgaaatttttataaaaggttgaataaatataagagaagcatttgtttttcgccgactcgggttgggaagcaacactaattaaagcaattaaattgagggtaattaatctagttagtccggttcagttacatttgtggcgacggttggctgggggtgttccatttgcttccgcctgctcagcttggccttcaaattgcgctgctcagccgacgctttgactgtttggtcgacgaacacttcaaaacgcggaaatgggcgcttggatttgtgcgcattggcaacaaaattggtgcaaatggcaccaccgaattggcaataaaaaatttacgggccaaaacattgccaatgccggacaaagcattgcccagcaaagtgatcggattcaaaagcattatgatcaggtaatgctggcgaaaatgcattcaaatggcacaggtttttattagccacaaaaatgggctaaaggattgacataaaaaagcaaggacagtccttgaagggaaaacccaatcccaaaaaggcaataaattggaatttacgggatttgaaaaatacagagaaaaatgccatacat

SEQ ID NO: 27598 - DNA, 1144 bp, Heterodera glycines
aaaaccccattattggaatttcatttgaccaagtaactgatatattaaattttgtttattcccttattaaagccagtttttccaatatatttattattatcatattcatactcattatgattttcctaattccatgtctactacgtattctatatagaattatgtgtcgttgccttcctctttcgcgcgggagtgtcgcgacaacgtgaaatcctaagataaaacccaaaataaaaaagggaaaaaataaaaaacaatagaaaataaaatggggaaaaataaaacataaataataaaaaatatttttacatttattttggaaaaataatattataaaaaactattcaaaatataattacataaaaatgggaaaaccttttgaaatgaataacggaaaattgtttgaaaagggaaagtgcatttcctcaggaatgaaaggaacgaaaattaattaatattaaatgattaatatgaaagggcgaattcggttaaggaattgcgttcgtaaacaaattattaataattaattaaatatattaaagaaattggaattgtaaaggaaaaagtggaaaacaaacaattaatgggaaaatggcaaaacccaaacggatataacaaaaacagattttaattaaaaattataaattggagcgtactatggtttcaaaaaagccgtataaaaggggctgggttttcagtgatttcagatcgctcattggttccctccgaagtttccattccttccccgtgccgtgctccattccttccccgtgacgtgccctgctccttccccgtgccgtgcccgtgcgcctttcccgtgccgtgcccgtgcgcctgccccgtgccctgctccttccccgtgccgtgcccgtgcgcctttcccgtgccgtgcccgtgcgtctgccctgtgccctgctccttccctgtgccatgccctgcgccttccccttaccaatcccctttgtgcccatttgatcatgtcggattatatttgttcattaattaattatggtttaattacccaagtttgagggtacaaaataaagtgaatttttggcgcctttggtctttaatttttgtcaactcgctctgaatacgtccgcccagcccattcaaactttttttgccgtcgtcagaacgacat

SEQ ID NO: 27599 - DNA, 1028 bp, Heterodera glycines
cttttattaccctcataaacatagtgcaaatcctcggcagtgttggcaccaactaaaaaattgaactcggcggataaaaagataattaaattttggtcaataggcatcaaaatttttatttccaaacttagaccacccaaaaatttttttttaattttgccggcggcacttttcttaattgctcacttcctaaggcgtagagaatggcatctttggatgcataagtgaaaattgccggctcaggaatgtgttgtcgtgccttttccgggtccattttttccttttaaataaattttgaaaaaaattatttaaatttaaaatcataaatattatttaattatttatcagtaaagtaagtaaagaaatgattaagaaaagactgaagattgcggccaattttggcttttacaacaaaatttaatcatcaaacaatcgcctcactcaatcaatgagagagagtgtgttaaactgtttttctctccccgtcagtcaaataattaaaaattataaaataattaataaaaaaataattaataatctccagaggattttataaaaatttcaaaaaaacatatatttcataaaatatattaaaaatctcatgagaatatttttcataaattttctccggaaatgggaaaacacagaaattatttctctaattataagttgactgggaacaggttcactgtttattcattaagcgagaattttccgaggaaaattgcaagtttttcgcgaaggaaaattttcccgtgccaaaatctgctctgatcttcgtgccaaaatctgctctgatcttgatcagagagagagactgattggaatggttggtggtggtaccatatttggggtgaggcgccaattttgtggagaagagttatggtgccgagcctgctgctgaagtgcccaattgtttgctgctgctgctgctggactcaaccgtacaccccttacaataatgcgaggaaactgtattattaatttcaacatttaaaaaatatttatgtaggtaggttaaaacggaa

SEQ ID NO: 27600 - DNA, 1228 bp, Heterodera glycines
  unsure (1)..(1228): unsure at all n locations
tttcatatatatcatacacaaatatttatttagctggcagaaacgtcagtctaaacgtgagagcatatctcattataactaaaggaataaataaacgataagaatatttaagaaataatctacgagaaacgatagaaaatgtgaccatatgaaaagatttgttaaaattttttaataaaaatatttttttttcaaaaattaattttttcctaataattcaacattaaatctatactcatttaaaaacaacaataaacaggttaaaaatttagaacaaagcattaatttaataaaaaaagaagtcaaattaaggtttatgaataataatcgggagtaaactcattcatggtaaaagcgaaaaaaacaaatgctaataaatatattaaattcaaaaatagaaaagcaaagaatttgaattaaaaattataggattgaaaccataataaaactagcttaattaatattaataataaaatattcatatttaataaaataagaataataattaacttgcacgggtctggaaatctgcataaaatttaaatatacaaaagattttttatttaatattttaatattgaagacatttgattctttctttaatttcttttaaagtgagtaattgtacttttgctactgacttaagacagggacgcaattataccaaacacagagtaggccaatgtcaaatccaaacactttaattccaaaagacaaataccgatgagaaacaatttgacgaatatcgattttaaagtcaaaagaaattggacggcacaaaacaataaaaattaccagataataaaattggaatgaaagatggaaagaaaaaacaaagaatacaatttttaagtgagaaaaaacgcgaaacaagacattatgccaaatttaattaacactaatgagtcattataattaaaattctacaacatccctcaacaatcagaaaaggcgtccctgcctttagaagtcagaaaccgaaaggtggggtccaacaggtgtctcagcggcgattaggacggaattcccgacggcgttcgttaccgtacgtccctggcgattagtctcataaggacggtaacggatggccggacgatcagccgaacgattaggaacaattctacgagaatcggcccgatctctcgaagaatgccctaattccagctngtccgatcggtgatcggcccgatctcccgatggaaaatatgacgncgaaggcagcgagcga

SEQ ID NO: 27601 - DNA, 915 bp, Heterodera glycines
  unsure (1)..(915): unsure at all n locations
ttaaggatatcgtgctaaatttggcaatcaaaggcagccttcccctactatttaaggatatcgtgccaaatttggcaatcaaaggccgccttcccctactatttaaggatatcgtgccaaatttggcaatcaaaggccccctccccctactatttaaggatatcgtgccaaatttggcaatcaaaagccgccttcccctactatttaaggatatcgtgccaaatttggcaatcaaaggccgccttcccctactatttaaggatatcgtgccaaatttgacaatcaaaggccgccttcccctactatttaaggatatcgtgccaaatttggcaatcaaaggcccccttcccctactatttaaggatatcgtgccaaatttggcaatcaaaagccgccttcccctactatttaaggatatcgtgccaaatttggcaatcaaaggcagccttcccctactatttaaggatatcgtgccaaatttggcaatcaaaagccgccttcccctactatttaaggatatcgtgccaaatttggcaatcaaaggccgccttcccctactatttaaggatatcatgctaaatttggcaatcaaaggcagccttcccctactatttaaggatatcatgctaaatttggcaatcaaaggccgcctttccaacctatttaatgatttttttcatttttatggcaatcaaaggccccctccccctactatttaaggatatcgtgccaaatttggcaatcanaagccgccttcccctactatttaaggatatcgtgccaaatatggcaatcagaggcagccttcccctactatttaaggatatcgtgccaaatttgggcatcaaagggcgccttcccctactatttgaggatatcgtgccaaatttggcaatcaaaggccgccttccccta

SEQ ID NO: 27602 - DNA, 814 bp, Heterodera glycines
ctcatctcccaaatcagtgccttttctctgatccctttagagcatggagagcaccgttcgcgcctccttcgtcttctgatcctgttcaatgctttgccgcattttttccccgaatttcgtggcggcttcatttgacaaagttggcggcttcgtttaccgttcgttttctggagcttacaacaataccttggcctgtattttttaaggctttctctttgtcctcccgcaaatccttttttgcctcattgttcaaagtcgactcccaaaatgccattcgctcgtttgtcggcttcggcggtttttcgaaggcatctctttctctttcttcagaatccacaatcgagatttcatcgtctttcgttgttccgacgctgaggcttcgtttggtttccgtctcgtccttctgcttcatctcttccttcttcttttccgtctctttttcttttccctctcttcctttcttctcctcctcctcttttttcttcatttcttcgccctttttcgtcgtttcttcctcattttcttcccactcctgtggtctcactggatcatcatccgacgttccggatttccatttttcgctttcggtcacactttgctggaccctcagaagttgatgttcgagctttctcttcaatctcttcagagattcttcctcctcttttgacagcaattccatcttgaaaaatgaatggcttttataaattttcccgctcttttctttggactcgattaatctgccttttttgttcatgatctcttttaggcctgaaagttgcttatttttctcattaatttttcataaattgttcca

SEQ ID NO: 27603 - DNA, 1194 bp, Heterodera glycines
attgctcaaattgatcatggacagtcaaaaatacaacatttgatcattttaaacgtgttttgaataaatttgtaaaaatgaggctttttgatccaaactgaggtttttttgcatgccaaatgaggctttgaaaattttaatcacacagctctgcttataaccctactgatgaaatgtacttagttcgattgaaattagtttcaaaaaatctaaattttttttaaatattaagttttgccagcacattaccaatatgccttttgaaaatgtaaggccttcttctatataatgtaaaatatgcagttttgtatgttaaattggcttccggtgtagtagaaaatgctcagtgagatagtaaatttttcaaagtcagaaatctaaaagtttgttcaattttacggcttctctttaaaatttatttaactttttggacctttcaaaaaattgaattgataattcgaacgaaaattcttataagattttgactttttaatttatttaaaaatattaccattgacgcattttccgattacggttaaatttacatttttgatgtatgtaaaggttaaattatttttgacttttaaaagcatcggtagctattacgctgacaaatgaaagggcgtaattattgaacacatcaaatgcgatcatttatcattcgtcattcccccaccccgccctttgtgccgtcccctcctcttcctcgtctgttctgcttttcgtctcctcggcactctttttctttggatttgcttcaaattgcgagaaattaatgagcggcgaaaacctgcaaaataaaatgaatattaatggaaataaaaaaggaattgccccccaatgcattccaaatgcccccccccctcccctcaattgtcccctcactcttccgtcgcttttctctccttccgatgcgtcgtcgtttcgtccctctctccgtttcgtctctgctgctgttgttgctgctgccggtcacccatctccccattgtacacaacgcgttgttgggcaagtgcggttttgtgccacatttcggccagcatttgttgctgtaagccaatggaagggaaatgcaaagcgatgggcgggggacaatccgtcgacgagtggaaaagcagcggagactgttgttggtgctgttgctggtgctggtggagatggagcagttgttcgagttgagaccatcccaaccca

SEQ ID NO: 27604 - DNA, 994 bp, Heterodera glycines
  unsure (1)..(994): unsure at all n locations
tttgagattttaaaaagaattatgaaaaatacgggtgaatttntaaaaatatacataattaatttaattaaaaaccaaaaattcaaaattttctcgaagcatctctttaaaattcaaagtcatttttataaactaatttaagaaatctttgccaagaatttctaattagccaaatttgcttcatcggaagagagtccaattaattgaaaaagcatgaaaaaagttttatgcttgatttgttaagtttatgatgaagtttttatatccaactttttgcattatgcccatattttctttcatattttgacatctccaaattttttttttattataacggaccatcagcaaaatttgtctttttacctcaaaatatccgaaggttttgcgaaaatttatgaaattttctcgcgatgtttgtttgaaattttaaattttcttaaaatagtaaaatttgtggccaaattaagtaaaaattatttcgctttttctgtcgttaaaagcaaagcctctggatgttttaatttagaaattacattattttattaatgataataattaattaattaagtaaaaaaattgtggacaccgaattgctttggcccttcaacagttatacaccaagtgataacagataacatgctgaaagtaccaaagaaatacgatgtgctcaattttcattaggaattattggaaaagaaattaaattgttgaaatttggcggaaatattgattaaattttattaggagaaatatgtttttttggaataataatggccaatttacgtggaagataggctcatttaaaggaaaaccgtagtttattgggcggtgccaattcgcagccattgcccgccccctggggccattggaaaaatggggagagagacgcagaaagggggtcacactgtggggaggcagagaaaaattaagaggagagtagaagagagagagagagagaagataaatatatgttagacaaatggcggaagagaga

SEQ ID NO: 27605 - DNA, 879 bp, Heterodera glycines
ttgcatttgtcggtgctgtttttgaactcgcatctccaaaattttgtcatcccatcagaaccagggctggacgcaagtggatttacaattacggaaatccgcaatccgcaattgcggcgattttctcagttgcggaaatccgcaatccgcaattacgggtgtccaaaaaccccgcaatttccgtaatttccgtaatccgcaatccgcaattgaaaaaaaattttttttaataattttaaattttattttaaaaaatcctataaatcttttaaagcaatttaaaagcatattaaaaagcaaatttataaaagcaaaatcattcaattgaaaatccggttagaagcaagttatggtgaagaaacaaaagctttgccagattttccgcctgtaaactctttctcaagtcatctgaaatcaggccggccgttgagaaaagcctctcactttctgaacttgttgcaggcggagaaagaaatttccgtacaacggcaccaatcattggccatttttgtgaattaacttcccagtataatgctggatcgaccctggatttgattttttggtcccgtaaatattcattcacttcaacttcggctttttgtcgtgtctccaatgcagatggactgggggatgttgccttaaattaattaatttgaggggaatataaattaaacaaatgtatatattttctttaaataaaaatagaaaaaaattcattttataaaaaataatcttacaagaaatcgtcgcgaaaaataatccaatagtcaaattacggatcaaaattgcggataaatcccaaaaatccgcaacccgcaatccgcaatttacgggggtccaaaaaccccgcaatttccgtaatccgcaatccgcaattgc

SEQ ID NO: 27606 - DNA, 106 bp, Heterodera glycines
tttttttttttttttttttttggtgggggggggggggggggggggggggggaaaaaaaaaaaaaacaccccccccccccccccccccccccccccccccccccccc

SEQ ID NO: 27607 - DNA, 1023 bp, Heterodera glycines
cccccctccccttctcattacattgcatttgcatcgcatttgtgacaagtcgattgcgcaccgtcaagaggtcggcgagtggagggggggggggatgggatgccattccggaagcaaatctttttgtgccgtcgtcgtccgtcggcggcactctttgttgtcccccgacccctcaggagaggattgttatccacaaaaatggacagaacgacaaaatggaaaaactatttctttttgatgaaagacgagaggaagtggcacttttcacgagtacccagagaagaaatatacaaaacatttatatattaggcgaaaggacatcaaatgtcaacagattcgaccactccgtccccctcgcccaatttaataaaagtattttggaagaaaaaaaatagaaacctaaaggcatacataaaaaagaagcgaaattttccggatttaagaattattggataaaaaattggataaatatttgttttaaatcaatttaacgaataagcgaaatttaccacaaaaatttggacagaaataaattttcctgttggaaacatattttaaattaacttttttaaagaatttttgtggatgggactctcaaaattttgagaaatctcaagcacaattaagacgcaagaagcaataaaagaatttttgtcgcaatattttttgaaaattgtgtatgaagtacgcgctactcacttctgtatggtagttgaataaatataaactgttcgagagtccgcttctcctgtagcgcctgtgaagggatcatacaacccagtccagatagaaaagcctcggtctctagtttttagcatggctctgatgccgattccgaagtgagggattcctcttttgctgctttgggtgccattatgaaaggcattggggaaaaggccttgggctgtttcatttcgcccgaattggccaaatgctcaatgacaacaccgatgagggcaatccgcgtgctccgcgccggtcacattttgttggcagtgatggactttcctcagccgtttcgta

SEQ ID NO: 27608 - DNA, 1244 bp, Heterodera glycines
atcagagttctcacactgattagtaaggaggctaagccccatctcaccactcattcagcactgattgaattttgagagaaatttgtgattttggcagaaaatttttttattattataaaaatttgacggggatcggatttgaaaagtttttgctatgttttctgatcagaacgcacactcatcaaactgcttacttgaattgcaatcagttctacaatgatattgaaaaaaaaagttagttggacgcaatttattttttcagggaagcataatatgacatgggacgcataaaaccgactagaaccttaaattattatattaggatgatggatcagtcaataaccaattttttggcacgcatttggataaaagcctttctgatcagagaaccgagcccaggaatttctgttttaataatatattattagtaataatttattactaggggccggatttattggacaaaaaatccaaaatagaaaattctaattgcgttcttatgtttagaaatgtgtccggtattctgcgtgggtttgatccatttatgaacatcgtcgttgaagattgtattgagcacctcaaggttattattaaacctcaaactcacttcttttgttataatttctgtcatttaagattttccggcgttatttacaaagagtagtattaaaaaaaattttaggccaaaaaaagtgaaaaatgttcaaaatactactctttgtaaataacgcctaatttcctatgctttttgaaaaactcaactttttggtgtagaaatggcagtgtttttcactattataaaaaggagccatacattctctttgtccattttaggactgttggaaaacactttaaaatatcttgttttaagaccggcgaatcgcagagcattggaatggttgttgtccgtggcaattctgtcgtcattatggaaccgatggagcgaattgggtgactgtcgcagacagaaaaaaattggcagtgatcattggtctctagctttgttaattttactctttttgttcataaattttgctttaatgggagccactttttcgaattaatctgggaaaggccgttaaaaaatggtcattccatggttttttccctgggcccttaatccgtttttccccattcttaatgtttgatgtccaccatttgcctcgtgcgctcgtcaacatgttcatcagtgcgactaccaaacggtcaaatgattcgttcacatttttcaattcatttttaat

SEQ ID NO: 27609 - DNA, 981 bp, Heterodera glycines
cacatcacccggagaaaggcgggaggggaagggtccgggcgaatttgctctcccgcaaattcgcaattttccatcaaatgatcgccgattttcatcggctgtccgccttggtgatgtgttgtttcgcccgtcgcaccgcgatggtccgatcggcgtttttgcactgcctcgggcgtccttcacgcggagaaggcgccacatccgctttttatcgctttccttcccctctttcacgtgctcgcctgctgccgtccctcccttcgccccctttttgtcctcccttcccttcatcatttcccgtttgccccatttttcccatctttccatccattcatcactcctcgtttgctgcttcgttcattcctccccgttctcctcatttgtccgctcaacggacattcgcggctgacgttcagtcgcgacaaaagtgcgaacagaaaggaatgctcaaaaaagaaatgtttaatcttcgaacagttcgatttttaaataaataattcatccaaaaaaatagatattatttgtttttaccctttcattcagaggcaatctttggcatattccttatgttcgcagaattcaagattgagttcgagaattggataaaagcacaaaaatttaaattgcagaaatttggataaatcgaattaacagaattcaagcataaacttttaattaaaagatttaggatctagataaaaagttatttatatttttggaattatatctatgaattaaaatctaaacctccacactatgaaattaatcaagcaataacgtgctacagcatgaaaatacaaaaacaaaattattacacacaaaaagttaaaaaggaatatatgaggtaaagaagcttattaaaaaacgaataattgtacataattcttcaaaatatgagaacaatcatgtttaattcaaaacaaaaataattctaaatacccaaaaataaataattcaaaaatttttgaaatgcattaataa

SEQ ID NO: 27610 - DNA, 1303 bp, Heterodera glycines
  unsure (1)..(1303): unsure at all n locations
cagcgctgtgcgcttttgctaatcaaaactttcaacccgatttcccatcataaagcattctcagatntcatctttcctacgtcagtgattaattgtttttttttaatacaaaacttttcagttttgtcctctaaaatggaattttttctaaatattttaagtttctgtacatgatatgtataataaaattaaagaaataagggaaaatcaaaaattcttagggtatagaagaaaaagaaaattttttttaaaaatttatcaatccagaacattacttagttcgaattatttatcattttttgaaattttgtaacgaaaattaaaaaattccacaaaattttaaaattcaaatgaattttattgagctagcttccttcaaattttaatttgaaaataacttgttaaaacatcggctcaaaattaattttcgattttcaccagtccaattggccccaatgctcctttttttgacaaattccatcagcgtttttctttctttttcaactgcctgccccactcatcaaaaagcgtaccgccgccctataattacacatttattaatctctcccgcccctccccccggggggaaaacaattttcccatcacattttgcaaaaatttttggtgctttaatgtcaaagtccaaatgtgggtgtgtgtgagacttaaagggcctattgttcattcacacttcggggccccctaccccgcccccgccaatttcttaagagacggcggtggtcgtcgccgggagggattttcacccttttagccccccccggccctcccaaatccatatccccgtcatttgtgggtgcccaaatttaacgagaaatgaatgggcgagagttaatggagtattagtctaaattgatttcgatgtttgagttggggaagcggggacgaacgaagcggggaaccaaaaaaggctttgatttggattgggtcagttgattgcgagatataattgatcaatgatttgccgaatgggttgattgaggaaacaaaagctgcaactgagacaaactggggaccaaaatacggggatttaggaaaaaaggggagacggggataaaacggggttggagaaaattgatcatttgggacaaaaatttaagggatggggggtggggaaattcgacctactcccgcgccaacaacaggtggaggaacggggcggcacaaaaaaaaacagggagaggtactggaaaaaaaaccaatctcgaatcgatgagacggggaaaccaaagcggggagacggggacaaagtcggggaaaggtggcacaaaaaaaacacgaagat

SEQ ID NO: 27611 - DNA, 2209 bp, Heterodera glycines
ttgaaaaaaaatcatcggctgaaattattgggaaagttaatgttcttttcctgggattgggtacggatttccaagccaaaatatagtaacttcccacccctattgttctttacaatattatatattcattaatgcatttctcgggagccataaaaattaaataacccgaatttcgaaatgaatttcaaaaaaaagaaagaaatttcctaagtaatataaatgaagggaatgaaaggaagaaattttaaaaatgaagacggaaaagaagttttgcttgaattgacagggtatttatatggtggaatgtgggcggagtcaggacacgctcgcgagtatttattgagtggaaaaggggcgggcctgagcaagcacgcgtgcgtgtcgagcgctgattggccgccgatgggctttatacagtaggcaacccgttcgaccatgcgctgttcgtccttgaaggcaagcaaggacagttcttgacgtttcggcatgggaaaattagttacgaggatactgtaacccctgtcaatccttgtcattgttgtgagtaatagaaaaagcatcatttttaccaaaaaaatgtacaaaaaaaaaagaatttgtaaatttatcacttttggattttgcacaatggcactcgttatgccggtatggaggcatacctgaacaattattgagttagaccaagacaatttgctaaaaaaattttctattccgccatctcatcagttaaaaatttgcacaaaaactgctcaatgtgtaccacaagggatgggacaaaaattttttcgaactttttggtactgagtcggcaatttaactgtacataaaaaaattctctactgttgcccaccattcagcctcttctcgattacatgccgggtcatcgcttgtggttcgactgttcggatagaccaggaagaaataactgaaataatttttttatttatttatgggatgcggcatggattcatatttcatacgccaaatttattcaaccaccggggacccctctcttaaaccccaaaattttttttaaaaagttgccgcaaaaaatggcacgaaattcaaaaaaaaaaaaaaggacgtcacccggaggtgagaccatctttaagctgaaatcctgggaccgtccctgattgcagtgcccctgctagagagaatatacctgatcccgccagacagaaaatgtccggtcttgaattggccaatattatgaaatcccaccccctccctaaaactctccccccccctccggtgttcatggcagttcgtacaaaggcttagaacaagccaagctttaggcttaggctttattttattgacccccccccccctcccgccgcgcccaaaaaaaagtacaggcagaaaatgacgaagaagaagaagaacgacatttgtgtgacccaatgaaagcggcgcatgaacgacgcggaaaactcaacattgccaaactcgtcgaacatgccgaagaataggcgtcgccttcagggagggaggggtgagggagggagagggaatagaaaattttgaattttttatttttacaacttttccctcctccgccagtggcctaaaatgccggcatcgagtgttgttgttgttaatgcatcagaatcgctggagctgtccgtgttcaactcaatgccaattcgaatggcattcaccggcgagcattgatagttgagaaaggattttttttattttggtaatcagggtgccaatcaaatgggcacttaaaagccaatcaaatgggcacttaacagccaatcaaatgggcacttaaaagccgattggcttttaagtgcccatttgattggcttttaagtgcccatttgattggcttttaagtgcccatttgattggcaccctgattaccaaaataaaaaaaatcctttctcaactatcaatgctcgccggtgaatgccattcgaattggcattgagttgaacacggacagctccagcgattctgatgcattaacaacaacaacactcgatgccggcattttaggccactggcggaggagggaaaagttgtaaaaataaaaaattcaaaattttctattccctctccctccctcacccctccctccctgaaggcgacgcctattcttcgttatgttcgacaagtttggcaatgtggagttttccgcgtcgttcatgcgccgctttcattgggtcacaaaaaatgtcgtttttcttcttcttcg

SEQ ID NO: 27612 - DNA, 2090 bp, Heterodera glycines
  unsure (1)..(2090): unsure at all n locations
cgaacaagccagactcgacagcctctcggatggacatcagccgcattgtggacggattctccacgcatttctcgtccacgtcgaacccttgggcttggagcagtttcaggaagtcggtttggaagtcgacaagcgctagcgggtccacgtctgagcgtgcgcgtgagccgcgcaacagcgaatcactgccatccgaagagcggacacggacggacaggctgggctcgggtgcacgccgggtgcgcaccacggtctcctcatagccacgcgggcggccagtagcaccgctcgtgccgctaagcgtgtcgtagcctgcgctgctcatccgctgcagggtcgagtcatccaacggctccagccggaatttgtagccctcaacgtcgcgccgcttcaacgcctcgctgaccgcaagcgctgcctgcattggcgagccgatcagcgcgatcagtccccgttgaacagcctccttcagcggcactgtctgcgcaccaacggcaccctttgcatgcttcggcacgtagcggccgtgcgagtcgatcaggtccatgctcagcgcctcgcgcaatgtcattgttttggacgagtccaagtcgtgcagcagcgagtccgggtcgaccagtcgctgattgacagcggcgccaaacggcaggtaaaggcgcgtctgcgggtcctaaagggaaaagtaatcagtcagatataaaaatttagaattatgaaaagggtacatgttctgctgatcatcatggtctgatcagaaagaaatattaaaaattcattcaattttttcaaattttcaaaaaaaaaattcatgaaaaactttgaaaattttaggttccaaataattcttaaaaatatgaaatttgaattttcaattaaaatttataaattttcgagaattaatttagtataaacataaaatttctaaattttttttggtaaatttaaaatttttgaattcatggaaaaacgattcggtggaattaattttgcactcagctgatcagttagttcaaggaaaaatttgcgacctgtactcgtcccgatcgctcgtcaaattcttccgattggatgatccgcgccaggttagtcgccgcttcggctccgtctgtatcaggcccactgattgaaccggtgtcgatcagtccatggctgaccgcgtccgcaatgctcatctgccgcccgctttctgcgtccgtgaacgtgccctgcgccgcgtcgatcagcccacggctgaccgcctccacaaaagtcagtttgtccacgcgctgcaactgctccccaacatcgcgaggcagtgcgccttcgtcaacagcctgtttcactggcacaaccctgtccggcgacagttgcaccgtttttgcacgtgggtcaatcagacgggcatcgaccgcttgcaccaggttcagccgccgatgggtacggtggtcgaggagcgcaggcgttgtcagtgagttgaacgtttgtgcgtcgatgatgccacgttgatgcgcctcctccagcgacagctgttcctgcgtgattgggttcaagtaggcaactgcacgcgtgtcgatcagtccgtcagcaaatgcactgtaaatacaacaatggataaatggaaaaaaacagagctgatcgattaaaatgtttgatttgattcaatgatcaaagggcataataggaactaattgatcagttattttcccgtccgctcgcctcgccagctcacctggccactgagacggcgtaacccttgcgcgggtcgtacacgccgttctgcgtgatcgcactgtacaccttgcgcgtcaggtccacccacgagaggcgctcgccggtgaacggatgccgcacttcgcccgttcgcgagtcaacaatgcccgcttcgacggcacgtcggacgctaactttctcgccggtgcccggatgtacaacaccgttgggcaacgtctcggccagcgtcacgtccacaaggccttggtttgccgcactggccaagtcaattgcttcaccagtccgtggatggatgtactgaatggcaattttatgactagggttaaaatgggattaaatgaatttgtaggatttttttcagatttctnnatgactctaga

SEQ ID NO: 27613 - DNA, 1498 bp, Heterodera glycines
aactctatagaaaatgtgttatttatccataatataccttactagtaggcaaaaaaggtataggcctcaaagcccgttatttaatgataaataatttccatactccctccattctttctatttaatctattattattaataaattttaattgtatcttgcataacattaagtcaaaaatgaattgaagttgcttgctacacatataaaaaaccaaccaatgttttattatatacagtttttagttgcttagatattaaattcaatcttctaaagcgttgatttacattcattttttaactctaatcacattctatgtacttaaaattaatctaagtccatttataaaataatttaaaaggaaaagattaacgaaaagtgtttaatttacagataaataaaaattattaaaaaaaagaaaaaatattcccaatttgattatctataaatttgctcaaagaaataagtataaaattgggaaaatgtctccaaagtcaacataaaatttaatttcttattgacgaaaattgtgattatgaaatttcacaatatttaaaaaaataagaaatttaaactatttcgctcaaaatataatcttattcgctcaaaaaaaaagaatatctatttatttttataataattgatcgatataaaataatttactaaatataatttaatccatatacaattttatatgtgttgttacttttttaaatattggcacagcaatttttggtataaaacaaaattagttaatttattctaaaaataataattataactgattgatgattactgatggaaacattgtgttggactttttgacctttattttattttttgtatttgtttggcattatgtttaattatttgtgaccgtttttttcccaccttttcaatgattcgaatttaattgtattagttttatgttttgtcttctccaaaaaaaattgtttgtgtttcttttatttaatttggaataaataaactctctgaaaagccttgacaccttccttgaatcccaaccaaaagtagaagaaaaatctcatttttatgttcttctcgcaaagtaaaagcctattttttcacgattttttttatcttttaggcgtgataaatgggtttttccgattgcgtactgccttctcacttcagtcataccatagaaaacttcaacgtgcatttgattgttcacatccaactgtcttctgcttcatcaacacaattcgatgtgagcaaaaaccaattgatgcagacatcgcccaatgcgtctccggtgaatccctcctcaaaaggcgcccaaatatcgtgccgccgatgcgagaattcttcgacttttgcagggctacaatgccatcaacaataacccggctaaccaaaatgaccacaattatcatgccaatgtcaatgttaatcccgataacatcaatcatcttctagttggtgtttctcgaaattatgaaatgtgcccgtaattttccaatgttttattattttttc

SEQ ID NO: 27614 - DNA, 1196 bp, Heterodera glycines
tccacgacggaattgtcatgttttcgttggtcatattgccgccaaattcaccaaattcacaacggcattcgtaatcttggcccctatttatggaccatttttccgcaattgccgtgcaattattgctttccaaacaaccccaagcaatgttgccaccttttttgtcgtctgtgtctgtaagaattgtttggatgacaaaaaacgacagaatgcaaataatttttggaaaatttacccttcatttcgaaaaattatgtctatatttttgcaatttttgtacatatttcggcttttttggtctatattttatggtcatatttctcgatttataactagggatgggaatttatgtcagaaaaatcgcgaaatacgtaaataaaatatgaataaaaattcaaaaatgtgtataaaaaatttttaaaatgcttattttattggaaaaattcttcgctaaggatgaaataggcaaaaattgctactaaaatgttctaagcagacttagaatcacatttttagtattttaaaaattaatttttgaagtctcttttaaaaaacgatttttaggggtacattttcaaaaaattttttgtttttgcgggtctaaaaaattcctattatattttatctttttcttataatcattttaataataaaaagtagatttaaaggttctttctacctgctggtttacagatggcaaaacaaaactgttcttttttgttgcatttatcaacaccaagaaagccatatcccttactattaaacgtgccgcgcaaacatgacaaatctgttttaaaattaattaaataattcatcagcttaaatattaatctgtgcctgctcgaatttgagcaaagttgcaactatattgacttatgataaagttaaataaatttaatttgttttggaaactttttatgttttcttcccctctatagttttattaaatccatacatccttgggatcaattgaaagcttaaagtctagaaaatacttgcattaagaaaaaaattgtaaagaacaaaactgaaattcataattttcgtgtatattcaacaataattttttgtttattgcctttgtccgagaatttttttatacaaaaataactgtgggctttaagcccccaattgataccaagaatgtaagttttatccaagaaagaaaaaagttatgacttaagaaaccgaggata

SEQ ID NO: 27615 - DNA, 1260 bp, Heterodera glycines
  unsure (1)..(1260): unsure at all n locations
ctaacatttggtaattaggcgattgaacaacagacaacttcactatgtttgaaaatttgtgaaattnccgtttttatgccttaggaaagaagntgantgganagttacaaggttgaaaatgggattgaagacaaacaatttgcccatttcttattttttaagccaattaattaattgcttttttaattacccgcttctttcgccttccccgtggcatttgttgtgacaaattatttgaatttaaatattcccacaaatgggcgaaactataatcagaagggtaataattattcatttgctcttcaacggcaatgccaccactccccaaatggtcatcaaaatgggccatgtcgcgtggcatgtgccttaattaattgcttaattaatttgtttttttgtccttttcaatttacaaattgccaatttttctttcaatttcgtttcctcctttcacctgctgctctgtccgctgttttcttctcccattcttcctcccactttcagtgtttgtccgttcaacattttggccactttttctgcgtttttatcgtccaaaaatgttttgtccaattcgtatgcaaatttggcttcttcccgttcattgccattttgaagtaccggcattctaagttcggcactgaacagcgaacgttccttgggctgactatccgcggcaaattcagcttcaaaaggtttgttttgtttggttttgattggtttacggcattggggacacttctctggcagctgatcagatgttctttttgtttttagcctgattaaatgagaaagagcattacaccctaaaagagaggaggtcccaaatgctaatggattatgccactgttttaaatttaatttaccattttttgaaacaattccgatgagcaaaatgctaaaaataaacaaaattataaaaaataaaaatatttttatttttattttgacctcacaacccgccattttcagtgcatttttttccttttctgagaattcatcaaggcaaaaagaacattcattcaatatctagtaaaggacaaataattttgtaacaattaattagttaaagcaattaattattatttaaagcaattaataatttaatgaattaattgtctcttaattggcccaccatttcgaccatttccatgcgaagtgtcggctccgtttgccgcactcttttcattcccaatttgttcagctccaacttcagtccgtcctcctccatttcncgtcgtttcacttgtgccacaatggttg

SEQ ID NO: 27616 - DNA, 1350 bp, Heterodera glycines
ccccgctttttcaggctcttgacttggcaaacgcggagattgtcacatttgcgggaccgcagccggaggatgtggcaaagattttgcgtatgatgcaggacaacttgcagttgtggacaccgaaggaggtggccaaccaggcgaagacggacggtgattgaagtgccgaaccgccgaaggagggatgaacagcatcagacagacaataatatgtactcctcagattgtgcccgaagcaatgatatgaaaatgatatgtttttctaaatttagaaataaaacgatttgccattttgggtgccattgccaagagtatttaatttttaatttccaataaagtgcccttctcctcctcctatctctctctccaccacttcttttggcacttttcttctcccaatggtcatcatttccatggaaacagaaggaaacccataaagagagaaggaaggggtcagcaaatgcctgctggtgaacgctgcccgtcaaaatcccgatgcgtcgaaatcccgacgcgtcaaaatcccgatgcgtcgaaatcccgatgcgtcgaaatcccgactaagccaaaatgagtcataatcccgacaaattaaaaaatataaatttatttatttttgtacatctatttacatgtatattatatattatatatataaatatatcataatagccttataaacaaaatgaatcgaaaaaaaattgaaattcttcaaaaatgtcgtaaacgcaagtttctgaacaacaacgacggtgaaaacgcgacaacttctgaacaatgtgagcataacgacaacaacaatgaccgcgatgaagactttggagaagaacatgccatcatcaaattcgaactcggaaaaactcaaaagggaggcaattgtctttggtccgaaggtgggaactcatttaggcgtactatctcttcaatttttaatggaaaaaacaacatttacttcacatcctgtttaactttttttttcggcgtgttaaacccacaccaaattttacatagagatagagaaaaaaatatataaacatttttaacgctcgaagaagaaatttaaaccaattgaaacccaaatttatttttgcatgtaacaaataataagtatatggaataaactgaatttgtaaacaaaattctttaaaaatgcataatttttaatttgaacggctgacatataaatgccaatgacaattaaacaccaaattagcacacaaaatgggctacaacaacaacaacaacaagcaataataataataaacaggcacataaccaaaaaaaaaggtcaggaaaggcccaactcagggaaattttgttttaaaatgatacaatgtcaaaatatacaac

SEQ ID NO: 27617 - DNA, 1155 bp, Heterodera glycines
  unsure (1)..(1155): unsure at all n locations
gggaaagaataagggacaacaaaaagggcggtggcgacaattaaaagccttatggtcgaaaaaaatcatcaactgtgcattaataaagcatggaaaattttgcgaaaacaattcggaatcgcagacatcgtcattcaatttcaccacaattgattaaaaatcaagaaaantcatttaatggagaaaataaaagttcgcagagtttataatcaaaaattaataaataagtttatatattttatatataaacattaatgaaaaaatattacgcctttttaccaaaaaaaaatataaacaataaattaaacaccagcttctaataaaaacgaacacttattacgcctttttgcaatattttccatttttcgatgtatattgatatccctaaaaaagtgtaaaaacaaaacaaaaatctgtccttttaataaaatagcaattccatcaaatcacaaattttttgtaatatttcaaactggaaagaaatttatctataaaaataataattttattgaagcagacgaagttttaccttttgatctgacaaaggcatttaacactattattatttttttaaacaggtaatatcataaaataatgttttgaaatagtgattaaatataataatttattatttttgctttatttctttatatctatttatttagtatgaaaaccttaaagttatatcattttaattgttctaaaaataatcgatctggcagatttattgcggccatgctttggtttattgatcatgtttataagtatctgaaatatttacgacaaaaattaaaaattaaaacgaataaaatttattcaaacataattttttgaagacaatttgtaagaaatatgagtgtgattttacgtttttaataaaataagaaaagtttcttatttaaagaaaagagtattaaacataaaattctcaaacaaaaaatacctaaaggaatcaaaatagagcaaaatttgataaacaaaaatcagttttatgaaaaaattaaaaattatcttttttaaataattcatcatatttattaaattttcgaaaatagcttaaagtttttgtctattgcactaaacacctgatagtgtacggcaaatggcacaaaaacactcccattattaagaacagcatttgccacgttcagtgat

SEQ ID NO: 27618 - DNA, 1278 bp, Heterodera glycines
  unsure (1)..(1278): unsure at all n locations
tattttaaatgtgtaaaaaatgcaatggtctaattaaaaacatagctaattcatncgagttaggaatttaagttttttacgaaatcgtccactaattaaccatgtttattttgttgatcnnatacaanttctnaatatcaatgtcaatgtatatttgtgtaataattaaaggctcagtctgttaagacttaattnttatacgaacagaaacttgaacacgtctaaccctacgtntaaacaattgtaagaataaaattgttgtcctgttacctccgaaaatatttgtggtcttcgaattgcttataatatttcagtctaaggttagattgtccaacaatttatcgtccttctacgtgattccgaagtcatttttctatttgatttaagaaaattggattttaaatgttgccttttgacgctgccataaaatttgagtcatgtgtaaattttacataaaattattccactaaatttgaagcaaatttaaagaaataatttaatatgggaccaaaatagaaatgaatctttctaaatgcataaaattaatgagttaatcattggtttttaaagctaaacaaacgtgaaaaatctttcaaaactttttttctccaaattttggctttaaaaggcatttgcttacaattatttaatttgcattctttcatttgtttcccaccacaaattcccatccattatcgagccatgcgtgctttctcttctccatcctggcccatttcatgcccaatttttctgctgctcattgtcctacaaaattcgctgttaattaatgctttcttcggatggggtggttgtgaggacgaaacgcaaatcggagttgcacaaattattggacaaaaacaacaacaaaaagaaaaccaagaaaaacagcaacaagaacaagaagaaaaacaaaaccaagaaaaacagcaacaagaaaaacagcaaaaagaacaacaagaaaaacaaaaccaagaaaaacaaaaccaagaaaaacagcaaaaagaacaacaagaaaaacaaaaccaagaaaaacaaaaccaagaaaaacaaaaccaagaaaaacaaaaccaagaaaaacagcaaaaagaacaacaagaaaaacaaaaccaagaaaaacagcaacaagaacaagaagaaaaacaaaaccaagaaaaacagcaacaagaacagcaacaacaacaacaagagcatanagacacacaatatttcggcaacagtgatagccaacacagaaacacgacaaacacttcagcagtacgagcagtacatcaaatctct

SEQ ID NO: 27619 - DNA, 866 bp, Heterodera glycines
tgccgggaggggggggggaatgggagcagaggacaagttggaagaggaaacactgccgaaagagaggacgaacccaaagtgaaaagccaaaactgataataaataattaatgcgtttggggtggcgttggactttcattggcaaaagtgacaaaaccaaagggaaaacgaaacaaaaattggacaaatcagcagcaagtgaaagtgatcggaataatgcctaataaaataattaatggaacagaaaatcgttgaattaaaaagcgaccgatgccattgaaaaatgccaatgatttactgatcgaatcattcgattgaactcaatcatttctcatcgaaggacaaactttggcatttgagcattgatttgtgagtgccattgcttctcttctctctctccaatctcatcatttgcttttgttttgtcctctcattgttttccattgtctcattaaatctctttttgtccccccccttggccatttttaattatatgtctttaaaagaattgacgttattaaccccaatttatgaaaattcttttcttggcattacaataattcttaaatggcctttttaatatttttgccaaaaaaatttaaattgaaattttaagtttgtcccaaaatgggcgaataagcgtcctactagtcgaccatgcatttttccaatttgacgaaaaaatcggggtccaaattgaagtgagaatggcaaccatttgctggactaaaaaagtcccgcgaataaaacactaataaatttttgggaaataaaaaactgcaaaattaaagagacagcccgctcagaatgattggcacaaatgccactattgaccacccgatcccaaaaatcccccacaaattattt

SEQ ID NO: 27620 - DNA, 1142 bp, Heterodera glycines
aatcctcacgcgcacacacacatttgtcataattcatgaggaaaacaaatcacaaccaaacggaaagcattttcatgtatcgatatttatttaaaaaacgaatgctttttaggctggcgaaatgtccattttttattattatcatttaatcatttttatggcaattattcatggccaaatggcagcgccaatagtggccgaaagctacagcagcgccaagcaacagcggacagaattcaattatcaacaaaaattgcaatcaacccaacccaccaacaatgaatgtaaggaaagctaagcattgaaaaatactagctactgtatgctcatttaatagtgccatttttcgtcagatttggcattttttgaaaaaattggtaaaaaaactttcatttttttgtgcgctttttattattttttggaaatttatgctcggtaatatttttcaattttctacttaattttatcagatttggaaaattcaaaaaatattacttaaaaacttgaatatttatttgaaaataaatgcttcataattccgatatttttcaaaatatttccaattttttcctgattttttttgccaccaaaaaatatataattagtttggttaggtcataaataaatagaaggaatagcgttgagtaataacacaaaaattagttgcttaaagccagtctgacgtcatccaaatgcattcccccccccctctctctctctctcttatctgatcactctgatcgcagattctacgccatcattgacgttcattgaacaaatcgggcgaatggaactggttcagtccattgttcaattaatggaaaaaattggcttaggaacgggcgaaaataataaaaaaagtaaaaataaataaatatgaaatctaattttttttaagaaaaacagcgaattgagcgccgaagtgctacaaataaaaatttgaaagaacaacacagggaaatttttggcagaatggtgagacatttgggcgcaaccgtatgggtgccgaagaaatataacacacgttaccaaatccaacaaacatggaatcacccggaagctcttaattagcattattaagctctcaaaaatgacaaagcattgcaggcatgtaaaaaactgtaaattataatatgcaaaaa

SEQ ID NO: 27621 - DNA, 1645 bp, Heterodera glycines
  unsure (1)..(1645): unsure at all n locations
gatgatgccatttccaagggcattggctgggccatttccaatggcatttgctgtgccatttncaagggcaatggcattggctggggcattttggtcggtgttggcttatgtttaattattgtaactttgtcatttcaacgggcatccaaccattaccacgggcatcgatgatgccatttccaagggcattggctgggccatttccaacggcattggcattggctggggcattttggtcggtgttggcttatgtttaattattgtaacattgtcatttcaacgggcatccaaccattaccacgggcatcgatgatgccatttccaagggcattggctgggccatttccaagggcattggctggggcattttggtcggtgttggctgatagtttaattattgtaacattgtcatgtgccatttcaatgggcatcccatcattaccacggacatcgatgatgccatttccaagggcattggctgggccatttccaagggcattggctggggcattttggtcggtgttggctgatagtttaattattgtaacattgtcatgtgccatttcaatgggcatccatcccatcattaccacggacatcgatgatgccatttccaagggcattgactgggccatttccacgggtgaaaattggcaacgcaatcgagaggatgaaaatgatcatgtacaaatcagttagggtcctcatattgtagttcaaatccttaaattttccttttcaattagattcgaaccttatttctaattgtacttaaaatgaaaaagataattgttttttgggtgttattttacagactgctaaattgttgtcgctattccatcggaccaaaccaataaaatccgaaccgaactaaaaaatgattgaatgaatatgtaaagggagtgaaattgagcagaaattttcgaattagtcatcccattttcatttggatttattctgccaaatgatttttctgtgattcactgggaaagcgatggtttggagcttcggttttatttttataatggaaaatgcattccgattaataataaattttagtaaagaattatgaataaaaattattttaattttgaatgaaattacataaaatttcagtacttataggtagggcttacatttttaggctttttcctgagttcccattggtctgaaacacacgaaaaccatgtttttttcgttggttgtcaagcaacttttcgaattatttttccaaaaaacaccttcaagattttttatttattttctagacaaaatttttcattttaaaattttatctgaacactggtttggcttaatttagttgcttctggataaaattttagtattttactccctaagcctaaagcctacctattttattctcgaaaaatttttatttgtcagtgcgcaatgaaaaaaaattgttaatttttatgcctttttccaattttttgtagtttttgtacattttatgtcttttttacctttttctaacgtacatttggcagttcgtacaattgacagtcagtagcagggataggatttatagttgctaaaaactagagaattttgaaattgcctggacctggacttggaaaatgaaccgtgacgggatcccgggaccgggactcccgtttttccggga

SEQ ID NO: 27622 - DNA, 1311 bp, Heterodera glycines
ccttgtttcaggagaggctggtgcccccggacagcccggtcagcctggagcccccggtcagcccggcgcccccggacagcccggcccgaagggaccccctggcgcccctggacagcccggaaacgccggaggcaatggccagcctggtcaacccggacagcctggcaaccccggagagcgcggaatctgccccaaatactgtgccatcgacggaggagtgttcttcgaggacggcacacgaagacgttgaaaaggcacgaacagtccaaatgcaacaggagaagaagcggaagaagaacagtcactcccccgccccgcccctctccccactttccggtgtccttattgttcttattttttgtagtttccccaattcatccaaatttcgtccccaaaaaactgccatttgttccctccttcgatgagaagcgatcagtgatcactatccgaaattgcaaaagatcagcaaataaaaaaggatagcacgaggataaagcttttttgaaaagaaacggacaatttaaatgggaaaagggaaaagccaaagaaagcgaaacaaatttaaaagtaaaattagcaagtgagcgaaaagagttttaagcaaagcttccgacctgagtatttaaactcaattagtggcaaagccttaagtatttagtgctttttacaaaagccctttaaattggccttttttgccaaaatcattaacgtattttcccggcatttcgttaccaccgtaccctccttatggcgagaaattttggcatttttcatttcctatgaatattttttaaatgtttttcatttttatattcaaatagtttttcaaagtttttagctaagactctgtttttaagaaaaagtgaaaacctttaaaatacaaaagaataaaagctattttatattcaaattaaatttctaaaatgccttccattttatggccgttatttaaataattcattgataattattatggcaattgactgctgctccctttttcgctatctttgccatttccatttttacatttatttcactatttttcaattttatttttatttttgtttttcctttttcatttccttccgtttgttcggcctccaaagttcgacggccattaaaatgctaaacaaatggagaaaaaaggcgatgaacttgcaaaaaaaagaaggaaattctcagaagtgatttgacgtggagggcaattggggggggggagaatttattgggcgtgggagggctcaaatttagtggagagaaaaaggggggaaagggggggaaagagagggggaaagagggggggaaaggggg

SEQ ID NO: 27623 - DNA, 2139 bp, Heterodera glycines
tgtacgctatgaaactccaagatgcttgaccgtccccgctttagaaccgtaggagctgcgggaaactaccgcgcaatccctgaggggcccggggtaaagcaattagtccaatgaatattaattaattttaattaagggacaaaagtcaaagtctaattaaaaacaaaaagagaattatgtcaaatcgtcaaaataggcattttgtgatacgtaaaagtcaaattataaatcataaggaaacagattaaattattctaattcaaattttatctatttaaaattacatttattagtgtaaatcggtggtgtgtgccgaagggtacaaatgcactgttggggcgtcggttgaaaaaattggtgatcgaccgtttgcccaatcagtctgtaagtaaaaaatctaacggaaaggtaaaatgaccaaattaattttataaaaaatttggctccaatatttagccttgccgcaatgcgttgtcaacggcggttcattaaaagatgtgagaacgaaaatccgaggcggaccaggggtaattaatgcaataattaaaaaatggatttactacacttatgggtccaatcaatgatcttttcttcattggtttaattttaacattaattggtatcaattggaagcttaaggtctcggaaagtaagacaatatgcattttttaatatatatattttcgtcttaatgagcttatttgttagaatatgattatttaaaagggcaataaatttcaagctttcaatgggtaccaagaatttaagtttttacaaagtaaaaagaaaaatttatggcacaaaaaaatgaggatagtcattgctttgacgcgtaaaagtgcagtaaagcctaaaaactaataaattaagatgattacatataattaacgggcaatttcattttctaagtgcaaccaacatgtgtgtcttcccggaaaaacatgtacgacctttacggaaatttttaaaaacggtcattttccgcttgaacaggtggtcttaacgaatcaatttgttccaatttataatttataaatttttccataaatttcctttagtatcttgctccattttgcttttgatgctgatgagcccaattaatgaatgaaagaggaagacgaaaatggaaggaaggaaaagggcgacggagaataaaatggaagaaaatgacaaaaaaaacaaatacctaataatttcaagcattaaaaaataataaatggaaggatggtaagcctaaagggcaccctccaccaaatttgatgattccggcaatgaaaaggcactttagttttaggcattaatctcggatctaattatattggtcttcctacaaattagcgacagatattttctacggtccattcattaaattttcattttttttttgaaatttgcagtttagagcttgtcaaattcatatgaattcagcataattttgaaaattgagtgtgattttgtatcattgtcaaaaacttgtccaatttggtgattttagccaggcggcgcctaacgagaaggcttcttaagaattcttctgcaaaaaaaaactgtaaaccgaattacaaaccaacattttttataaactaaaattaacgaataaaaagtaactagcgtaacaaaaacacaaaattgaaaaaatgaattaaaaataaacaaaggtcaaaaagacattattaattaattagatgaaattattgccctcttccgttgtttctattttcttcaaagagtggccaaattgatttggaaatcgcttcgattttatcaccaattctcagcaaagaaacgaatttaaaaataagtccaagtttatttttcaactgcttcccatttaacagcacccactctttgatcgttccatgatttataaaattattttgcaccaagtccctatataaattatttactcccgagaaattgtaataaatgtactatttccaaaaatagccgattgctttcaatccaaaaacgtttgtcactaattaccatttcatcggctaatattccatcgcagcagaattcgagtggcatgtgtgggggatgtgggtgatgagctgctgaaatgattgttgacaataaaggacgaagaagcaccacggatttccattggatggaaatgtggccgattttgatacgtca

SEQ ID NO: 27624 - DNA, 458 bp, Heterodera glycines
aatcgcattaaaaattacaaaatttttcccggcggcgcctatcggcacccaaaaccttatttttataaaaagttggctcaaaatcgcaaaaaattggccttttttggtgaaaatctgttaacaaatcagaattaaattacaaaaaatttttccggcggcgcctatcggcaccgccggacccctcccctcgcacttcccaaaagttttttggaaaaatgcgccgcaaaaaattgttaaaaatccaattttttgatcctgaatgcgctaaaattttatgatttgctaatttcctccccaaaattgttaaaatcgttaatgggagacaaaaatataatatttgatacattattgatcgaataaattgtaaaaataactgatttgaagcaattttgcaaaatgtccttattttggacccaaaaatcttattttttggccttgatgttcttattttgaaaaat

SEQ ID NO: 27625 - DNA, 922 bp, Heterodera glycines
aagacttactgtttaaatgaactttaaaatgactcacagagctactgaaagtgtgaatttagtcaaagaaaaattcttccgccaaagttctttttaagagaaaaagaatggtcaccttttccaactcttccgattttcagaaactgaatatttaagtttactcaatgctcaattggttcattggttacttaaaatgaggctttgaaaatgcttgttcgactttgactatctttcccccacccaaaaaggaccgttttattccgccacttccgttgggtgcggccgaacggcgcctgacattgcgccaactgaataagttgattgaattccatttggcacaacaagcggcgcaactgtcaccacgaattcgacacattactgtacaaaacggaatggtaatttgcattaattacaatttctgaatttcctaaaaagtgttgccttcttcaataaggcttctctggtggtccccggagaatttgaaatggagctgactcggctgggcgatgagccgaccacccggtggacccttctgaacatccgaattctcgtggaaagtgccgaagtcggagagggacagcaaatggtccatccgctgcaagtaaagaaagcagcgagaaaatagggcaatttacaacattttaaagatcaatttcctccatcaaatggtgcaggaaaaactcgacacagcaaacgaagtaaattatgggccaatatgtaattaattagacctaattaaagtgggtgtttggatttggcaatgcattcattcattctttcccacagttgttcctttcttttagcccattatggcggcttacattgttttgcattggttctgtcgctctctccatttggacattctttttttgtcaggtcgtgttttttcaatttccataatgtttttttccgttttaggctc

SEQ ID NO: 27626 - DNA, 1077 bp, Heterodera glycines
tttttattgaattctgaaccgttttgagtagattagcctttaaaaaattgaaaattttgaaatcatgtttcccactcccttctcccaggggtattattttgtaaagtctttttttccccaataaacttttcaaaccccatttttcgcaccgtgaatgttatttttattgaattctgaaccgttttgagtagattagactagaaaaaattgaaaattttgaaatcatgtttcccactcccttctcccaggggtattattttgtaaagtctttttttccccaataaacttgtcaaaccccatttttcgcaccgtgaatgttatttttattgaattctgaaccgttttgagtagattagactagaaaaaattgaaaattttgaaatcatgtttcccactcccttctcccaggggtattattttgtaaagtctttttttccccaataaacttttcaaaccccatttttcgcaccgtgaatgttatttttattgaattctgaaccgttttgagtagattagactagaaaaaattgaaaattttgaaatcatgtttcccactcccttctcccaggggtattattttgtaaagtctttttttccccaataaacttttcaaaccccatttttcgcaccgtgaatgttatttttattgaattctgaaccgttttgagtagattagactagaaaaaattgaaaattttgaaatcatgtttcccactcccttctcccaggggtattattttgtaaagtctttttttcaaaataaacttttcaaaccccatttttcgcaccgtgaatgttatttttattgaattctgaaccggtttgagtagattagactagaaaaaattgaaaattttgaaatcatgtttcccactcccttctcccaggggtattattttgtaaagtctttttttccccaataaacttgtcaaaccccatttttcgcaccgtgaatgttatttttattgaattctgaaccgttttgagtagattaaataaaaaaaatatgagtgatcaaactttcactaaaaagcccctttcccagggggattattttggaaacgcttttttttcccc

SEQ ID NO: 27627 - DNA, 733 bp, Heterodera glycines
  unsure (1)..(733): unsure at all n locations
taaggcttttaagggtccgacgggaaanatttcttgacattttaggctatatattaacagattttcaaaaaattaataattttaccaaaaaaactcaattcttaccagtgtatttttactcccgtatttggatcaaaatttacgggagcgggaattcgagatcttccgggagcgggaatcccgtaaaactcccgctcccgtaaaaatcccgttgggcaaaaaagtacgggagtcgggagcgggacccccgtaaactcccgccggactctagttattgtaattagcaaactcgcggcagcgatctcttgttctttttctgatcactttttggcaaatcaattttctgcttacaaatttttattgtattttaggcgtaatgggcgaaaaaagcattttttggggggtgaaatgatcaatttttgggtttttgattcataaaacttataaaattagtcatcctctcgacatcgataggcttcattacgggaaatattgcaaattttaacaaaatcattaatcaaaaatttaaacatttaaaaatgcaattattttccttcaatattttttattttcgacttaaaaatcaacaaaatactttctcatcaatgtcaacaatcactggagtttaattaattaatcaattagcgtttgtttaaacgatttctctcaaattgtggcacagaatttccgtccaaagtgccaatctcttcccggtntgtgtgtcttggtctca

SEQ ID NO: 27628 - DNA, 1471 bp, Heterodera glycines
ggaaaagtgatgctcactaccgtaatgaacaacggtaatttggggtggggggacgaaaataatagaaatcttgttcttaatcaaaaggattcgtcaccgtcgaagagggccccgccggtggctcacgaatccgcttcaaactcgtggacattggccgtatcagtttcagccgggatttgcccgtccacgacgtaaatccgattaaaattagcgtaaattgggatgccaaacggaggcaaccgaacaaatgccaaaggatcaaacgaaaataaaataaatgggaataaaggaactcggaaaagcatttttatttaaaaatctttttggtttggcatgaaaaacccattaaacttaagtatcctcaccaatttaagttggtccgcgaatggactcagttggaccacaaccatttcgaggcccgtctcgacatggaaacggcgagaaaatctttccttttttcccaatcagctgattaattggatttttagctaacccatggaatgcaagaacacacagtgattgtctacacaaaagtgatgtgagaagtgatcaaagcaatcagcagaaaatgttataaattatcaataatcaccgtgacaattatttttattattttaaatacattgcttatttttggaaaaaaaggaatttgctaattggaataaatagaacaaacattaaaaccaatgaagagcgatgcccaactcatccacagcggcccgcgtcgtggcaattcttatgcatggataaaatgattatactccgacaaaactgcttactttagacagtaatatctgaatacgaaacccccaaatccgacacactttccgtacatttccattcgagccctttcggtccaagttagcgcgtgtcctcgttttccaaatcctttatttggccaaatcaaataaaagtaacaaaggccgtgtcaacatcggttgatgatcactctcccccccccttttcaatgaatttgtcgcgttttcggctgattcgttctttgctgctcatccaatttcagtctctccgcccgaaaggtttctttgttcgccttcttttccttccgccgctctctccgttcttctttcaccgcaattttacgaattctccgctcttccgtcgtctcccccttcggtcgaattgcgctaattatagaaatgcaagtgcggacggacggcgccggtggcccgtctctttggtctccgtcaacttccatttcctaaagttgggagcgaattgtccggtgttccatggcggtggtcatttgtccgtcacctccaaattggccatgcccttctctttgggcgtcctcccccttcgcctcccaatgcctttcatcggctccctaatttcagtcggatgattgtaaagctgaatgaatttgaaaagtgggggaatgtcgaatgattggcaaatgctttgtttacggtggaatgcatggagagaatggactcgcaatcccagcggcttc

SEQ ID NO: 27629 - DNA, 1664 bp, Heterodera glycines
aattttaacaaaaatttttcatttaaattgtttttttttggagaaaattgtttgttttaaatttaaaaaaattttagcttccatccagtttttagcttatattttggcatttacaaatccgatccctttaatttacgtttaaatatttaatttaatttttgcacattttaattcatttcatagatatgtcgaaaccaatttcggatgcaaatgatttctatcgcgcaccaaatcaactgcaattaccaaaaagtgaaagtggcttaagtgttgacagttctgaattgaggcaataatttaaaaaattaatagatccggattttcgaattggattgacttaatatcacctaaaaataattatttcgcttttggcacatccaaaaacctattcgcatcaatttcaagtttttataactccatagttttttataacggataatatattaaaaagcatgaaaaagcatttgtccatcaaatttttatgagtttttaattaaaatttgaaaactaacattaaaatctttctccaagaaaaaaaatatataatctttcattactggagataaaagccgaaattaaaagtaaagtttaattcaattttggaaaaattccatattataaacaaatatttggcattttttttcgattttaagcaactaaatcccgtctcgaaattatttaagtcgaactaattttttttttaaatattttttcgtaaatatttagattatgtgagttttttaaaccaattttacattttttaaatattatttttttttaaatataagttttacttttattttgtaaaaaaggattaaaagaccaaaaaacctttttttttctccagcagtgggcgatcatcaccatattcaacaattgatagtgaagctgattttgctcgattagcggacaatatggcaataaaacggaatgccaaagtgaaaaacaaagcaataaaatatgccaaaattaaacaaaattgacagggtgatctaacttttaacaatcaatcgcctattgatgaagattcggcaacaatttgtgaggaaagtggcgaacgaacactgcaacggggttcaatttgttctggtaggatttttcttcaaattaaatcgagatttttaattttaattgattaaacttgctttactgtagcagaaataatttgccttactgtagcgagtagttttataatctcgtgtgccatgtgttttgaatgcttttgacagtaagtgaatttcaaagccaatttatttttggccgtttttcgagaagcatgaaagtgggtcaaataagattaaaataaatttcaaaaatgatttttaatgtcctttgtaatatgtataaaattttcacttttgaccattaaaaattgaatacaattacaattttcataatttttaaattttactatcgaatcagcaactgtcgaagtctaaccgtaacacaattttatttaaaaatatttccttttattcgattttttaactcagagtctgatcaagctaatttaccggcaaaacaacaacgaaatgcacagggtcaagtcgtcgagagaaagggtacagcattatttgcgcgaccattattaatggatgcctttaacgggtacatttaataattaacatggattaataatattaataattaattaaaacatttat

SEQ ID NO: 27630 - DNA, 1076 bp, Heterodera glycines
tggcatgggtttccctcccctgcgccgccccttccgatgctgtccctccctttccgcaaaattattttatgctttgcttgcataagtcttcccgcccggagaaggcgggcgaaaagggacgaaaattggctttgaagccccgaaaagcctttgccgaaaggcggggggggggggcgagggtcgcggaccgggtcccttagattgggctcaatattagcaattccccgctcaaaacgagattagccgctggcccattccctctgccgtgccctcccccccccattttggcattcccctctctcactcattcattcatccgtccaattgttgctgagttagggaaaatcaaaaacccgtcctaaaatgtcgaaattatattacccgccaccaaattggaagccgaaaccgagcaaaaagtcaggtgagtggggaaaagccgaacaaatcgaattgaacggtcgaaatgaccgacgggagagaaaattaagtcaaaaaaaaagaaaaagcattttgcattttcagccggacattcaactgttatggcgaccacacgagcggcaacttgtgagttaattaattggtcatttaaaagtaattaaagaaaaattggaaaatgaaaaaatcaacgattaaaacgacccattctgttctggtttgtacacatccgctgacaaaatgttgatcaaaaacaacagcaaacaaactctcgacaaaaaatgacatgacctttttaattttaaaatattttaatattttattacacaaaaaaacatttcaaataaagttaattttctttcaaaaaaatcattcgaatttgtctgtgtgattttggcacttttttctcattttatcagttaaaatgattgtcattttatcgggacccaattatgcttttccaccaattttccgcttctttgaatttaatcctttctttctttcttccatattaattagaaatgaaatgccgcctcacgcaaaggaaaattggagaaaaatatattaacgagaaggataagcacccctccgttttcgttgcattttctccattgcccccccaattgattcccccccccccc

SEQ ID NO: 27631 - DNA, 930 bp, Heterodera glycines
cccttgaaatttgtttttgagatttacccctcgttcccaagccaaaatggactgatcagatcaccatgaaggaagtgatctgatcaacttggtgttgttaccttttttgatcagcatccaaagttatgcttacctgaatttttttagatttttttaatgctgatccagagaagcaatattttaaaaatgaaatgggacaacacttttgaccacctatattttgatcaaattgtgaatatggtaaaataaatcaaataaatgtttatgtcacaaatgcaaatatggtatcattggaaagcccataaaaaatgctatccaatggtatgctacttatctgttgaaattggaaaatgacaattttatacgcaattatttttttcaaagcatgatgggacaacacttatgaccatgactgtatttgtttatcagattgttgggaccgcaggtggcagggggccagctgaacgatgatggtgatgatgaagaaggagaggaggaagaggggtcggatgatgaatgaggaggggagaagggagggggcggggaattgtttagtttaaaaggaccacccgaactgaaattcggaaaatgtatatgcattatatagagcagggcttattatctattaaattttaattttagctgtgtgtgaaaaacccccaaaaaattatggggcctcgaaaattgagattttgatgctatagggcctatttacaacttttttttcactttcgaatgaaccccataactgattgacttttgcttattttcactaaacaaaattactatacattttttatgtctaaatttttttaaagggttaagttttcttcctttatcaaatttttttgtttttgtgtttgctttgcccggacttccaaaagatagatttaactatctatgccataaattctactcattttccgccaa

SEQ ID NO: 27632 - DNA, 1450 bp, Heterodera glycines
  unsure (1)..(1450): unsure at all n locations
ttccaccagttcaccagaataaataatattaggcaaaggaaaatttttttccttcctctttaaaactgtttaaaaatttttgttgttaatattcagaaaacggttttttttttactgacaatttttttcaagagaaggatatgaacaatcacttataagggttcatgcttggagataaaggaatcggaaaaaaaaattatctcaacaatcagtcgtgaaacagttcaataattcggaagcagtgccatattgggaaaagatgcacaagtagagtaggctcgaaataaagggcaactgccgaagattaccaaaaattcaaatttattggccccgttctgctttgacaggccatatctcgccagggagtggcggtagaccctttgttgatacatttgaaaatgtagagcgcgtctagctcattcgaataacatcaaactggtttgtttttgtcacgaaacaacccgctgatggccacgtcgaagaaaagtcccaaaatttgacatccataaaactccattttttcataggccagcgtgtttaaagcaaacccgaaactgataggaaatttaaattgatcataatagaagtttaatttttatttgtcccatgcattttctgggaaatcttttcgcgaaaagttgaaaaatttcaaaacggcagacaacagatgcatttcaaacaattcaacaatataatataaaatttaggcaaaaatttttgttccttcctctttggaaatggtcttaaattttgcttgtaaatattcagataacaagttttttttactgaaaattttttacacactacaggatgaaacgcaataaataatgtttgtagacaaaagaaattggcgaaaaaaattgcctcaacaatcagtggtgaaactgaaagaaaaaaacttccccaaaaaatcggagcttttccgacggcatcagctgcatttccaacagttcaacagtataaataaatattaggcaaatgaaaaatttttttccttcctctttagaaactgtctaaaaatttttgttgttaatattcagaaaacgtgttttttttactgacaatttttttcaagagaaggatatgaacaatcacttataaggctcatgcttggagataaaggaatcggaaaaaaaaattatctcaacaatcagtcgtgaaacagttcaataattcggaagcagtgccatattgggaaaagatgcacaagtagagtaggctcgaaataaaggcaactgccgaagattaacaaaaattcaaatttattggccccgttctgctttgacaggccatatctcgccagngagtggcggtagaccctttgttgatacatttgacaatgtagagcgcgtctagctcattcgaataacatcaaactggtttgtttttgtcacgaaacaacccgctgatggccacgtcgaagaaaagtccaaaatttgacatccataaa

SEQ ID NO: 27633 - DNA, 1982 bp, Heterodera glycines
gattctgtttaaaatattcaaaattattcccggcaatcaattaatatccgaaagtttagtatgattcttgttgattaaatttatagtgcaacgaataaatttgtttacggaaatttgctcctgtgaaataatttttgaatgttcaaattatgattttttaacattattttgacattcccctcgtgaatgctttctttctgctttcttctcgtccattctctttcttttagcattgcttaacgctcgacgggcatttcatgtaagtgagcgtggcatctaaaaatgcaattaattatcaaaaaataattttaaaaaatatataattaattaacaaagtaattattaaaaaacagtttttttcgaacttctcgctatgcccacgagacccccgcgtggctccaaaaagttaaacgcatcaatggacaagtccacgtggttgggcgggcactccgggcatttgttattgattggaacggtcaaactttagtaattaggataattaattgagacgatcagagacggttggcaagtgtttgtcctacgttttcccattgtaatcaactttgatacaaatgttcttgcaaatcgggtcgtccaacatgtactgtttgtcggctcggcatgcgtctttccactgcccgtccgacttgaacaattggccggagccggcagctgacatttttggctaaaatatgagatgccatcaaaattgtattgtaaataggggctctttttcgaaactatgatttttaagatttaatttaccatcactcatcacttttcttgacttaccactccggcgtctagaccgcacgcgccgcgtccgccggcaccgtagaaagtgaaaatgctgttcttgaccggcttgcccaagtatgaatcaatgggcccggccgttttggtgttcgacagacaccccatgccttaaaagatgaaaccttctgccataatgtttcactttgtcaaattatgattgttacatgatgaagatgatgaagacggtgatgatggtggcttatttgattttgattgatttggttttggttttgattttgaattcgatgcttttgattgcttgccgctactcttggccataacgatttccgagttgaattgaacggccaacaaaataccgaacaaaaagaatacaaccaatttcattttgggttattctgtaaaaatattaaatatttatttaatttataaattttgaaaatgaaatatgcactaaacgtttgttttgcatataataattttcactggcaccttttatactcatccgatgacaacgatttcattaggcttaattgaaaaatttgagcattttcggtcaattctttcacaattttcaactggcgcgacgaaaaattatatcaatttgtgtcatagatatataattcagacaacttcacgcaaccatttgataaggcgagagaacaaacagtcaatgttagtgcatagtctgcgctgcatgactaatgcatcagctctgtttacaacgcgactgccgtctcggtcacatggaaggaatggatttaattaaattctctccttagaggatctttttacgttaggtagtccgttagcgttcgattgctctagtcagtttttcaatatattcgttgaaatatttgtcgtgctatgaagggcgtgggagggggggggggggcgaaggcccaccacgaggccgcgaagaggccgagtgagtaccttcggtgcaggaaaattattaaattttaaaattttttaattgctttttaaatatgccaaaaaatgtaggcttaacttttttagtgaaaattcgatcactcatattttttgctaattgagcagaagcgtaccaaactttgcagggatactccccggtaaaggactaacttccactgaaatgagcgccgagctagctggctcaaaaaaatttttcgaaaatctgagtctttcgtttttaatgatttgcaaatattaattccataaatattttt

SEQ ID NO: 27634 - DNA, 1097 bp, Heterodera glycines
  unsure (1)..(1097): unsure at all n locations
tcgaccctccacgtagaatcattaaagcctacaggaatatacaatcttancactcaggagagagcgatgttattcgatcttatnncaatcaagttaattagcatcagacaccgagtcagagctgccttgagaccaccggaggaggatgattcattcttctgatgtcaccgagcccaatgagcggattgacacctggagaaccgtccttaacttgcggttcggcgactaaccaatgttccagccgattgtgaaaagaatcatactgaagcgaagacaacagaagtgatgttgcggaaagcgactcaaatttcttaaaatctaatttgtatttatttttgtcgataatgtttctctcgttcatctcataatcactattcttttttcatccattttctctgagtcatcaattttttgtttcgtttgtgattatcttttccacgttatttgctcatccccttatcgattataaaatataaaaacctggcccacattcattgtttgcacttgttgatttacattcaagtcagctcggaagttttcaattcaattaaatcgtgtaaatttaaggtaaattgtatttgtgttcatttgaatagagttagagaaaagttcttctctcaatctgtaaaagggacatcaggagccctttcatatagactataatttgccctccgttaggtcataactagagaccgcaaaaaaaaggcgcgaaaaaggcactataataagcaccaaataaatgaaaaaagccatgaaaagtaacgaaaatcccgaaaaaggcatgaaaaaggcaattaaaatttttcatcacaaagaccttcaattacagtttccacactttgacattgaaaggattaattgacgcctaaatgagttttttcgtatgcgtatttgaaggctgactttgttttgccccataagtgctcccttgaaaaggtttgaaaattttaataaagaaattgataattttttcaatatttcaattaaaattaaaaattaagaaaaaacgaatgtgctttaattatagagctatataataagcttagaaaaaatatattaaaaaacatttaaaatgtttcggaaaactaatccgattc

SEQ ID NO: 27635 - DNA, 1084 bp, Heterodera glycines
caaaatttaaaaatgggcgccaagcgcccgtctgaggccgcgaagcggccgaatgttctgaacaaaattaaaaaacgggcgcgaagcgcccgtcctgaggccgcgaagcggccgaaaattcccaacaaattaaaaaacgggcgcgaagcgcccgtttgaccccaacaaaatttaaatcgggtgcgaagcgcccgtccaagtccaacaaaattaagaaacgggcgcgaagcgcccgtctggccccacaaagtctaaaaacgtgcgcgaagcgcccgttctgaggccgcgaagcggccgaatgttccccacaaaattaaaaaacgggcgcgaagcgcccgtcctaaggccacgaagctgccgaaaattcccaaaaaattaaaaaacgggcgcgaagcgcccgtttgaccccaacaaaatttaaatcgggtgcgaagcgcccgtccaagcccaacaaaattttaagaaacggatgcaaaagcgcccgtctgaggccgcgaagctgcaaatgtcgcctttaaaattttgaaaaaacataagcctattaaaattttgaatatggaagccgcgcatgcactagcaacgaagtcctttgcgcgaagcgctcatgtaatgcatattcttttcatctctcacaagtatactgtctacaccgagcaattactgtgcaaagcatactgtctacaccgagcaattactgtgcaaagcatactgtctacaccgagcaactactgcgccacacgctagtttatatatatatagagaaaaagggggactcgtcttcaaaaacaaaatctcccggccaaaggccgggagctccctgacagtagtggcagggtcttacaactttttgaggcgcatctgggaaaaatacgggtttttctctccggtggccaactgagtcccggcggccgatttctcacttttgcttgcgtttgatggccccgaaacttttttcctaaattcgaatcaaaaatgtccgctgcgagggccaccccgcaaaggtcctctacatgttggaattttttattttttaataaagcccccccctgcccgtgagaaaatggaaactgaagcggggtcaaaa

SEQ ID NO: 27636 - DNA, 1521 bp, Heterodera glycines
cataaatgttcatcttttgtgaccaaaaaatgcaaagccaaaagcaactaacggactcttagaatgtgcaaaaatgcgatttttatctgattgcattgtttttaacacaatggttcgattacttttaccgcatgtgtggccgagtggttaaggcgttgcgtttaggtcgcaaagggatatttcctgcgcaggttcgaatcctgccacatgcgtaccacttcagtttttgttaatctatcctacaatttaatttggtgaatatcatataatttagcaatatgatgactacataaaatattcagaaattttttttattatttttatcaatttatcacatcgcagactattctcacgattttctgaaacttaaaagagcaataaaaacgaaaatacatccctaaacctgaaattaaaaaaaaatatatatacccatacgaatgtctgaaaatatcaaatccatgccttttttatattaaaactaaaattggaactgaataagcagaaagggtagaaaaatacgcaataaatatgcatatatcctcaaagaggcattaaaaatagaccgaaaatttcgatttcaaattttacaagattgtaaaagctgattttcttattattttgtattgtcagatatagctttcttctttggcatccaaatctaacaatcttggtatcattcgaaatgctttattagccttaaccaaaagcgaaaagattttcaaacttagaaaactcttattaataaaaaacttcaaaaatttcgactttttgcaattttcatgtataacttttttggtaattgtctaacggcgaatcaatagcttagaaaaagcttctaaacatgttagctttcgaatgatatcaacaatgttggatttggatgacaaagaaaaaagctatagtggaaaaacatgctggcgccgaaacgagcgcgccgaaacgcagtggacccataaatgatacagcatgcaaattttaaaaacttaaaaaaaccgaattttttcaaacttgaaaacacgcatatttttgcaaaaattttgaagtataaaatctatgaaattttatagactattagcgcttatgttttggtaaatttttccctggtggcatctttcatcgtctccgggcctaaatccttaatttacttcaaatatttactcaaaactctaattactaaatggatataaaatttaaatgcttttttaatctaaaaaaaaattttttttttctttttataaaatttcgaaatcaattcgtcctttctcaacagaaatattcttacattaattgattttttctctccatcaactttattttaatatattatattcatattagcttctcttttttttagcaaaatgaatgctgcttcttctcttctgctaattgtgttccttttttatttccaatttgattgtgcccttttgtctttcaaatgccgcggtgttccgactgatcaaatggagccatttcaatacacttcgacccaaatggaggaggccaactgagagtactgcgcaa

SEQ ID NO: 27637 - DNA, 1123 bp, Heterodera glycines
atgatcaggaagacatttccagacagggggttgctccaaggggggtcgaaatgttgttatttttgctccaaaacgacgtttagacccactttttggagttcgaacaaatttcatttgttattttcgctcacagagcacttgtaagacctcaaaagagactttaaatgtttgtacagtgactgggagccctgggttattgaaaataaaaagttcgaacaaaaggtcgaaaagtcgaacattgttcgaactctacaaaaatgatcaggattaggtctaaaatctgaattaaataaaaatgactattaaagtagcgtaataaagtgatttaatacatttaacttaaagtaattttaaaatgcattttttcatttgaaaatatgctttttcatattagaaaattaatatataaaaacgaatataattaaggaattaatatttattataaaatgagaatgatgtttgttgctgatgaaaattttaacaaaactgaaaaaatgagaaaaggcaaatgttcaggagcttaaatatccttaaacaacggtaaagggatagcatataatcaattaattgaaaaatcgaaacagaggcgtccaccatactctctcatcgccacacgcccgcctccgcagtgcttgtggtgaagcaaaggggaaaatttttcaccatttagtcaacaattatcccattcctttcaactcaccctgtggccaagtggttaagctcctcgcttccactctcaacggttcgagtccactaccatgtttttgatttttcacaatttttcggaattttcatcataaagtcaacaattatcccatacctttcaactgcccctgtggccaagtggttaagctcatcgcttccactctcaacggttcgagaccgcgaccatgtttttgattttccacaatttatcggaaaaagtcgcgcagctctcgctcatttaaattaattaattttaatttaaattaatttaaattaattaaattctcgcgcacaagtccatccaataggtttcggttgaagggatcaaagatcatccaataggtatgggggggggggggggggggggggcccaaaaatggatttaaaaaaaacaaaatcaaagtacttgtactttgta

SEQ ID NO: 27638 - DNA, 1441 bp, Heterodera glycines
  unsure (1)..(1441): unsure at all n locations
atttaaccncaaccataggttcaaacattgcaaaaaaaattgttgctaaatcagaagtctgctctaccttcgatgattgtggcgtggtggcatcagttgtcgctgccattggttggctttgtggcagtcgtggaggagcagcagcagaagaggatggagcacaaatcaacggagggggagaagccattgtgggaagaaacgaagtgggcgccgtcatccgttgcggtggagcagcggcagatgggaacatttgcctcgctgccatacgaaaaggcatcggagaaggacgagacgtaccaaaatgcatcattgtaactggcggcgccatccgtggaggcagtggagaagtatgaggtggaccaaaatgcatcatcgagtccggcaaagtcatccgtggaggcagtggagaaccgatggaacgggcgaacattgccggcgatgtaacccgaagtgggtacagcgaaggcggatgtggagaagcaaagtgccgcattggagtcggtgtcgtcgctgttgttattggcatcatcagtggaggaattgcaggccgagggtgcggaggaggaggcggtggcgtgtgtaaaaaggcgacagtacccgacggagagggtggaagaagacacggtggtgaccgaagaaagttgcggttgccttgtggaggaagtgaaggcggatgaaaaggtcgaggaggcggtggtgggggagggggcggcggtggcggagagtgcagaaaagtggcgacattggcgcctggaggaagtgataatggaagcgaaggctgaagggaaggaggaggtggtggcggcggcaattcgctgacagactcggcactctctgcagggggaggcggtggcggcacgggcccgacattctctcttggaggaggcggtggctgcaacccgttgatatgttcggcactctctgtaggaggaggcggtggtgtcatgtgcacgacattccctcttggaggaggcggtggccaacccgttgataagttcggcactctctgcagggggaggtggtggtggcaattcaatgtcggcagttttggcactctcttcaggaggcggtgggggcggcacaggttcgtcgacactgcctcttgaagcagtaggcggttgtggcagcggtggcagtaatgacacgaccgacgaagttttcggcagtgggctagaagcagcagcggaactgtcacaaaaatgcacgtataggcacctcttttcacgctttcaacaacaccttgactgttgtgatgacatcgcacaagtgatggtggcggttgatgtaaacattgccgtcgtcgtcgtcagttcagtcgctgttgttgctgaggttgtggacggtgctgctgccatctcttccggctccaaactttcccattcactaggcgagtacggccgttgcgtattgccatcgttctcaacaacatcaacagaagcaa

SEQ ID NO: 27639 - DNA, 1148 bp, Heterodera glycines
tcatcgaacctggttctttctattctctttcaaatcgccccaaattttttttacagccacgaggccgcgaagcggccgagtgagtaccttgggcgcaggaaaattattaaggaggaggggtcattatttatttatttttgcaaaattaattcataaatttttttcagaaactgctctgaaacgcaccaaaatttatttataagttgaataaggcactctgactcttatattatcaaaaagggagatgaataaatattttaaaaatttctaattcctttttaaacaggccgaaaaagtttaggcttaactttttcagcgggtttaaaaaatctagaaaaattagtaagcatttgtagtgctccgatacgtatctctgcaaaatttggtgagccgctgatcaattacaaattatttatggacgatcttatttccagaaaatctcgcatgaattctcatttttaaattttttatagatttttaaatatttggatatttttttggcttaccaaaacttcatcgaacctggctctttctattctcattcaaatcgctccaaattttttttacagcttaactaggcccaattaagcttatttccagaaaatctcgcatgaattctcatttttaaattttttatagatttttaaatgtttggatttttttttggcttaacaaaacttcatcgaacctggttctttctattctctttcaaatcgccccaaattttttttacagcttaactaggcccaattaagcttatttccagaaaatctcgcatgaattctcatttttaaattttttatagatttttaaatatttggattttttttggcttaccaaaacttcatcgaacctggttctttctattctctttcaaatcgccccaaattttttttacagcttaactaggccctattaagcttatttccagaaaatctcgcatgaattctcatttttaaattttttatagatttttaaatgtttggattttttttggcttaccaaaacttcatcgaacctggttctttctattctctttcaaatcgccccaaattttttttacagcttaactaggcccaattaagcttatttccagaaaatctcgcatgaattctcatttttaaattttttatagatttttaaatgtt

SEQ ID NO: 27640 - DNA, 1239 bp, Heterodera glycines
ttttagtagcataccacttttctaaccttaatgtcagtgtccatgaacagcgcagccgccttctgtcgaatgatgctccttgacacaggctgtttatttttttgtttttcgctgatccattcggccagttcagtgtcgatgtccggacggtgaactgggcgacctgctccgtcgagtcgcattcgtttccccccatttggtgacatgctaaaatttttgatcacaaacaaaaaaaattattaaatacctacatttgttttctcagcttatcttcatgcgcgatccaatctctgatcgttttcctgtacactttgaacttctttgctgctgcatttattgagtttttttgcgcccactcaactgcctccagttttttcatcacatcgttgtttctgtggcgcttcttgtcttttgtcggtgtgccttcattctctttattgttttgcggttcttgttcatcgttttctgagccttctgctatcgttgcgtttccttcctcgtttacgcagttgtggcacacgacctttccgccgaagccttcgttttcaactccaccagaatcgccatagaatgtgtggcacggcaatttgcagacggaacagctgtgggttcctccataaatagctttacaaacgcagcaaaacgattccatattgcttaacttttcattaaaaattccaatttttatgcataccggaagcaagaaaatgatagatttttgtcattttggagtcattttcagaagttctttaacataaatgcaataaaaatgttttttttttgacgcgatgacattttttggcgacatgttcaaaataaatttcaaaaattttccactaaataaatcatcgaaaaataatttccagtctctattagtctaccaatctccaattatctacccccttctgaggaggttgaaaaataatataccatggcatataaaaagagtatatacggtatgtacttggcatccaagtacgaatctgagccctgaaatactcaaaagtttggacttttatttgcatatttttacatatttcggggttttatacatatgtggtacatattttggactttttcatacattttttacatattttgtggatttttacagaaattttcggaaattctcaaaaaaaaatccaaaatttcggcaaatttttcgtacataatttcaaatttttataacatattttgaaaatttttgaaaatttataaaatttcttgtgaaaaataaaa

SEQ ID NO: 27641 - DNA, 1479 bp, Heterodera glycines
actaagaaaatttacggagaaaaaaataaaaagtcaaaacaatataaaaagtttgtaaaaccattctcaaattgtttacttataaatgccaatgaaagttataatggttattcaaaatataaccaaaaataatttaaatacataaaattataattagataaaaaatttaatgttcccgtaatttttttttttattccggctctaatttttagattgttttacttttcgtgacactcctggtacatccttttttggtcataaattttttttaaattaaaggaattatatattttattaattacatagaccaatcaacagggctgcaaaaaatatgcacgaaaagtggccaaaatatgcgcataaatatgcaaataatgtcgtatatgcatcaaatatgcataaaaatcgcaaaatatgcatcaaatatgcacaaaaaatttgaaaattaggggtgcaaattagagtgcagcgggaccgggccgggaattcccggtcctttgaggtcccggtcccggttccggaatttgaaaagctcaggtcccggtcccaatgggcaaccggaaaccgggaaaaacaagcactggtaagaatgggggtctgggtgaaaaattaatgatgaaaattggttacaaggaaaaaattttaaaaaatattaatatattcttttagaaaaaaattgatctgaaaagtaaatctgaatttataataatattcgatcacttagtccaaaagtgattaattaattgtttgaaataattgaacaaaatttgtttgaaatttttattaatttaattttgttttaacttttggattttataaaataaaaatcaaaatttaattatttaatattttcacgtgaaataaattaaaatttgaattttttttaaatttttaaaaattttttgaacttaaaaattcccgggtggtcccggttcccggtcccgaaaaaaaccgaggtcccggcttctcaggtcccggtcccggttttgcccaaaattcccggtcccgctgcactctaggaaaaagacaacgaattggttgaatttaggaaaatgtgagaatcaaacggagaaaaggccaaaccaaagggaattaatcaaaaaaataaattaaataattaggaaattaaaaaataattgatgtaattttccttcgatcgctgctgctgttggccgccctttcacctttttggttattcgatatctgtccgccaaagattgtgccgaccccgccggcgccgttttcaacccgctgccgtgggccggggggagtcgtgccaaactaagtgggttttgaagtgccgacagcgcagtcgctgccgccgcttgaggcgccgttgtcatcgccgcactttaaaaaggagcggaggacggacagaaaaaggtgagttgcacatcggagaagaaaaggcaacaatcggcggatgggaaactgttggaaaatgagcaaaaaataaaattaaaaaatgaaaaaccatcg

SEQ ID NO: 27642 - DNA, 1527 bp, Heterodera glycines
  unsure (1)..(1527): unsure at all n locations
cagcattgggaaaacggcttcattttatttgtgacacaattcgcggggcatttggagttagaacaacgtcccaacaattattctgattacagaagcaatgtcccttttattctcgaatagggtaatcggtgcaggagttttagcggcacatgtcaatcatacgaattgcgttgtagttatacttttaagatgatccaaactgtataccgtttttgatctatcccgcacattcaggaaaaccggtcgcgagggatcccgggtcgagatcccgaccgaatcnccctcccgatcaatcccgaagattttttttcgggatcccgcgggattatcgggatttgctcaaacctattttttttacattttgtgccaagttttgttcaaatgtttatctaatatttataattgatcaattcgattgaagagaaaaaaaagagatgtgaattatatgatttttatagaaatttttcaaaattggaatatcatgcccaaaaaatcagattttcaaaaatgagagcatttaacaacatgccttaaataatttttttacaatttaatcaattaatatcaatttttgtattttcgcctcagatgatcatttttaataattttgagaaacggaatcaaaaaatcagatttttaagatttttttttgctccaaaattttcaaaaactttaggagaacaggggggggggaggtcggcggtgccgataggcgccgccgggaaaattttgaaaatttgaaatttaatttgttaacaaaatttatacaaaaactgtccatattttgtgattttgaactaatttataagaaaataatgggttaatgggtctggtgatgtccgattggcaccgaaggaaaaatgcgtagacaataatttttattctgattattggacagaattcttagaaatcgttgtgccataaaactacctaataagatttagaataatgttttagaaattaaaaaaataattctttttatgaagaaacaaaagtcacaaaacggccaacttttgcgtcaaattttgaaaattttagtggaattttggagacctgtaaaattttttgggatttgtaagggattttttaagaaaaattagcaaatgacaatattttttaatttaaaattcaagatcttaatttaaaaaatggagattttttgaaaaattatgtatgacttcaatcccgcgggattggtaaaatggtcgggagggatcccggttcgggatcccgatgaaatcccgatcccgatcaatcccgatgaatttaaaaaatcgctcgggacggatcccgaggtcgggatcccgaatttaatcccgcgggatcccgatcccgtccggtctctaataggcactaaaataggcaaaaaaaatttttattaacgctttttaggtagcaaaacgcataaaaattaatcaaaaaaattattttgcttatatttcaattgttttaaagtttttttcgttaaaaataatttttttaaacctaaaaatttttatgaagaaaaaataattaatttttggggaa

SEQ ID NO: 27643 - DNA, 1134 bp, Heterodera glycines
  unsure (1)..(1134): unsure at all n locations
gttcggacccaattgtcagactcaacaagatccacgacggactccacgggggcatttatgtggtgggagaaatttttgttcaacaaaacaaaactgacaatcgaaaaaaatttagcacgaaaaaggaaagggactcattgaggagaacgaaatctatgggaacactttggcgggcatttgggtgacgacaggtgaaaaagagtttcggatggaccatccgtttgatttctctatcatttttgaaggttcttctcccattttgcgcaaaaatcgtattcattccggaaaacaagttgacattttacacattttgtttgcaacaacttaaatttgtctttgcaggtcggtgtttacttttacgacaacggacacggccttttggaagagaatgacattttcaaccacctttactccggtgtccaaataaggtacccttttccaaaataacctttcatttctctctttccacataggaccggctccaatccgaaaataacgcgcaacaaaatttggggtggccaaaatggcggtgtcctcgtttacaacagcggaaatggcgttttggaggtcaccggaggaaaaggaagacgtaactttttcgatggatataatattttaggacaatgaaatatttgacaatgcaatggccggggtttggatcaaaacggacagcaacccgacacttcgcaggaacaaggcaagtgttcctcagacacttcaatggtgaattatgaggatttttcgcagatttacgatgggcgggacggcggcgtttgcattttcaacagaggacgcggactgttggaggacaacgatatttaccgaaatgcacaggcgggcgtccttatttcgaccgagtcgagtccgatcctcagaaggaatcggattttcgagggaagggcggcggggattgaaataacgaacggagcgaccgcaactttggagtacaattggctttacatgaaccgatacggaggtgagaatgtgcacaaggagtgtgaaggaaactgggggagggattttcaaaaagtgtcggtttcttgtgtgaattcccctaacctccccccccttccgtccgttaggnctctgnttggctactgacgtacgaccatcacttcgagacaatcgcatttt

SEQ ID NO: 27644 - DNA, 1736 bp, Heterodera glycines
  unsure (1)..(1736): unsure at all n locations
atttgattgatagatttttctgccttttttcccgaccatgccaaaatgagaattggcccactaatttttctcgaattttttgtcaaaaaccaaagctgatataacaaaatcttagtttttctatacaatttagaccagtagaatccgaatatggccttaaatggggacctatcttttcaacctgagcttgtactgctccaactccatgcatgaagttcgagctgtacaggtttgttgcgatcccagagaccaaatctaagaccatattcgaactcaacatacccgatttaccttgtttaattaaattcagaatttccaaaaccacttttaaaacattatgttacttggtggtcttgaaaaatgccgtttttggagaccactttcagtctcggctctccaataattcaatttttgtaattaaaattttatatttttgtgttcttatagtcctaactttgctcaatttaatcactatttctctggctctgtatctcttttatttttctttaaatcagccatcaaaaatacccacctctaaaatgaccattttacttacttaactctaactccctaaatacttttccattggtattgatctcttgccagaataatggcaacatattattgataataatggcgggtattttgaatcatgattgtgttttgttgaaattaaaaaaaatttttaataaaaaaaatttgggtatcaaaaattatgttccaccctaagtatgtccatgaacaattctctcccaacccgtataatacaatttttttgatcaaattattaagattaaaaaaaattaactcactcccaggttacgggcctgaatgccacgaatcttatttaaaaagacaaattttggcattttgaaaaatttgggtttgcttcaggcaaacagtgcaaggcaagaggaggaaaagccggcaccatcagcccatcttccgcttaatccggcacgttccattgaatcggtggcgtcacgcttttgcgccgctccgcaggcactgagcggcagtcgccagtttttggccccgtcctctcccacaacagttgcgcgcagcaacagcaacaaccgaaacagacgcatgtcagtggccggagatcaacaggactcattgcgcaaagagatggcacgggccgcgggcggaggttgacattttgatataatagaccgatgtgaaaagtaatctgatcaggtctgatcagtagtcaataatggacttaagtgtaagttctgatcagtgccggataaaacaatttgccaattggttgggcctaccattatggaaattggtttaggccttcaatctaatcagtgccaaataacaattgattgggccaatagatgttctagccaaataaaacaaggctaatccgtcaagcctgatcagttgtacggttttaaaactctgatcagtagcagccaaagctataaagtattttaagaggactcattacctttttattttttggcatcgttgtaagccattattactaattgtagtaaggggttgaaaaatacgaaaaaatgttgaaaccgtgaaaaacatgcccaatgaaaccaaaagtaggcattggcacgtcgtcgtccaccggtggcacgccccagcgccgcttttccagggcaaccacctcaaattgcggtgccaactcggccaccattgcgctggtgacgcggaaaatgagcgaattggcagccggaacagcggcagaaacaacactanatgaacac

SEQ ID NO: 27645 - DNA, 1749 bp, Heterodera glycines
cgaataaagcattttcctgctccctgacttctttacttgtggagggaaggattatagtccaaccctttagaagggcttgtgccttgcttaatttccgcgagagtttctcggcagcgaggctgatcggctccagggaagtgggatcattaggcaacaaatcggaatcagccccctgtaatgagtcagcggaaatagcggttaaaagagcgcggagctgcttgtcggataatggccaacatgattcagagaaaagagagaaaaaaacgcaaaaaatttgagtaaaaaaggagtaacttgacggtcttatcccttcacagtactaagtccctttagttttgccggtttagctcgaaaaaaggcctggtcagtagagcaccagactcttaatcaaactgtggtaaacacatgaaaaaagagggaacaaatgggacaaaggggcctgagtcagtgggatgctggccataggcaacggaaacgaacaaggccaaagcggcgtcgaagtggctgggcaatggctaggcaaaggcaaaacagtgaccacgggcaggaagagccggtgatcaaaaagggccaaaaaaggggggatgccacgtaatggtcaaaagggtggacaaggcaccaaaaatgagaaatgccccagaagtgatcagggggcaaaatgcggagaacttttaacggaaaagccaaaggagcaaagttttttttttgttttttttaaggcaaaaggcaaaattgaaatggtaaagcaaagtgaaaatggtaaagccaaggtgaaaatgtaaagccaaagtgaaatggtaaagcaaaagagtcaaaaggcaagagcagaatgggaaaagccaagggtgatggcgagtaggtagagcaaagtgcgaagtgtaaccgccagaaaagtgaacattttgtcgagcatccttctttctttttatacggccaaacgggatgggcgggtccacagtgtccgggtgattggtggtaggcgggcaatgctgattggtgggccaagcggtgggtgggcgacattgtccggatgagcaacggacaacagatgggacaacggcgaaagcacagagagccttccaaagcaaaaaatgtcaacaaatttcaaactgcgttgaacaaattgattttcctattttggttttctttcaagtttaagtgtccaaacattgacttaacacagtttcttagctcaaaaattttttcttgtttggtaagaattggacaaaccccaaaatccattagacaaattagcataggccttgcccaaaagggaactaaaaaccaatctgaacaaacctccaatttgtcgtcctttcacgctgactgtctgggcgttcttgctcttccaacatttggagaagatttgcttctttttgatggtgcccactgcaaaaaacacattttttcagttgcatgaccataaaataaattgacacatttaatgcactataaaagtaagcatccaaatcacacattcttggtatcatttgataggccaaagagtgctctattcctctgcaaacattcataaaatttcgttatgtttcaaaaaagttttgctaaaaacgttgacaaatcagttttttgaggttttctgactataactttttgggaacctaacgaaattcttttgaaattttgcagacgaataactctttgggctataaaaacaaggctaagactaataaattggatgcttctaggaaagttatgtacttaaattttcaaattttgtggtcatgtaaa

SEQ ID NO: 27646 - DNA, 1123 bp, Heterodera glycines
ttgcaatgctttccattgcttctccttttcgctttcctctgctgtgctcgatgttgtccgttcgccttcgctttctccactatctaaactttctctttttttaaaagcgttgtattatttcgctttaatttttctatttttctttttgcccccctccctctcgaaggacaatttgtactgttcgtgtgttaagcaactgtcagtcgtgttactgtttgcctctcacgtaaaaaataaacaaatggggacagtacaattggggttttacccctctctcccaccgaccaatgatttccatgcccatcccagtgaaaacgggaaattgtggagtgattgaactgtgcgcgacgttttcgaaagggagaaaacgttgtgtgttgtttttactggtggaaagagctgctgagggatgaattggcaacaaattggaagtggttgttgtccgatcagtggacccctttttcccattttggcgcgtgccaaattctcccaatcgatggaatgccactggtggcgttgagttgctgctgcttccattgtccaattttgtaggattaaaaatctgcactgggctgaatgccaactcttcctcttcttgcgacaaattgtcgtcctcctcctccacgactgaggaggccaaagatgaagagagtccgccggcggaagtggctgagacttcttcgaccgaggacaaattgtgaagggaaggcgacgggaaaaggcgatggtcctttgccattggcctctttaaatggctacgtaatacattaatttaattacccaaaagtgcgacctttttttcggcggtgcccatttgtcggtggaccgaaaccattggaggtcggaaaattgggaaggcgacgggcgcgccgagggaatcggcgggggaaggcgccagcgaaggaccgcgggggaggggaggcgctgaaagtgtccctttccgcgattttggccagggccaaagtgtgaaaatgcactaaacagcaaaggaaagagcggtgaaaggcttttgtaacaaacacaccaataaaaaaggcggaaaatgagctgaagatttgcccaattcgtcgccgcctaatgaaaaaaacatcgcaacggacgaaaaaaacggagcgatcggcgg

SEQ ID NO: 27647 - DNA, 1014 bp, Heterodera glycines
cccccccccccccccaccgactgatccctccgtcagcccccccccccagcacatttatcggctgcttcggcccatcacccaccgccgatgagctctttcctcagtcctaacgatcgattggcggaagcaaaagacacaaacagaaaaaggacaaagggccaaaaggtgcggcgacggaggcggcggcggattgataggcggcgatcgacggataaacggcggaagaacgccgacccacacacaaaacagcagcagccaacaaattcacttcagctgatcactccgaacgccaaaaatggacaacgaagcggccgggacggacggagaagcggtggaggacgaggaagtgatgacggacgcggacttcgaacgcgccatggaacagctgagggaggagggcggcgaggacgtcaacgaattgctcagtgcgttttgccaaaagccaaaacattgccaaattaaacaatggtcgcctttttagtggcaatgagtgaaaatcgcatcatcagttgggaggtgaaacaaaagtcagattgaggggccattgcgaattggccattttttaggaagccgaacacattttgggcaactcgacaaatgaaccggtaaaatcgtcgcttcctcagcagacgcggcccacggagccggacaacgacacggacgtggactggtgcgtacaacggctgatgaacaacgacccgaaactagtggagataaacctgaacaacatgaaagtgcgtgccatggggtggaaagggaccgagtgtttttcgatcactatcgattgattgattatcaaatcatttatcgatcgctgctctattaaactattgattggatcacattaattgatctgctggtcaatctgccgctgattattgcttttcagaggacacccattcccaaaattaaacgtgtgatcgaagcgtgtcgcgacaatgagcatatggagaagctgtcgctcgccaacatgggacggtatgacacggatgtgcaggtggccatttgcattgg

SEQ ID NO: 27648 - DNA, 1072 bp, Heterodera glycines
  unsure (1)..(1072): unsure at all n locations
cattcagtgtaaaatttgttaaacctctcaacattttactcccaaatcctaataaaaatttagttgaatttctccgcctcttatttgtgcaaaattttcgaaaaagtaattttctatttaaaattaaaaaattcagaagcaaattcaagaattttttttatttttaaatgcattttttaccacatgaattatgattaaatttttgcgtttcgaattcattttggaattaagaaaaataaaaattgataatcatttgatcatttttagcgcactttaagcaccgcagttaggcagcgcagttccaaaatttattccatgccacagatattatgggcaggacacgccaagtacctcaaacttgggtaattaaaccgaagaaagaagtgcagtggggaagaatgacgcccaaaatgaaggaaatattcgatgctgtgcgaactctttgtgacccctctctgactctgccaatgcagcagttgaccatttttaccactatttttctctcactcatcgtctgctcgtctctcctttattataagctattttcctaagccaacgcccttttctccctcttttctgttagtcatttctcattggtgttgacgatccaacattcagtgtacaaatttgttaaacctctcaacattttaaatcaaaatcctaataaaaatttagttgaatttctccgcctcttatttgtgcaaaattttcgaaaaagtaattttctatttaaaattaaaaaattcagaagcaaattcaagaattttttttatttttaaatgcattttttaccacatgaattatgattaaatttttgcgtttcgaattcattttggaattaagaaaaataaaaattgataatcatttgatcatttttagcgcactttaagcaccgccgttaggcagcgcagttccaaaatttattccatgccacagatattatgggcaggacacgccaagtacctcaaacttgngtaattaaccgaaagaagaagtgcagtggngaagaatgacgcccaaatgaangaatattcgatgctgtgcgaactctttgtgcccctctctgactctg

SEQ ID NO: 27649 - DNA, 1374 bp, Heterodera glycines
acagcttaactaggccctattaagcttatttccagaaaatctcgcatgaattctcatttttaaattttttatagatttttaaatgtttggatttttttttggcttaccaaaacttcatcgaacctggctctttctattctcattcaaatcgccccaaattttttttacagcttaactatgccatattaagcttatttccagaaaatctcgcatgaattctcatttttaaattttttatagatttttaaatgtttggattttttttggcttaccaaaacttcatcaaacctggctctttctattctcattcaaatcgccccaaattttttttacagcttaactaggccctattaagcttattttcagaaaatctcgcatgaattctcatttttaaattttttatagatttttaaatgtctggatttttttttggcttaccaaaacttcatcgaacctggctctttctattctcattcaaatcgctccaaattttttttacagcttaactaggcctgttaagcttatttccagaaaatctcgcatgaattctcatttttaagtttgagtaccccaaacggacacttgaaaaaatcgatttttttgttttcggggcagtccccccgaaccgatgcgcccagatttatggggagaccgaatccttcgggaatagcttccctatagcctgtactttaattctgcgttggatttttgctccccataatcgtttgagtaccccaaacggacacttgaaaaaatcgattttttcgttttcggggcagtccccccgaaccgatgcgcccagatttatcggggagaccgaatccttcgggaatagcttccctatagcctgtactttaattctgcgttggatttttgctccccataattgtttgagtaccccaaacggacacttgaaaaaatcgatttttttgtttcataaatatttttttcagaaagagctctaaagcgcaccaaattttatttacaacttaattttagcactctgatgctttagtatcaaaaaggaagatggagaaaaaattttttaaaaaatttttccttatattttggttatatcgttttgcttttggtggggtgcttggaacagtggaatcatgcgcacccgtccgatctggcaagttaagcaacgattgctgactagccaaaaggttcggtgccgtgatgaaacgaaccagcactgcttaccccgcggcacccggcacggtcccccgaaggaatggatttaattaaattctctccttcggggatttttttccattaggtcgtccgttagcgttcgattgctctagtcaatttttaaaaatttttgttgaaatatttgtcgtgctctgagggggaggggggggggggggg

SEQ ID NO: 27650 - DNA, 861 bp, Heterodera glycines
cgtgtcccgacatttgcgcctttgtccaaaatcgggttcaaaattaagttttttaaatccctgattattacctaaacatttaaataagcgattgaaggtgaatgtatccggtcatttgatcgtcagtaaattaaaaaaagaataaagaattatgttcctaataaattagaagaccgtgttttcttaattttaatgctgttaggctaccagggcttgaaaaaattcaacttttaatccaattttggacataggcgcaaatgtcgggactgtaaaagtcggggctccgcttttgctcgcaaagggcaccaaaatgaatgggagaccaccccttcgcagtgagagtggccggtgtaaaagaggtggggggaggggtgggtggaaggaaaatttttgaaattgaacagttttttacggggggggggcgtagtgtaccttccccggtgaccccgccccctaccttttacgctcccctccccctcccaaaaaaacaacgaaattttggggaattaggtgcgaaggttgaggcgattcgcaaaacaatgctgaaattgaaaagctaaatttgaaaaaattcaaaatctttcttgacttgccaaaagcatgctgcccccccctccttattttacaaaatgccattaaattaattttttgtccattttttgtcattctctcccgtcccacttaaaaatgtagcgaagaagcgtcagcacatgccaattctgcatcagcaaagccctgtggctcataattggcatcaaactcaatcgatcaattggtgaaagagcatccgacgacgaacggcggaaggagacgaagaaaatcaaggacagacggaccaatttaggctgttatacatacata

SEQ ID NO: 27651 - DNA, 974 bp, Heterodera glycines
  unsure (1)..(974): unsure at all n locations
tcccccattaatagttaaaagtagcgcacaatcagcaaattattcatttaatcactttcatatacagagattattcaattggcagaaaattagattaattctaaaaacacatgttttagtttgtttgaatttcatattatatatganagtcaagaaatgaatttaaaaatttcactgtaaaggagaggattttattttgatttttcaaaaaacattataaaaaagtcattaaaaactctctatgttttgagaattttaactggtaactttgcaaaaacacagttaaaattaaaaaagaattattttaaaactcgtgagtattttttcatattttttttgaacatggacaaattggcggatcatgaagcgtttgttgagcactgatgatgcgggcggatgtgcactttttagtcggacaagacgatgagcaagaggcgagtttttttaatacattttaattgaatttattattttacaatatttcgaaaagtttatcttttaataatttaataattatattttgaattaatttaaagcttctgccagcgcgtaaaccattttgagagttgcgtccgatgtgttcgatgcaatgttccgatatgacgagaagttccccgcttcggtaactcaaagccccgccgatgaaaagggtttgaaatttaaatttcattttaaaataaaaattttagcttcccaaaaagagggaaacagtcccgtggagattccagatgtgtttttgacatatattattaaaaaattcttttggcagacattgcgttggccattggacaatgtaagcagaaaggaatggactgttcggcgaagaattaccgacaaatgcttggccaagcattggtcaaaattcgatttccaatcattaatatggattttttggctgatattggtatgcaattttacttgcgctttacagtaggaatgatcgagaatcgcaatatcaatcgacttgatttttt

SEQ ID NO: 27652 - DNA, 1927 bp, Heterodera glycines
  unsure (1)..(1927): unsure at all n locations
ctcagaatcgaaaatttttaatgcagaaatgcgttttttgagcacctttcttcaaaacaattgagcaaaaaaattaggtaaaacctaaaaatatcatccctaataatcaattaaaaaattttaacaaaatttaaaaattttcgacggcatttgtcggcaccaccggatcaaatttctttatcagatcattccatcacgctgatcttggcgccccaatacactggaaaattaaaaattggaaaaattatgcaaaaattcagcttcttaaaatttaattttttctacttttagaaagaaagtttaaaattttaccaaaaaataaaaaaccccgagacttttctcgagtcgagtctctctagtaaaagctgttcgcatctgtcgggactagggttcggacctcgtgggcgggggtggcttttcgcgggggcgggggtcagagtcgcgggggcggtggcggggcacgatagttccgcccccgcggggacgggggcgggggtttgatttgaattagctccaaaaaatctcacaaaaaaattaatttttatgaatgatctgttggctccacgttcctttagtcgatgtatcgcctcgattcacaattccttttggcataaattacacagattttgtctaaagaatgaccaaatttattgatttatgctaattttttaagaaaaaataggttttttggtggccggtggtgccgataggcgccgccggggaaaatttttcttatgaattttgttagaaattagccaaatttttcagaaatttcattcttttggatgaaaatacgccctaaaatcagaacatttcttagaaataagaacataaagaaaccctgcattaatcagataaaaataaattcaaatgaaaacgccaacgggtgtcgaactcctaacaagaaatactgttagtgttcaagcactaaccactaaacaacaaatatatattgggaattaacagcaaaatttattttatttcataaaaaaatttgtcaaagatggttaaaaattcaaatttgtataaattttttgccttttatcccacgaatatgccattcttagggtgtattttcaccccgtgcccccgcgggggcgaaggtcgcgggggcggggattgctggggtcagagtcgcggggacgggggtggggtccgaacctctcttcctcttcgccttttgttatttcctttctcttcctcttttttcttctattccccacctgtttctctttcttttcctcttctgttcctcttcccctttctcttcctcttctcttctattcccctcctgtttctctttctattcctcttcgtcttctgtgttctcctcctgttcctcttcgccttctcttcctcttcgccttttgttcctcttcctttctcttcctctttttccctctattcccctcctgtttctctttctgttcgtctaggaagagaaggcgaagaggaacagaaagaggaagagaaagagagagaggaggagaaaagggaagaggaacaggagaagaagaggaagagaatgggaaagtgaatgaagaaaatgggaagaggagaagaagagcaagataaagcgaagagaaaaatgctgtacttggctgttcgtccaagtatcattttatatcagggttcggttcgtccttgagcctgacccacctgttcctagatattttttggaaaaagcgcaccgctanaaaaatgaatatgcggtgaagtgaggaaatgaccagaatcaaaaaatatttataaaaattcattccggcgcaaatatataaaatttaatcatttttccttacatacgattanatttttatatgtccttgatttttatggaattttcccttggtcttggaaacggtatacccgtccctgggaaggggttggccggtccgaaccctgcttatagcccttattcattataaaa

SEQ ID NO: 27653 - DNA, 775 bp, Heterodera glycines
  unsure (1)..(775): unsure at all n locations
taaggtcatcacattttaaaggttcaggattttctttaattccaatactttcgagtgtaaagaaatcagaggaattatttcagactgggtacaaaaattgatcagatgattttggggtaattgagtattaggatggggtttgccggccacaattggacccaaaagagtttgtacgaggtgatagccgcttgaaattctttgaacgggggtgggttctaactcgtaataataatcagcacctaacaaaatggcaggacaagtggtgctaatttgatccacaatttcacaggatgaaaaaagctctcgggaaaatggtaaataatgagtgggttgggtaagttggtcaatggcattagcattaacaataatcgagcgcccgtcaatcaattttatgccaaattgggtaagatgggctggtaccatttggcatttgggactgttaaatacaccgagcataagtggattgggaatgagtgggaggtttaattttttggcctcatcagttcgaatatatgtatggttacttgcgtcatcgagaaggataatatattctaacgaattttgaggataatttggatgaaaaattggggccttgacacattttaagagaacagggagatttttcttaggatgatttgttgaaatagtggtatttgttagcgttttctccataccttcaaatgaaaaagtaggaaggggattgtccaattgtaccttttgattgattgngaagttattgagggggtttggattcggcatggaagttgggactgat

SEQ ID NO: 27654 - DNA, 1018 bp, Heterodera glycines
  unsure (1)..(1018): unsure at all n locations
ttaaaaaaaaaatgttcataggtcaatttctgcttcgcccacgtgacttgcaccaggtgcattgaatagggcatatgggaccaggaattggagaaggcctgcgcgctttgtggccgattccgaacttatgcctggtccccgttcgaattctggcacacggatgtggaatgccgcaaggtcgtcgaagacccactggctgccttcaccaagtggttattgaacttcgaaacggtagtcctcggcatggagcccggtgcgaagaagagcagaaaaaggaagaatgccgaaaacaccgacggcgaggctatggaagtagatgaggaagaggatgccgtggatgaggacgccgagaacaactggatgctgggatacgaagaagccggggagaagccggagtcggtgacaacatacgcatacgcccacgccggtaattttgaaattattcaaaaaaacttggaataaataaattttaaaggttcccgctacgaccatgtgctggtttatggtgaaatgctgcgcatgggtgtccgccctgaactcatccgccaaggcaaccatctcctagagatgaaggcgcgcaaaacgggagtctacacacccaccgtgtttcgggacaggtaaaaattcaaactgaataattttttattttgtcctttcagctacaagctgatcccgatcaaattggcaaattttgtcaagacgtttggtctggaaattgagggcgtggaaaacaagaaatattttccacacaaattcaataagggtaaggggttaatttaggaaaataatttanaaaaaaaaactcataaatttcaggcggaaaactacggcacagtcttggaaacctgncaccgatggaggactattaccccagtggactcttcccggcagagcgcgcaaagtttgagcagtggtacgacgagacccgggaaaactggttttgagctcagtgaagtaatcgcggactactgcaagacaggtacaattttttgaagaaaaacatgcaaaaatacaaaaa

SEQ ID NO: 27655 - DNA, 668 bp, Heterodera glycines
aagcgctcatgaatatgacatccatttcgaccagtttataaactcggaccagaattcgaacaaatatatcggaacttcgcatttcaacgaatttcgaatttttcgtctaaaaaaggcttatatgatcttttattacaggaaagatgactttcagtttgttttcatgcatttaagtcgttttcgagacattaacccaaatttctaaaatttaactttcgattctttgttcgaaatcgggtcctgttttaggaattggtcgaaatggatgccatattcgtgatcagcggcccaagtaacccccgacggtgggcacaaacaacttcattcttttgttgattatgtacacaatttcccctccatttttaaggcaaacgggcacaggacttggccgaagaaggaggacttgccgaaatgatggacatttttcgcactaccacggcagccgaacgaacggaggcggcggaacgttgaagggtgaaaataacatttttaaaattttcactgactgatcaaatgaaaaaaaaaggaaattcattttcatatagcaaaacgacggacgaccaacagcagcagcagatggacacggcactgaacaatgatgagagggaattgcggctcacaaacaatcggacggatgtgatttatattcgatcattttccatgtatgg

SEQ ID NO: 27656 - DNA, 1164 bp, Heterodera glycines
  unsure (1)..(1164): unsure at all n locations
tttttgtttttttgtgcacacaacctattgtcagacgcataactatttcccatttttagcttttttacatttcccaaatgccccaccaaaaatgcaaaaattttattgtganaattatgcaaagaaattccggcacataaagaaaagtcgaagaggcgaagaatttgccctttgtatcgtctgcaacgatgatattaatctcctttccattggaaaagctgccatttctcagcatcaaaatactggaaaacaccagaaagcggcaaaagcagcaaaccgatttctcaattcaatcccaaaggacgaattgcagaagctcaacactgaacaaaagtggatgaagctatttgaagccgatttaccgcacttgtacaagttggtcagcattgtactttccgtgccggtctcaaatgcatttgtcgagagagtgttttcgctttgcggctcacaatggactgatgttcgaaattcgttgaaagtcgaaaccgtgaaggctctggtccagacgcaaataaattttgatctcacttgcccagaaatgtatcagatgctcatttccaatcacaaactgttggatcagatcggtggatgggacaaattttgcgggacgggatcccgcgggattaatcccgcaaatcccgcatttaaaatttgcgggatcccgtgcgggattgcgggattttggaaaattcgaaaaaatttcaattaaatcaaaaaatttccaaaaatcaaaaaatgctgaaaataggggctggcgggatgcattaaaaggggctgatgggtcgactaagattttcgattggatccgacggtaaaaagttgatcggaaatcaaattataaaaaaatttctaaatattttaataggctaaattttttaattcttaaccaagtaaaaggtatttcacaaatgtttttagtatattcgcttgaaaaaattattcaattattttatcaaaatcttttgtcatttttcattattttagaacatttttgggaaaaggagtgactatttacacatttaatgcgatttgttaacagattttgtctaaaattgaccaaatgacgcagtttttgactcaatttctacaggattattaagcaaaagcctatccggcggtgccgataggcgccgccgggaaaatttcacaaattttgaatgaaat

SEQ ID NO: 27657 - DNA, 1151 bp, Heterodera glycines
ctaaaaatggaaaataggcactattaacctaaatttatggggtgtaaaatgacaaaattcattcaaagaggtaaaaaaataagtcaaatcagtattgagttaccttattttttaaattcaaaaattgtccaaaaaaaatttttaaagacgatttttgagaaaatttttcatttcttagggtgtttattttcagaaatttgggctcgatttttaggggtgtatatttttaattcccaaaaatcgaattcttaggggagtattttttgtttttattgcattttaattaacaaattttgggcaaaatgccaaaataggcaaaaaaaggctctttcaaaattttttaggctttttaggcgctaaaaataaaagcctagaaaattggcactaataactcgaaaagtagcttaaaaacagcccaaaaaatgtcaattatttttttattatgaatagagaccggaatttttaaagtaccgggaccgggaccgggacttggaaaatggacccgagcgggacccccggtcaaaaaaaagcccgttttaccgggcgtcccgggcccggtccaaaattttgaccgggcgcctattttgattaaaaattcgaaaaaaattttaaatcttattttaacttagaattatatcaagcctgtaaatcaaccttttttgcttttcaaaacacttttttatggcgcattttctcaaaaaagaagttgaagtacaagggggtgggggtcgcggtgccgataggcgccgccgggaaaaatttaaaaaatttgtgtgtgatttgttaataggtttacactaaaaaatgactaaattttgctattttgagcgaactttttcagaaaaaaagcttttgtactaggcgacgctaaggaaaatttttgacttttaatgaaatttattaagaaaatttattaatcttttttggtaaaaaaagttatgaaaatgttattcatttcgtatggattttagggtctttttagcggttgaaatttctccaaactttcaaaaaattcaaagttcattttgaaaattttgaattaaagccatttcgacaaaaataattattaattttttcaaattttgggcagtttcgctggtgaaatttaagcccgtattagcccggtcaaattgaccggtcccgggactgga

SEQ ID NO: 27658 - DNA, 1442 bp, Heterodera glycines
  unsure (1)..(1442): unsure at all n locations
ccatctccccccccccccctctccgattggatgctcacttttctttgctggtctcactttgtactattcagattggactcatttactctgtgcctattaatgcattttgttgtgtcttctttataattattattattagtaattttttagcattttatgatggcaattaaagacattccatttaaaaataaatttttgagattattgcaattgtacgtagcattttgcacaaaacccaaatgattgggtatcaattggaggggtcccccttccccccccctgtcattttgttgtgctattttcctcctttcgcctcccttctccctttgtcaaaatgtctctgatcagttccaaagtgcgctggtcgttcagaatgcccatgtgatcggtgccgttcactctgtgcacttcgaccgttccgtccgccgtttccttcgcccaccgttcgcacacttccaacgaccgtatgtttaccgttccgtcgccgtcgccataacttcaaaaatattagcacgcacgccaattaagcgattactcaccgaatgtacggctgatagtcagggaagaaccaattgtgagcccattggaattggtcgggggtgtccacgccgacgccaaaaatgcaatggaccttaagaggaaggtcactcaaaatgccgctgaaaatggtcgaatttgtgtttgggaattcccttcccctcccaaaaaaaaacagttacgaaatgcctaatttcccgggcccattaaactcgccttcactcccgggggttcgagtaccaacgcctcactggcacttttccactggtcaaacccttgagggtactgaatgtccgcgaagaatttgtccaagttggacaaactgtaattctgcctaaaaagggcactcttttgccgcattccctaattgccaattagcaattaattaattgccttggagtagtcgccaaaatttcgtccgatttccaaagggcggcggacggaaagagaaaagcggagctggtgaaagagcgttgcatggcacggagccgcgaggggggcaaaagaacgcggaaatagtccatgttgtagcccgaaaaggggcaaagtgaccccaattataatttccgcgcatttccaaaagtgtcactgacccgaggcgaacaatttgactatttgggccgacccgccccacgcgccggccaacgaaatgtgagacaacagaaaagtgtccttccaattctgaacaacattcagtttggtccttcctcttctgaccacttttgccccttttctcactttgtccacaattttattgtaaaaaaagttggccattggatttcccatactatgcgccaaaacgatcactttgcggttgccatttgcgtggtaaagttgctcaatcagtgaacgcaatttaacaaaataatgaaggagttcctctaaaataccaanaatattttcgg

SEQ ID NO: 27659 - DNA, 1988 bp, Heterodera glycines
taccatgatttatgctatataaacaaatctataaaacgatacgattgcgacaaaaacttttgcaaatgtttgtatgaaagtgctgaatgttcattaacaaaagtctgtatttattttgtattttaaatagtatattttttagacgttgttatgcttgacagttcatgtttttggtgaacactttaaagaataagaaacttttaaaaatacagagatttatattaatttattataaatgttgtataacaataactattttttatatttattgtctttaattcacttcgggtggcggtttttaagaaacgcccatggtggcggatttaggaaacgcccatgtggcggtttttaggaaacgccctggcggatttaggaaacgcccatggtggcggatttaggaaacgcccatgtggcggtttttaggaaacgccctggcggatttaggaaacgcccatggtggcggtttttaggaaacgactcagcacgtttttaaatacttacattagaataaaaaaatatatattaaaaaaaaattattaataatgagaatatttaatataaaataattaaatattaatgtcccgctattgaagataatttatttacagagattacgctctaatttctgaaaagaatgaattttaattataattaaacaaaatttttgaaaaaataattatctattatgatatttaatcatttttccaatttttaattttatatgatcagatataattaaaagaaaaagcttcatactgatttttgtttgacagaataccaaattatcggacaaattaaaagcattgaaatcattttacaaattaatacaaattatttaatttaatctttgttcaaacgggaaaaggccaatttttatcaaaatttttaaatgatttaagagtacaatcgctaattttttaaaatcttcatttaacttaaatacaaataataaaccaaaaacttgaaaaagaattttttaaacaataacagcacgcgaatgaacgtaaactcactggaacacagcatgagatttaaatataaagaaagcgaaaacataaaataaataaattattttacaattattaaaagtaaatccatgaataaacaccaccaataaatgaataagaaaatcattcattaaatataattagagtcgatcaaaaaaaaaacttagtgtgggcgatccaaaaaaaaactcagtgattgataaattaaataattcaattcacaaaataacgatgccgtccagttaactctaatgtacgtcgggacgcaagtcattttcaattttttgcatcacttctcgccaattttctccatatgtagtagacactgccggacgccattgatatcgttttgtagagctcatcgagctgtacaaataagccgctgataccggcacgctcagcttgggttggccatcgaccgggtcggggggaggctgagtgtcctccggcagatgtgcccgacccatgacgggttacaagtgaattgatcaaaaaccggacccggcctgggagatagcccttgaaaaactgaaaaaaaattgttcgtaaccgggccggtccgggttccggatcaggcacttttggtgccccgaaaagggtgcgatcggcttccggaaaatgaccaatcaatcacaaacacaagaactgacagaatattagaagaaagaaaaaaaaattcttttaaattagcaaaaattaaaatgtgcataatatttaatagaaaataaaattgtttctcctgagatatcaatttaatatgaatttttattgcctgaaaatactaaatgatttttaaacttttaaaaatatttcaaaatctaacatcattttatatataatatttttttaataataagagaaatcactaaaaaataaatttattatcaaactaaaataagccactgattatatgatttgtttcatagattccaatcatgaagtcattaaatatatgtttcgatttgatttaaaattaaaaaa

SEQ ID NO: 27660 - DNA, 899 bp, Heterodera glycines
acatccgtcgcgaggggccgacctggaagccggccacccctttgcgccggtagtcgaacagaagcgcattcgttgtctttaaggtgggcggtggcggcgattgttggcggagggcaatggcatcgcaaaagtcggcggttgccgacgacaacgatcggttgcggaggtgaggcgattgctgatcagcagcggcactcattagcattggcagagaaacttcgaaaccattggcaccatctgaacggacaatcgagtgagtgatcactgatcagcaatcaatgagttcaatttgggattccaccgaccgtttatcggcacactgatttggttgttctcgagtggcgatgtttgttgctgctcgtcggtttgttcgtcaaattcggcgccgtttttggcgccgaaagcagttgaattgaaattattattattcatcagcaatttaaatttatttagtcaatttttgtttttcgttatttttacgggaaaaagcgacggcgaatgaaatgaaagggacggacgaaccggtggcacggctttttcccatcgctttgcgccaaagcggccaaagtcttttttttcgaaaacactgtccgcctccctcccccgccgttttctccgcgtcacagcccaaaggaatggccaaatcggatgaatgttttggcagcacgacaacgccggtgaacaaattaagaaatgcgcaagttaggatgatggtcaagaagaggcgattagggggagagaagcggcggagggaataatcgccaaaaggcatttgtgccaaattcgaaaatggcgacggaaagccgctcatcaacaaaccatttggatggggaagcggatttaaattggcataaatgctggacaaaatttggcacccagaagatcatcggatttgtccg

SEQ ID NO: 27661 - DNA, 1148 bp, Heterodera glycines
  unsure (1)..(1148): unsure at all n locations
ataaaataaataattgtgaaaagtatgtataaaattgctattttttattttccaacttgagccgaatgaattgggcggctcaacaaactgctgagcattggagcctaaaagcaaaaacaattaaattttatgatgaattaaatataatggaaaattaattcttaccggaagaaattggtcaagcaatttattctccaattttgctgccaaatcaccacattggtcaccgccagcaacttcaatgtcgtcaatgatcacaaaattttcaaaatcaatgttaacattttcaattcggaaggcaatctggaaatgatttttgtttgaactttttagaagaagccgagcaataaacgaaaagcccaaataatttaattgcaaaaacgacccgttttacgtagaaaaattgaaaaactttcaacagactcatttaacaaattgtactagtgataaaaatgaataaaaaatacattgaacaataaaatattattataattattttaatctatgggttttttaaatattcgggcccgagaaagggtcccccgctacacaacgggtgttagtgcaattaccgcaaaattcaaaacggtcgattgcaaattgagttgaatttgtgccggagaaagcgaaggaatgatcggatggcaaatgtgcacgtttagtgattccgcttcgattaaacaaacacttagctgaattgcatttgatcatatgtgcttaagctgtgttggttaagctcctacgaaattttgaagcatcgcattccagtacagaaaagttttttaaaaaacaaaattttccaaatttgattctaaattctttaattgtctaaaaaaatgtttgctggaaaatatttattaaaaaattatattttgggcaagggcgcagccagaaccttggcttcaggggggggggggggggctgaagtcaaaaattcgatttttaggagtgtatttttcttttttcatgcgatttttaggggtgtatttttcgcttttttgaaatcccgaattagggggngggggggggtgtattttacaaaatttcgccgtttttcgttaaaaaattagaactttttgccattttggccttcatttttcaaaaatatggtaaactggggggcccgcggcgccgataggtgccgccgg

SEQ ID NO: 27662 - DNA, 1234 bp, Heterodera glycines
aaaagttcgtcaatgtcaccaccatggatgaacgggtagtactcttgcgagttatgtttgtcattctcatgtttcgtgcgcagcgcatatagttcgctttagagtttggtaaaattcctttctataaaataatcagttgaataattaaatgccgacagaaatgttggcgtgagtggtgggcaattcgcagtcgttatcgttgatgtagtggtacaatagcagaatttgcgactgcaaatccgcgatgcccttgtgtttgaacctgtcccattcttcttaacacacaaaaaatcggtggtaaatcttacaaaatgttttccattgtcacttttgagcagttccgtctctttccgatgcttttcctcctcctccttaagctgtttctccatccctttcatcttttccattgcttcttctcgagtgcgttccgttgagcgaagttcgccattaatgcgttcaatttctgtcactttttctgaattcaattcaattttgttcatttccttgggcttttgcccttttcttcgccacctttcatttgtgcttcgatttgcttcagtcccttcaactccctttttacgcttttcaattcgagtttcaaatgtcccttctcttcctcaaatgcaatgatttgctcccttagcttttccacctaaaatcccccaaattattgggtttgttttgctttcttccgcaattacctcttcctttcttccgtccctttcctttttgatcgcttccatttccaaattcatttctcttttttccttttccgccctcctcaaaatttcctctcctttttgtgcctccttttctccctcttttttcatcttttccaactttgcttcgaatgtctccttttcgtccttcattttcatctccaattcgctaatttttccattttcttccttcaatagcatttcagttttgctcatttgacattgggattcctgaatttgttgtaataatttatttgagagattcatgtcacctttttcaactcatcgataacataaaaaagccttgaattttcctgaaaattttcatcattacatatttacacactaattgtcgaaaatacttcttccgcagatttcaaattggcacgaaatttttcgatttgactctcattttgggctaatgatgtttcaagctcatcttttttgctttgcaattccgctaccaattgcgtaagcttttcagattgttcggatagttggactttttgtgaatc

SEQ ID NO: 27663 - DNA, 938 bp, Heterodera glycines
atataatctctccaaatttggcagactttctccatagtaaagggctatcttaacctgaaaaaatgccaacgcttgttgtttttaaaatttttcgaaattctgactgttttcagtacgtatttattttttgcaaaattaattcatcagtattttttcagaaagtgctctgaaacgcaccaaatgttaattaaaagttaaataaggctctctgatgctttttctatcaaaagggagaggaataaatattttaaaactttttaattcctttttaaatttgcgaaagagtttaggcttatattttaaaaagtttcatcgaaactagcgcactaaaatcgatataatctctccaaattttgcaggccttctccattgtaaaggactaacttagcctgaaaaaatgccaacgcttgttgtttttaaaatttttcgaaattctgactttttcattaattatttattattttgcaaaattaattcataaatattttttagaaggtgctctgaaacgcaccaaatgttaattaaaagttaaataaggctctctgatgctttcactatcaaaaaaagagatgaataaaaaatctaaaaatttttaattgctttttaaatttgcgaaaaagtgtagggtaaaattttaaaaatttctttgaaccaagcgcattaaaatccgtatggagggggcgaaaaaaaagaagactctttctttatttgtaaattgatttcctttatccagaaaaaaaaggcaacattttagggggggggggggggaaaaaaaaaaaaaaaaaatttttttttttatatataaaaaaagcggggggggttttgtttttttttaaaaaaaacaacaaccgccccccggggggggggggggggggggggggggggggggggggggggaaaaaaaaaaaaaaaacccccccctctccccccccccccct

SEQ ID NO: 27664 - DNA, 1133 bp, Heterodera glycines
atgaataaaaaatctaaaaatttttaattgctttttaaatttgcgaaaaattttaggcttaactttttttttataaactgatcagaagcgaaccagattttgcgagggcatcaaaaagacaaggaaaagcactgctatgatgctaactccagtaattctgaatttaaaattttttattaatttttaaagcttcactattttatttttttagcaaaattaattcataaatattttttcacaaactgctctgaaacgcaccaaattttatttacaagttattttaggcactcagatgctttcactatcaaaaagggagatgaataaaaatctaaaaatttttaataattgtttgagtaccccaaacggacacttgaaaaaatcgatttttttgttttcggggcagtccccccgaaccgatgcgcccagatttatggggagaccgaatccttcgggaatagcttccctatagcctgtactttaattctgcgttggatttttgctccccataattgtttgagtaccccaaacggacacttgaaaaaatcgatttttttgttttcggggcagtccccccgaaccgatgcgcccagatttatggggagaccgaatccttcgggaatagcttccctatagcctgtactttaattctgcgttggatttttgctccccataattgtttgagtaccccaaacggacacttgaaaaaatcgatttttttgttttcggggcagtccccccgaaccgatgcgcccagatttatggggagaccgaatccttccggaatagcttccctatagcctgtactttaattctgcgttggatttttgctccccataattgtttgagtaccccaaacggacacttgaaaaaatcgatttttttgttttcggggcagtccccccgaaccgatgcgcccagatttatggggagaccgaatccttcgggaatagcttccctatagcctgtactttaattctgcgttggatttttgctccccataattgtttgagtaccccaaacggacacttgaaaaaatcgatttttttgtttcataaatatttttttcagaaagtgctctaaagcgcaccaaattatagttacaacttaattttagcactctgatgctttagtat

SEQ ID NO: 27665 - DNA, 1434 bp, Heterodera glycines
ttttctttcgtccaccttaaactgttgctgatcagtgaccgattgttcactgttttttccatcaaattgtccatcattgtccaaactaattgctccgccattgacttctaaaaaatatacataaattaaattttgaattaaatatttatttattttcaccccaaaattcaaattttctcccattttgccttttctcataatttacctccattttctgctggtgtgaaatcatctttataatttattgaattggtcgaaattgacattttgaatttgatatctctaaaataagcttatattttaaatttcctttaaagaattataataaatgaccgagaataaaaagattaataaaaaataaatgaccattcattccgtcaattttgttttaatttttatgcaattttcggcaaaatgatgacccaaaaagcgggaggagcaaaaatcaaacattcttactgtaaacaattattttttgaattcttatgggagggaagaaaagattcaaagcagaaatagaattggctagacattttaagacaacgggaaaatagagtaaatagagaaaaatgaaggaaaacacataacagtgagagagaagagagaaataaagataatcatgggaagagaaagagactgggaaggagaatggctccctatcatttcttcactgggaaataattttttaaaaactatgcggggaaaagcgcctttcgggcgccattccccccccccggtagtgtacgatgtattattgagctatgaataataaaaccgaaaatggctcggccgcttcgcggcctgggactcaattcttcggcattccaatcacttggaatcactcaatccacctgcattccaatcaccaacaataaatctcgccgattcttctgcataccaatcgctgggactcagttctacgacctttcaatcaccgttactcaatccatcagcactcgaaacacctggactcaatctcaccaattctacataggcaaaacattttaacattctactggcctttttgtttcttgtcatttcttaaacaaccctcggcatttcaatcatcggaactctatctcaccaattctccggcattccagtcactgggaccaacccaccagcattccagtcactgggactcattctcctgcatttcaatcaccgggactcaaccctccagcatttcaatcactgggactcaatcctccggcatttcaatcactgggagtcaaatctacggcatttcaatcactgggagtcaaatctacggcattccgaacactgggactcaattctcctgcatttcaatcaacgggactcaaccctccagcatttcaatcactgggactcaattctccagcatttcgatcactgggactcaatcctccagcattccagtcactgggactcaattctcatgcatttcaatca

SEQ ID NO: 27666 - DNA, 1203 bp, Heterodera glycines
tcatggacggtaaaaaaaaaaaaaagcgacaataaatctttttatggataattatgggaaaaaattggcgttctgtcacatttactttttatctttatttctctcacttttacgtactatctcttcattcttaataatgtaaagaacaacatttacttcgtgacgtttaacttttttcctgcaagttaaatccactccaaattttgcatatcgatagagaaaaaaataaagaatttttcaatcgcttttttaaacaaaacaatcgcttagttcaatagttatagaacaacacataaaaacatatttctttttctctctttttggcgtactattttcatgtctctagcacatgtaaaaatcgaaattcgcaaattctactagttttgattagaagagtacaaaaccactttggaatttagaatcaataaaaaagtgattagtttccgcattttggttgaaaacagcggcctcggacctgagttataacgtaatgaaaatttgaaattcccacaacttttttcatatgagttaaattgcttagcatttgcttagaaaaagattctccttttcaaaatctttttttagataccaaatttgttcatttttgttgggaatgaagcatattatgactgatcaaaataaaaaatacaaaaaaggcatttaccagtgtaagtgcatatactttgtttttgcgtgtgttggcgttttgttttacgccaattattttttggcaatttttttcgttttttaccgtccatgcgccatctccgacaaattttttcgtggaatttcatttcatttcctcatccttttatcggcagtgaaagtgttgggttttcagaaaaattttgaatgctttttttcaccaacattcggcttgggttacaactttctacagcttaatagggtatcgatgaatgccctaaaaacagggcatttgcccagttttttatttttcatgtttttttagagggaggcttaaccagcggcggcgtgcgcgtatagcacagcacccagaaaagttgttggtgttgtcgtgtgttgggcgactctctaccatatcaattaccatactgtatacattttctatgtacataatactgtgtttaccaaaaaactaaaaagcattctcaaacataatgtctaacttggcgtacattcgaatgaaagccaacgactgtccgatgatcggttttgtccgat

SEQ ID NO: 27667 - DNA, 858 bp, Heterodera glycines
cgccctttcgtcgggcagcgcggacccctccccgctcgtcgccctccgcccttttcgccgggcagcgcggaccccctctcttccgcggaccccctctttccactgccgcggacccctccccaccattccgccgtccgggcggcgcggaccccctctcttccacggaccccctctctccgtcggcgcggaccccctttcttccacggaccccctctctccgtcggcgcggaccccctctcctcgacagaccccctctctccgtcgtcgcggaccccctctcttcaaggtacggacccctaccctcctttgccacggaccccgccgctcgagttttggtgcgcgagtctcggggtgcgctagggggcggggcgtcgggactcataaaatttggagtcaatcggacaaggggtgcgcgagttttgctgcgcaagtctcggggtgcgcaagtgggcggggcgtcgggaatgtaccgctcaaaattgtgcctgaagcaaaattcttttgccgttcagcttagggggtggtggaatgacggcccgtaaaatttgaagtcaatcggacaaggggtgcgcgagttttggtgcgcaagtctcggagtgcgcgagggggcggggcgtcgggaaagtaccgctcaaaatggtgctagaagcaaaattcttttgccgttcagcttagggtgtaatggattgacggcctgtgaaatttgaagtcaatcggacaaggggtgcgcgagttttgctgcgcatgggggaggggtgcgcgagtgggcggggcgtcgggaaagtactgctcgaaatggtgcctgaggcgaaattctttcgccgttcagcttaggatgtcgtgttttgcaattcataa

SEQ ID NO: 27668 - DNA, 484 bp, Heterodera glycines
aaaaaaaaaaggtcggggtcccccccccccccgaaaattttttctagatacgcccctgcctcgacattttccaaaaaaatcactgaaaaatccttcaaagattttttcttgcaattcttttattcaagatcattttcttgaaaactataattttggatcacaaacaatatgcaacttgttcaaaattaataattttttgcacattttcaggcagttccggcgcccgtcagtctgtccggctacggcgtcgagttggccatcaaaagcaccgagtacaaagccatcgacgactccaatgatcagaaaactggcggcgacgagccagcacagaatttgcacgggttcaacttcagtcttttacggtaattaaattattttaaatcaatttccgataattttttatatttctttaatacttatgcagtttaagggacagatttcacatacattttcaaaagcttataaatgtgttttagaaattagt

SEQ ID NO: 27669 - DNA, 1259 bp, Heterodera glycines
gctggtgataaaaggttccgtccgctgatggagtcaaaaaatgcgccggaggcaaaggtcgtcgcctaattagacaattaattaattaatggggaaactgacaaagaagttttagtaccgtttaaaaaaaaattatgatttttgaaaaaattaccaaattttggcaacgcttttctgtgagttgtgtgaggaggagggcggtggaggcgaaggaaaagcggcggctgccgaagtgatgaaatggttctgatggtacggtgccaaagtgtagtgcttctcgtcaacggtggcggcggcaccagcggacaaatgcaaattgtcaatggacgacgagcaacagcagcttggggaaaatggtggcaaaatcagaggaaaatggcatagaaatgccggcaaaaatgccatagtaaaagctcgacagcctcgaaagataggataaaaattcgcgagattgggaccagaattggcacaggatccagaaaaatgagccgactcggttggacatagaatcggaaaacggcaaaaaaatttgtgttaggtttcgggtcggcaaaaagaccctgattccgtgccagaaaatgtcaaagaaagcaatagcaaagcgaagacaaaatttaattaatattcattttttataaaaaatatatttaatgaagcagcacttaccgtaattctctcccctccataccgtatccatccattttgtcgttaaaatgcattcactcttctgttaaaaaattgtttttcaccattatattaaagtcacatttaatatatttgcaaatgtaggggcgaaataaatccgaaaaaccagccaaaaatccaaatcccccccccgccccgatgaacatttttttgttcgtggcggcgagatgcgtttttgcctgggaaatgcgtaatttgctgcgttttgtcccatggcgcgcttttcagttacggcatttttagattttttgccggcgtattcgactcaatttccatctttttgcttggcaccttttggactgtcttcccctaaaatcccttgaaattcttaaatttctactcaattggtaaaaatatggccattgttgcaattattacaaataaatagttttattattttcaacaatttcagtctttaaaaagaggctaatttacaattaaattattttaattcccgaaattttaattaagcctttaaattttcatttctttgctaagctcacagagcaatggagaaaaagcagcagccaaaaaggagcagaagcagaaaaagg

SEQ ID NO: 27670 - DNA, 1687 bp, Heterodera glycines
  unsure (1)..(1687): unsure at all n locations
aaatggcattaaaatctacaaaaaatttaacgaatcaggctaataaaaacgaattctccttttattctgtttggccactgtcttgaaaagttttcaccattatttatgtggcgacaaaaccccctcactgagcaactgatcagtgccaagaaactgaccacagtttgtagaaggcgaacagctgtgaccagtcgaacaccccgcgcacccacgaccaatggtcgcgctcgtgcagccgcgcgccagtcgcgttggcgtagcgcacgtactcgcgcagccaaaattctgtgcccgcgctgcctacgctgttcggcaaccgctcaaagtcggccacaagttgttcaacgcgcgcgcgattctcgcgcattcgcaagtccggcgcgcggaccacggcaatttcaacctgcgaaaggggcgacgtttgagcaactgatcagacaaagtgatcacagtcagttgctgatcaaccaaagtgttgtgattaatcatagagaaacaccagagattaattattcgaatggtcttgaatttttaaatttccaaaatgtaaaaaactaacaaaaaaatcagttggaattttaaattaatttttggtttttttaaagtaaaataaattgtttttaaataatttccttaaagcatatttacactgataaaagcaatcaaaatgagcttttctccgatttcacctggtcactcccgtggaacagttcgatctccactccaattttctcaccaaagggtccgaactcagcaaaagcttttcataatccaacccttggcncattgacacaatgccccacagggaaatggccaaataaacgaagaaaatggtgccaacggcgaactttgtgcgccaatccaacagaaaatcgacataaaaattcctaaaaatataaaaaaatatatttaaatttataaatcaatttgagcacctgaaaaactttcccattggccccttttggcgcattgccaaattgaattctgacgcactgagtgcagaagagctactgctcgaaattggggccgaagtgctcgaaaaagactcggagaagccatggtcaggcgatggggaatgttttgacctgaaaaaattggaatttcctaataaattttaattatttttaatttattttttttgaaaccctttttcgtctctttcttcataatccattgctttgctcgatttgtcatttttgctgttgttgttgttattgttaagctccgttttgctggacacactttcatcctcctcaaattcgaatgggtctttcgccagcaaacagcagggcaaacaagcatttccaaaatgggagggagaacaattaattagttaattaattaattaaatagaaaaactaattacgaatcaattaataccgttgttgcatttgcaaacgcgaactgatcaccatcaaagcagcaaaaaaagtgatctaatcgatggggagaaaagaagcattttataaaattgaattgaaaaacatggcatacggtattactacggttattaaattagcaatgttttgttaatacaagtcgggcacctggtagagaaaggtgaacatcatgcaagcggctgtcatcatgcaaaagccacggaccgccaaaatgtcggagtaagtgccagcagcgaaagagacgacatcggtgatggaagtgatgaagatggccacgctggactcac

SEQ ID NO: 27671 - DNA, 1599 bp, Heterodera glycines
  unsure (1)..(1599): unsure at all n locations
tttttattatatccnaatgattacaaaataaatatcaaaaataataanaataagtgtattttattattcattgattatgaatcatttaaacaaaattaattttaaataagtaactgtatttttattcaattgattattagattatttaaaataatcaaaaataattttttatttttcaattgattataatttcaaaataaattaaggaaaaaaagtaattttatttattattcaattaatctttaatgtttagcaagtgatctggcaacattttccatcatattaggcaaatcatttaacaatgatacaattgtattggaagttgaactgcgtgttttttatgtaatttttaattaaattattttaaatgttttttaattaaaaaaaatatttccaaaattttaggacggaaaatggcttgaaaatgaacatcgaaatgcaacaattacattcaaaaacatttctgttttagaactgttttttggcatcaccaatggcaatgatgtgataaagttgaacggtgtgcaaatgtttgaagaatattccaattcggcgccatattgcgacatgaaaaaaatcgaggtgacataattaatgaactaattaattaatttattacatggaatgcatttttttgcttgaatgaaaactggctgaaacgcacaagatcttgtttttataagcttctcttctatgacgcattttcatatgcattttttaaaaatttaatttttggaaattttcttggaaaaataaataaattaactaatttttaccaaaatttacgcaaaaagaaaattatttattttattattttttggtttgcatcgataagagttgccggggaaacttatgaaaatttttatgtttttctatgtgagagattttcagccataaatttggagaaaattagaaaattttcatcataaaacatctaacataaatttacatgttttatggggttttgaaattttacaaatttgttcaaacaaaaaaagttagccactttagaatcatagtttaaaaaaatttattttatacttgtatgatggctttattaatttttctaggtaatgggagatgttattttattagatgaacccgagctgaatgtgccaccaccaaaagtattttatttttttgttggaaattatattattaattttttcatttttttctcatttatttaggaaaaaatggggagcgcaatttccaattttgctctgaagaatgttgtaaattatggccaacaaattattgttattactaaagagcggctcacagaagacgcaaaaattattgtcagattgacacacaattcaccggactgttccaaatgttcgtaagaaaaattaaacattaaaataattaatattctagattttttttttgataattccacgcccaatttttcatgttcaattacgaattgaaaatgaaaaaaaaatttttttaatgttcataagcagggcaaagatttttaaatttttaaaaatcacaaagtttgatatgatgattttcttattcattttgtagttttcaaaattaattgaaaattttcaggaaaataccttagcataagggcttataaaaatgtta

SEQ ID NO: 27672 - DNA, 1109 bp, Heterodera glycines
tttgaaaactatttttaggtccccgattttctgaaatttcttatatattttcgtttgttctttgaaattttttatttccctttttaaaatttacattttaaattcttttttccactttttattatttattaggctaattttacaaaaaattctcgaaattttttataagaaaatttcaagaagaacgtttcatttttttgaaaaatttaatttttaatccatttttaattttcattatttatttgggtatttattttattactggtttttttaatttattagactaaatttgggttttattttttaaatttatattttaatccctttttctccccctttttcagttgggtgtggacggaggcgggccagcagcccgacttggagcagtcctttggcatcggcggcttcggctacccggcaatggtggcggtgaacacgcgcaagctcaaatacagcacaatgaccggtgagagagttaccgtatcagtgcatatggtaaaccgaaaaaaaccgactttttcttgaattttctctaaatttttaaatttgtttttgcggcgatgtttcggcctattccgtgttctcccccccccccacgaaaaacttcaaatttataatttttttaattttcaggaaaaatagcaactcttttttttttactatttttaaaggaaattcttagaaaatgaaaatttaatggctttttaggttttgggttttcctaaaatatttttttaattgaaaatttaaggctcgtttggccagtctggcatttccgagtttctgcgcgacctttcctacggtaagggcaaaacgtcgtctgtgccgggcgcgaatatgccgtcgctggccgacgtgccggcctgggatggccgggatgcggaactgccgccgatggaagacgtggacgacatcgacttgtcggatgtgagcctggacgacgaggaggaggaaatgtcaacgaaggaagcaaagaaaggggtggatgaagaagagaagaaaaagaaaggcaccaagacggaggaggaagtgagtgccaaaaagacgaaaatgccgaagaaaaagagacgcgacgaactttgatcggaggaggcaaatgattgattgat

SEQ ID NO: 27673 - DNA, 978 bp, Heterodera glycines
attcgatcactcatattttttgctaattgagcagaagcgtaccaaactttgcagggatactccccggtaaaggactaacttacactgaaatgagcgccgagctagctggctcaaaaaaattttcgaaaatctgagtctttcgtttttatttattttttgcaaaattaattcttaaatattttttcagaaagggttctgaaacgcaccaaattttatttacatgttagtttaggcactctgatgctttttctatcaaaaagggagatgaataaaatttttaaaaatttttaattcctttttaaacaggccaaaaagtttaggcttaacttttttttcagaaactgatcagaagcgcaccaaactttgcagggatactgaaaggaagagaaataacctattttaaatattatctagtcagttcatttaaataatttttatccaaaaaatttttttttgggttttcggggcagtccccctgaaccgatgcgcccagatttatggggagaccgaatccttccggaatagcttcactatagcctgtactttaattctgcgttggatttttgctccccataattgtttgagtaccccaaacggacacttgaaaaaatcgatttttttgttttcggggcagtccccccgaaccgatgcgcccagatttatggggagaccgaatccttccggaatagcttccctatagcctgtactttaattctgcgttggatttttgctccccataattgtttgagtaccccaaacggacacttgaaaaaatcgatttttttgttttcggggcagtccccccgaaccgatgcgcccagatttatggggagaccgaatccttccggaatagcttccctatagcctgtactttaattctgcgttggatttttgctccctccccataattgtttgagtaccccaaacggacacttgaataaatcgattttttgttttcggggcaacccccccgaaccg

SEQ ID NO: 27674 - DNA, 1381 bp, Heterodera glycines
ttaattaaatccattccttcgggggaccgtgccgggtgccgcggggtaagcagtgctggttcgtttcatcacggcaccgaaccttttggctagtcagcaatcgttgcttaacttgccagatcggacgggtgcgcatgattccactgttccaagcaccccaccaaaagcaaaacgatataaccaaaatataaggaaaaatttttaaaaaaatttttctccatctccctttttgatagaaaaagcatcagagtgcctaaactaacatgtaaataaaatttggtgcgctttagagcactttctgaaaaaatatttatgaaataaaaaaatcgatttattcaagtgtccgtttggggtactcaaacaattatggggagcaaaaatccaacgcagaattaaagtacagactatagggaagctaatcccgaaggattcggtctccccataaatctgggcgcatcggttcggggggactgccccgaaaacaaaaaaatcgatttttcaagtgtccgtttggggtactcaaacaattatggggagcaaaaatccaacgcagaattaaagtacaggctatagggaagctattcccgaaggattcggtctccccataaatctgggcgcatcggttcggggggactgccccgaaaacaaaaaaatcgattttttcaagtgtctgtttggggtactcaaacaattatggggagcaaaaatccaacgcagaattaaagtacaggctatagggaagctattcccgaaggattcggtctccccataaatctgggcgcatcggttcagggggactgccccgaaaacccaaaaaaaaattttttggataaaaattatttaaatgaactgactagataatatttaaaataggttaattcttttcctttcagtatccctgcaaagtttggggcgcttctgataagtttctgaaaaaaaagttaagcctaaactttttggcctgtttaaaaaggaattaaaaatttttaaaaatttattcatctccctttttgatagaaaaagcatcagagtgcctaaactagcatgtaaataaaatttggtgcgtttcagagcattttctgaaaaaaatatttatgaattaattatgcaaaaataaataaaaatttctaaaaatttgatcgtccataaataatttgtaattgatcaggggctcaccaaattttgcagggatacgtatcggaacactacaaatgcttactaattttcctagattttttaaacccggtgaaaattttttgcagacaccaccacttttgcacttaaaaaaatttcaaaaaactttaaaaattcatagaaaatttaaattcataggtactacagcgaaatcaacgcagagacgcctttccttgacctttttagg

SEQ ID NO: 27675 - DNA, 1080 bp, Heterodera glycines
  unsure (1)..(1080): unsure at all n locations
tttgttttcgattgctttgcgncgtcaagangggacttccagctcttaggaatgcttttgccgattacattaaagtaaatttttatcctcaaaagataaataaattttatgccattgacttttttaaaaaacgccattttatcattttaaaataattattttgataagtttctttatgaacatttttaagggctaaatccaggctaattgcaaacccaaattatattaatagcaaagagtttaaccactatctcggtttttatttggaacctaaaattgttttcccattaattttttagaaaaaaggaaaaacgatggtaatggactcggaccgtgacaaaatattggtgtccgaattgatgactttcaaaggcggactggacaaggtgatcagtgactgtttcaactcaaatgagaagtttctgcacgcgctcaaagattccttcgactttttcatcaatacgagggcaaacaaaattgcggaacttattggtcagcgtaaaaagaaagactgaaaaaccgaattttaaaatggaaatttagcaaaatttatggactcgaaattgcgcaccggaaacaaagaatgttcggaggaggaattggacgaggtgatggaccgcgtcattgtccttttccgttttgtgcaaggcaaagacattttcgaggccttttacaaaaaggacttggccaaacggttgctgctgggccgaagtgcgtctgtggacgcggagaaggcgatgctttccaaactcaggacaggtgggtacttttaaaatagttttttatttcagaaaatttgctttttcagagtgcggtgccggccttacacagaaattggagggaatgttcaaagacatggatttgtcccgagacttttgcaagacgttcaaacaagtcgcaattaaatggattttggggatttgtcttttgtttttcagtatctcgaggcaaaccacgctagagatggtgactttggcaaattggaagtgaacgtttgcgtgctgaccatgggcaattgtcagagctatccgaagatggaggtgaacattccgccgccagttgggacctgcagnngcatgc

SEQ ID NO: 27676 - DNA, 925 bp, Heterodera glycines
tgacaaattttttgaaatatttaatcagcgttagctataagcaaaatgatttccgagtgatcagtggccaataataccgatatagataaccagatacaaatttaaaaaaaattgatggatttattgataaaaaaataaaataaaaatcaggctttgacgatgtccattgaaacttagcaatgaaaagatttctgatcaatttatcagaagagatcaaatttcagctgtcagtggtcataaatcagttaaaatatccagatgtctcaccttttgcaaattttgccaagtctctgacagtgcctcgatggtgaaccacgtgtatgggttgggcccaacattgtacgacttgatctgacggtccaactcctgcaactggcggaagtcgtcctcggcgccaaccaacgacttttggaattcggtgtgcgcctcgcgaagggcttaaaatatatatatttttaaaataaataaaaatatataacattttttaaaattaccccgaatttcctccaatgaattgcatcggaccgggtccgtcagatcctcttccgcattctcaaaccacgagttgaaggcggacgctttcttggcgaacgtcagatactgtaatttacaagaggaggtaattatgctattctcggcatttacaagattcaaaatatgccattcttgaattaaaatgtacactgaccaggtcctcaatttgtttgaagtgcgcctgggcctccgtcaatttgcgacgtcgttccagcgaatttgctaataattgctgccagcgttggatgaccgcccggtggcgttgttcaattgcggcggattgttcatgctccgcctccagcaattggtccttcagctcggtcacccgttggatgccttcgtgctgagaaattaaaattttgaaaaataattttagaaataatttaatgaa

SEQ ID NO: 27677 - DNA, 647 bp, Heterodera glycines
gcgcagtagcgctccgtgatttcgggtgcttaaaatgaatatcaaattcatgaatcgatctgtgatccaaacagctcacagtccttttttattgtctgaccatttttgagggactctaaactataagtctgccctaaggcccccaaacctttgctttcatctttcgacccctattacttttatatcagcgtttaacatttattctgttttatatacaaattgtacatacatataatttaaaaggctcattagaacaacacaatggacaaggacaaattatgtcgtatatacagcgatcgtttttcactccgtcttagaggtgttgccactccagtacgagatgttgtcctgcaacagtcccatgatcgtgacggactccgcgcaaatactctcgcccgttgtctgcgcatcggaagtcgcgtcgtcataagcctgtaaaaaaaattcgagcggttaaacttgaaatacaaattttctgttcatcacccgttgggcagtttgacaggcatcggctggtgatttctgcacttcgaattggagaatggcaaagttcagcgccacggtgagacgaatcggatgcattggccggagtttgttcttggcgagttcgaacgcttcttggtacgcttgctttgccttctccgcaa

SEQ ID NO: 27678 - DNA, 1117 bp, Heterodera glycines
taaaaaaattcaaatttcgtctaacttttttgcattttctcccacgaaaatgccattcttaggggtgtatatttaaccccgaccccgatcggggttaagggtcggggttgtcggggtatgaagcgtcggggtttggggtcggggttttccccgaaaatggccaaaaatgtcggggttcgggggcggggtcggggttgcaaccctaacaaaaaccattgaaacatcaaaaaatattattctgtgcagatatgaacgtaaaagtgaattttgaaattttttaattttcgacttttgttcgaattcgggtccggggatcgaaattggtcgaaatggatgtcagattcgtgatcagcaaccccgaaaacctcctaaaaatatttaaaaagaatttttatttttatggtctgtaaagtacataagtaccgaaaaccaggcctggataaggtccaggttgataattgtgcagcaattgttctcgaggaaatcatttaactttgacttcttttaggcaataagtccctttaagtgtcaacatggattcacgacaggttttattaaattttgacacatttcctttgcctttgataacatttcgggattcaatgtcaagacgtaaacttttctcgcgaagtgatgccgtaattgcggccgacgaggacaaaaaatcggaaatgcctcgcagcagagaaatccacgaattccgacggtcgtccgtcgcatcgatttccaaaggttcaaatttaaacaattgattagtcactttgaacgttatcttctgtcacttatggcctctccaatcgtttagactcattttgtgccgattcgaccggcatcgacattctccgttttatcgaggacactttgcacaaaaattcaaaggaccgcgactttttgctggacactgaaagaaagctgagagagcttttggtggacgaacggtgagcggagggaagtggaaaaagcatttttgtccttcatttactattcggtttaggcagtcttttctcgtcttcccgagtctgtcctcttacaaccgaatggtaatgcgttggcattgccttttcagcatttgcaacaaaaggacgcaattaaccaaaagggacacaattgcattgaa

SEQ ID NO: 27679 - DNA, 964 bp, Heterodera glycines
  unsure (1)..(964): unsure at all n locations
tatttcgtttcaaattgaatcattttttttggctttttgaaataaatgtgaaaaatatacgaaaattattttcggttttaattatgctgtacaatgcttttaagccccgccgtgcggcggctccccttttgtgcactattttagtttttaaaattggttccggactttttggctttttgaaataaattgtgaaaaatatacgaaaattattttagcttttaattatgcagtacaatgcttttaagccccgccgtgaggcgggacagttccaaaattttgtaccacattttactgtggaaagtccaagtaccttattggacaactacgtgtcaatgagcacagtcgcctttggccagttgtggaacggaaaaatgggaatatcagatggggtgcgctcttttctaaaaattcctcttttcgtctaaccatccctcccttttgtgcactatttcgtttcaaaattgaatcatttttttttgtcttttgaaataaattgtgaaaaatatacgaaaattattttagcttttaattatgctgtacaatgcttttaagccccgccgtgcggcggctccccttttgtgcactattttagtttttaaaattggttccggactttttggctttttgaaataaattgtgaaaaatatacgaaaattattttagcttttaattatgcagtacaatgcttttaagccccgccgtgaggcgggacagttccaaaattttgtaccacattttactgtggaaagtccaagtaccttattggacaactacgtgtcaatgagcacagtcgcctttggccagttgtggaacggaaaaatgggaatatcagatgaggtgcgctcttttctaaaattccntcttgtcgtctaaccatccctcccttttgtgcactatttcgtttcaaaattgaatcattttttttgtcttttgaaataaatgtgaaaaataacgaaaattattt

SEQ ID NO: 27680 - DNA, 1079 bp, Heterodera glycines
cggtaattttgaataaattattattatatcaagcataaccaacacaaaaggataaaactaagatggattaaagccaataaaattaaaagcagaaaaaagcgattggtggttttctattaaaaataatcgggcaccaaactaaaagaaaatatttgaattaaaacaaaattaaaagaaaattgtttgtataaaagaaaataaatacataaatgaataatcctcgcagtcaaccgcctgtggcgctcgtcagactttttcctccgccctccgtctcgccccactacttgctccgtcttcgcatgctcccttttgcgtaattttgcaattaattattattttattcatccattatttctttggtactgaactgtccatttttcactgggtcacaaaaccgaaaagaaccaaacagaattatacaaaaatatgatgaaactatgatttaattagaagtaaaaaatgaaaaatcatttaaaaaatacgattttttaaagtttttgaaaaaaaattcttttaaggatgaactggacaaaaagcaaaagctccaacactttgtgcatcagcaattaaagaaaattgaagtttcgaagcaactgaatgcccaccattatgaggacattgcgatgaaatcaggccatagtgaagcagtggaagtaaacaatgcaaaaataaaaataaaatatttaataatattttattagtatttaaaaatatttggaacagtgccgaaaatgagtaatttcattctcaatcttggtgtcatgagaactcgtacactttggcctaatctttaggctaggcctaggcttaggctttattttgtaaaatatgagttgacttttgtacgagttgccattaacctctcaatcttaaaaattttaaaatttattttacatttataaagcggaattccattcagttatattagttttccaggcacttattcaagtagcagacaagcattacacaaatttgtacagattaaagcgtaaactgttgctggaccgtgagattgaagtaaaatttgaggctctttaaaaaaactatttaaaaaatatcgtcaatttcgaattaattac

SEQ ID NO: 27681 - DNA, 756 bp, Heterodera glycines
ctctctgcgtctatgcctcgcaaaattttttcatttctttctcttcactcccattgttttcttgcttctctgctttctctggctgtctttctccatctgtatgccctttctttgtcctctaactatctgataaaagctaaagcacacagtctctcagccaccaaacgtatctctgtcgtctctgagtgcgcaacttcaactttttctcttcctacctctcaaaattatacactttctagctccctctccttgtctccctaccctttcttatttctctaaatgttatttgggctctctctaactggtgcgcaacttcctctccattctctctcaaaattatacactctctctccccctctccttatctcctcttctctccgtctctcctctatccccccttctctgctatgccatttcctttttgtgtctgccgttgtgcacaagcccgaagcacatcctaaattgaaatgtgatgaagaggaggatgatttgctgctgatgactgactgatggtaatcaaagggtatgccgcgggctacggtaacgcgcgcaatgagtcacaatgaaactacgaacgcattggcaaattaaatgataatgagacataccaatgtcctaatcacttccttcttgccgaaaatgaaaaaaacacacaaaatggacgcaaaattggcacaaaaacgacggagcccaaaaagtcgcacaaagccccaaacggaaccaatggcattttagtgaaaacattgagaaattgga

SEQ ID NO: 27682 - DNA, 1328 bp, Heterodera glycines
ttatgcactgacggatgtttgattacggatttgtccgggagccgatcgctccttttccccagagaatgaccaatttttcgagagccataaaaagtggccacattaaattactccagacaactagtgttttgttggtactctcttctgccttggtcattcgtcagacctcaaaagtcgtaaattgtacatagccccatccttccggttgttgtgaagaaaatgtgcgcttaaattccctgacgaggtccgcttttccttcttttggtgaaacaatacgcaatgttgccgaacaaggacagctccaatttgccccttaattattaattaagaactcggtgtttttttaaatttatattttctgattacctaaaacactcaaaatgtttgtatttttataactaaatttattatttattggtttattttttttatattaaacgcccaccataattttttgcgtcacattggacgaaaaagccaaaatatttgatggcactttttgtttcaatttgtgcaaaaattttccactggaatccgtcaatgcatacagtatcgctatattttctgtccttgtgccatgcagaaaaattgccaatttttagcaaaagttttcccgcggcggaccgtcgacggatgggaaacggtaggggatacggttcggagaaagaagcagatgaatggtacaacaacacactgaccaactcggcactggtcaacacgccggacgaaactgttttaaaattagctttttattagagaatttcgtcattcaatcaaatctttaaaaaatgaaggaaaagaaagacaaatttaatataaaaaatgtctgtgacgggaatatttcaaaaaaaactaattttcctataaattttggggaggtggtcggatttttaaaaattttaacccggggtggaaggcctcgcaaaatttagaaatatccaaaaaaaataattttgaaaatttgttatatttttggttcccttgaaaattttctatgcaacggtgacgttgcagcagcatatttgtgtgctgcttcgatgtaccaagcgtgtgtccacctcccaccactcccccctcccccgccaccaggaccgccgtgctttgggacagttgaaaagcgttttttctttttctttattgcaatgccatcccaaaatgtttgttaaatgatggtctaccaatgtttgccagacaatctttgtgaataatcggaaaacgaattttgtaaagcgctgggccaagcatttcgcgtcgatgcaccccgaaacattccttgccattttgggcacattgcttatccgcccaacgtagtgcctaatattacatag

SEQ ID NO: 27683 - DNA, 1451 bp, Heterodera glycines
tcactcggacccggcttcttctccccgacggtctctggagtgacttcttcccgtgtggtttggcatgtccatcgcagctgccgtttcgtcgtccatcgccatgcttccatacgtcgaacggagtgagctcagtgacgcgtgagcatgcgaattgccagaggtgcgctgctttgttgctgaattccacggggcacttgttcctaaatgatttgacatttttttgcaaattaattcgaccctcttctcactgatgccgtatccgtggcgcatgccgcgtaaccattggcccttgtacatcccttaacaacagagtcgaaatattgcccaaaaatgtccccgcgtaatacctccatccgcgtaaacttcagtgccgtatctgtacagattcagcacagttagataaaaagcgataaacggaacattacccgtcgtggagtccgctggaccaagtgcccaaataatgtgccaccgaattaatcgcttcccttcgtccgtaccgtcctttgtacccctgggtccactcgccctgaccagtcatgccgattaactttctgttcacctcctcttctcaccttgtacagccatcggcctctctgttccacgcccaatccgtgcctttttccgttttgccattgcccagcaaattgactccccgaaggccatgtgtacacgccggaaaccttcagttctgtgtttttattgtgccaaaaatggtacggcacattaattgcaagcctcgtcatttattttcaaattcattcattcatttcccatcactcgcccagttcaatggttgccaacctttccctctcctttgccaaaacaaccaattgccaatgttccatgtaaaacagtgggctaaaacagacgccaacatgcacccgtttctttaggtacggacgttggacctatgaaaaaataataatttttctttatttttggaatttaaaatgattataaatttttcgataaatttttaaattgtgaaatttaatttttcaattttatctaatttaaatgatgaaaatttatgtttaaataaatttttaaatatttaaacttaattatgtcaaaaatatatttaagtaaaaaaaaaatataaaaccctcaatttaaaaaaaaattttgcattaaaaatacaaaattttcctcagaattctaggggctcaattttccgaaattcggtaatttttcctaaggtagaagaccccctctactgaaataaagccccccccccccctttcaagggttgttaaaaaaaataattaaaattcactgctaggggctctatttcgaaaatacggtagaatttttttccacttttacctcaacattcaccaaattgtacccgtttgtgccaatttgaagtgcctttggctccaccacagaatcaatgaccgctatataagcaaggcaatggcacattggtaaggttggcgatgcttggcgaa

SEQ ID NO: 27684 - DNA, 535 bp, Heterodera glycines
tcatcttgtttattttttaaaaaacaatctttatcttaacctttagaatgtatcacttacttattttaatgccagatcagacttatgaaaattcaatttacctagatatccttaaaatattttttttattgatgctagccatttttaatagtaaaaaaattcagtatctgtcgtattgtccactgtccaattgtccggttctgtccaaatgacttcattgtccaaatgtccactgtcgaaatgtccactgtccagatgtccactgtccaaatgtccgggagccatgctaggtcatttcgtaaaatccgccaccttgggcgtttcgtaaaatcctccatttttgcaatttttcgcaaaacacggtataacgttgcttaagctcaaccaaattttagatttatgttaccattcgatagccaagctttttctctcttagctggaaaatttcaaacaaaattatcaaatttaaactaagttatggctgaaatagttcttattttcatacaacttttttaaagttgaccaaattttttaa

SEQ ID NO: 27685 - DNA, 825 bp, Heterodera glycines
cagggatgggctttcgcttccgcgttttgctttcgcatatttcgcttttttggcacgttcgctttcgcgtttcgcaatttggcgcgaaacgcgacttttacacccttaaggattggattaaattcccctaaaatttttcaaaattttacctataaaatggctaatttcagtgaaaacttgtttataaatgatcaaaatttccaatttttcctccggcggcgcctatcggcaccgccgcgccccaaaactattatttttccttagaaaaatgatacaaaaatcgcaaaaattgatcatttttaagtgaaaatctagcaacaaattttattaaattttcaaaaattttaccggcgccgcctgccccaaaatatgttaatatatacgttatattgacaaggagtttcgttgctaaaaccattttctcccggccgaaggccgggagcgccctgaaagtagtggaagggtcttacaactttttgaggagcatccgggaaaactatagagaaaaattcagcgcggacgactgagtcccagggacggatttctcattttttcgtgcgtttgacggcccataactttttttctgaaactcagatcaaaaaattcccgctgtgagggcactccgcagaagtgtcctctataatccagtatttttaattttttgatcagaccaaatcccggacctgtacagacacggagactcagttaatttttttttcccacttcagtaccaggtgaataccacgtccagggtttgacctgagcgcagggtggccagcagacttattgtagagtttattgagctcgatttttcaaatttaaaat

SEQ ID NO: 27686 - DNA, 1561 bp, Heterodera glycines
ttttcatgtaacatgtaacaaatttagaagcgggcgcgatcaccgaggccacgaagtgttcttatgagccccacaaatttagaaatgggcgcgaagcgcccataaattacttcaacttttcactatgataataaatgttatatgttaagagaagaaattcatgaaagcactgaaacatagccaactgtgcaccctagttactatatacgttatattgacaaggagtttcgtttgcaaaaacaaaatctcccggccgaaggccgggagcgccctgaaagtagtggaagggtcttacaactttttgaggcgcatctgggaaaactatagaaaaaaattcagcgcggacgactgagtcccggggaccgatttctcactttttcttgcagtttttcttctacgaaattttttctttggaccgggatcgcttagttcttgctggtaggattttaagtcagactatccccgacaactttgccagcaaaacctaagccctacgttgggcgcccaaggctgtagccttggctaattttttttacccaaaagtgtacacttcagtaccaggcgaataactcgccaggggttgctttgaccgaaaaattgtttctgagcaaaaatgtttagtatttgaaaggctatccaaccaagttttaaaatttcgaaatttttgaaaaattttcaagctaggcctaaaaaacggttttttggtttttgaattttaggaatttttaacgaatttttcaggaaaaacggagaccacttccaaaacatcattttttgagctctatcgactggtaatttttttggaaaaatttcgatttttttccggaaatagaaaaaatttttggcctgagcgggacatttgagtcccgggcccataactcgtcaggggttggttttagccaaaaatggccttagagcaaaattatagagctttttaagctctatcgaacggtgtacttcattttcgaaaattttcaaaaattttcgagctaggccccctagaaattttcaaaaattttttttgggttgaaaaagagggtgaaaaaattttttctggggtaaattagggtcctgagcacaaatatgatgtttattttaagtttcagattttttggaattttttaaaaattcgaaaatatttttaatttttttggtccttggaaatttgggttaaaatttgaaaattcataactcaatggaggactggtcaatttaagtgaattaaagccttaaaaatagagaaaaatcaggagaattttatgggatttatttggaatttctatcttcaaatgaaaaaaagttattccagaatttctggaaaaatccgaattttcagaaaaaaattcagaactcgcttctgaaaagtcattctgtaaaagtaaaatactacaaaaatccgcaattttttgctctattatataaattttattttacatttttatccctttttaaaaaaaagttataaaaataaaagtgattttgggattcgggaccaaagggggtggacaggatttttgagtgaaaaattttttcgacaaaaattcttccaaaaacccatgtc

SEQ ID NO: 27687 - DNA, 1278 bp, Heterodera glycines
aacaacagcaatggcgctactttcaccagaggacgtcgcaacaatgccaacgcagaaggtcgtcttcaacgccccgttcgacaacaaggtcacctactacatgcgggtgcgtttggcgtggtgcgcgtggcatgcggaataacgcccccccgcccccttttcaggtgattaaccctgggacgaagcgcatcggctacgccttcaagaccaccaaaccgaagcgcatcaacatgaacccgccgaattttgtaggaagggggggggggggcgggggtggtaaaatttggcgtctgtttggtcggagggttagctcgcgtagaactcggtctgctcactccttgtaaattcaggtcaaaatgagttttagacaaaagtggtccttcctataagtctaccagtcacacatttcgtttggaattcgaatgttagccgcccaaatttggagataaactgaaattcagagtgtgcccttccttctgtttcaattcctgagataacactggtacaaagatgacgagatgagcttgcaaaattcacaaaaaaggaatgctcggcccaaaggagtccgccaacgtggccatctcctgcgtcgccttcgaccccggcagcgaggacaccaagggcgaccgtgtgaccgtggagtggaccaacacgccggacccagccgccaccgcgttcaagctcgagtggttccagtgagacgggatggtgcgccgcaagaacttgccgatcgagtacaacgtctgatggaaggatgcttcgtcacctcaacatggacatgataggatcccatcccaccgtcccaaaattgtcattttgtcccccatcatgtaaattgttgtatctgtatgtaaatttctgtgatcatcacttcaaaggaatgtatatttaattgttgcctatgtaattgtattgttgttgtgcttaataaatgctcatctgtgcttcaattcaaatgcttttgtaggaagggggggggcgggggtggtacaatttggcgtctgtttgtcggagggttagctcgtgtagaactcggtctgctcactccttgtaattcaggtcaaaatgagttttagacaaaagtggtccttcctataagtctaccagtcacacatttcgtttggaattcgaatgttagccgcccaaatttggagataaactgaaattcagagtgtgcccttccttctgtttcaattcctgagataacactggtacaaagaatccttcctttgaaaaagtcattgcttgccttttaattggaaaaattggcctttttta

SEQ ID NO: 27688 - DNA, 1336 bp, Heterodera glycines
tagagtagagcgggaccgggccgggaattcccggtcatccgaggtcccggttcccggtcccgggttttgaaaagctcaggtcccggtcccggtagggcaaccgggaaccgggaaaaacaagcactggtaagaatgggggtctgagtgaaaaattagtgaagaaaattggagttaaaggaaaaaatttagaaataataattaaatatattcataaagtagcaagaccaactgtgcaaatggcctagtggctagtctccttcactttcccttcttctttcccctggttcgatccctctacagaaattaaaatatttttaaatttctttttatatatactcatggctttcctatcgacaaaatatgattattaattttttttaattgtattttatcatttttaaagaaaatccgtacaaattgagcctagtaatcccaaaaccagccttttttgttgaaaatctgttaacaaatctcactcaaattttcaaaatttcccccggcggcgcctatcggcaccgccggtccccctttcttccgctaagttttttggaaaaagcgcgccgaaaaaatttatgtgaaacgtaaatctgaatttctaataatattcgatcacttagtccaaaaatgattaattgtttgaaagaaatgaagaaaatttgatttgaaaattttcattaatttattagctttaacttttgggttttattaaataaaaaactaaataaaaatttaattatttaatattttcacttgaaataaattaaaatttgatttttttttaattttttaaattttttgaatttttttgaatttttaaaaattcccggttggtcccggttcccggtcccgaagaaaaatcgaggtcccggtcccggcttctcaggtcccggtcccggttttgcccaaaattcccggtcccgctctactctaattattacttctaatttggcattcttttgggcttacgcttgtatttgaattacataaataaataaatttttggtttttagccttttgttacatacaaacaatgggacaagtactgacgatgcgaaagaatttaaaactcccataactttaacagttcaaaaaaacaaaacaagcgccaatcagtccctccctccgctacgatcagtctctccctttcccttcgctaatcactgtccgctgtctctccctctgtccacggctttcgtttcgatggttatcccgtgcatatctctgatttcacttcgcaacacttcgttgatcattttgtgttggttgacgcgggacactccgctgaattgaggcgactccacccgcacgtgaaacattgcgccgcaaccgccttaaa

SEQ ID NO: 27689 - DNA, 1068 bp, Heterodera glycines
  unsure (1)..(1068): unsure at all n locations
ttgatcgaataaattgtaaaaataaaagatttgaagcaattttgcaaaatgttctgattttcgaccccaaaatctgattttttggacccgatgttctgattttgaaaatttttcgatccgaaccctgggctataatgcccgcgtggctgccatggtatttactaaattattgcctctctgattattaatatggttaagcattgcaactattccccaactaataaatactaatgaaacaaggcataacatgggattcggaccctgaaaaaaccagcatgggaacagtgattgcagtcttttgtcgttcattacaatttggaaaattctattttgacgaatatttttagaaataataaatttgaccgttcaatgtgtcccccgccaaactttgcaatacatcgctccgaaagattcattaggccgttaattgatttaattgacgttttgtccttagtaagccgtttctttaaggtatctaaaatttattacaagaaacgcaattaaataaattaataatgctaataaaaccataaatttcaaaaactaaaaattgatttcctatccaagttttattaaactacacgataaaaagaatataatttttttttaattttctgtctattttttctgaaaaaaacttttttttaatttcttaaaacgggtctaggcctcgaaaaattcctgcataccccatcttattgggttttggcaattgagtgccacacagctgagcccaaggccgccagcgaatggcattgttgaatgtgccgcctttgtgtaacgccgaaggcattcaatgcaaatgggcatgggtttctttanaaatttgaaaatggccaaattttcggtgtaaagaaattcgagatttataaatactcgtttacgtaattataatttttttttaagaaaatttcaccttctgttctatcgttatcaggtttatcagttttacatgatggatcttcacaaaaacagagctgatcaattttaatgtcatcaaagcatatattgcatgccatttttgggcaatcttcctcatttgaagtgtcttaattagtgagtcaatta

SEQ ID NO: 27690 - DNA, 661 bp, Heterodera glycines
cagataagcacgagaatcgcgttttccgcttggtttggggtgtctataatgacttttataatgcctattttttgcctatttcgggctttttgtgcttaatacgcctattttcaagattttcaaaaaaatgcttaataaaaatcaataaaagcgaaaaatacggcggtacgacaatgcggatcggcaattgcggaccggacaattgcggacgacaattgcggatcggcaattgcggaccggacaattgcggacgacaattgcggatcggcaattgcggacgacaattgcggaccgtacaattgcggacgacaattgcggaccgtacagttgcggacgagaattgctgaaaaaattaactggaaggatgggcctcgtcagtacgatcccttccgtattacaaattaaaaaaactaagtgtttcggcccttccatagacacaccaaacaagaaagctcacagcaataaataaataactaacaaataagaagcatactaatatggtctaaatactttgatcgatcggttcatcactctgatcgaatattgataccattcatttaattgctgcatcattttctctatacttttttgcacttgggcgaatcgaagattcgtcccccgtgtgttgtgaacttcatattttcgtaatctatctggtgca

SEQ ID NO: 27691 - DNA, 775 bp, Heterodera glycines
catcctctgccgtatccgccaccgcaaccgccgccgcatcctccgccgcatccgcatggggcaggcgcttgaggcggaggcccttcgcatccgagcgtcagtttgatggcaccgccaccgcttggtggaggagcaccgcaccctccgccgcatccgcaaccgcatccactaccgcatccgcatggagcaggcgcttgaggcggaggcccttcacatccgagagtcagtttgatcgcaccgccaccgcttggcggaggggcaccacatcctccgccgtatccgccaccgcaaccgccgccgcatcctccgccgcatccgcatggggcaggcgcttgaggcggaggcccttcgcatccgagcgtcagtttgatggcaccgccaccgcttggtggaggagcaccgcaccctccgccgcatccgccgcctcctcctcctccgcatccgcgtcggtttcgaaaggcgttcggtgcaacgctaaacatgcaaggctttcaattagccaatttaaaacgataataagtaatatttacttaaatgtcgtgaggaatgcttgtgccattgtggcgccgagcagcaaaagcgcaacacaccgagcagttgagccaatcatttttaagagcagagagagaagagaaacagctaaacgaaaaaggaactgatcagtgagtgatcaggtgatcacccacctgatgagtatgaatgaagaagcaagcggagaggaagaagctttgattgaaattgccagcagggcttgactgattaccgactgatgccg

SEQ ID NO: 27692 - DNA, 916 bp, Heterodera glycines
cgctttatgtccgagtcggaagcaagcgaatggagtcgcgggtacaaccagcaggagcagcggcacttctcgtcagcctcgtcatttgcaagcagttgaaactttggcgcaccgatggacgcggcgccggcggcgccattccgcgggtacgcgtcgacaacagaaacagataaggcaagttcatccgtgccgcccagcagcagctccagcaataaacactgtcattacccacgtgccaaagccaaaggattcccacggatatttcggtatggtgttctgttgcggccgcgaaaaaactgcatgcaattgtagattgtcgaattagcggctttttgggccctggaaataacgttttccgcatttacattgaggaaattttaaaaaaatttaattaaaataatttaacgatggaatttgcaaattaagcctcatctgttttagggcatactttagtttatggatttatccaaattattataaaaggaaaacgaaatgtttttactaagttaaaatatttttttattaagctttaattgttcatgttaagccacagattcgtcttctgctggtcgtttgcaaaaaggcggcgccaaaatcgatttggcgaaaagcgcactattaacaatggcacgggcaacggcaccgatgcaaaattgcgcaaatcatgaaaagatttgttggagagttttgagggacaacaaaacatttgagcaaatcgaattggaaattttgaagaaatattctgtttctgtcaattttgaattcagtaaaattctttcgtttgggaatcaaaagtttcttgtccgaattcactacaaaatcagtcggatcatggccctaaacccggcgtgggttggatcgcttgtctctctgtcccggttcgggctctccttggcattatctgagatttgattta

SEQ ID NO: 27693 - DNA, 932 bp, Heterodera glycines
ctataggggaagctattccggaaggattcggtctccccataaatctgggcgcatcggttcggggggactgccccgaaaacaaaaaaatcgattttttcaagtgtccgtttggggtactcaaacaattatggggagcaaaaatccaacgcagaattaaagtacaggctatagggaagctattccggaaggattcggtctccccataaatctgggcgcatcggttcggggggactgccccgaaaacaaaaaaatcgattttttcaagtgtccgtttggggtactcaaacaattatggggagcaaaaatccaacgcagaattaaagtacaggctatagggaagctattcccgaaggattcggtctccccataaatctgggcgcatcggttcggggggactgccccgaaaacaaaaaaatcgattttttcaagtgtccgtttggggtactcaaacaattatggggagcaaaaatccaacgcagaattaaagtacaggctatagggaagctattcccgaaggattcggtctccccataaatctgggcgcatcggttcggggggactgccccgaaaacaaaaaaatcgattttttcaagtgtccgtttggggtactcaaacaattatggggagcaaaaatccaacgcagaattaaagtacaggctatagggaagctattcccgaaggattcggtctccccataaatctgggcgcatcggttcggggggactgccccgaaaacaaaaaaatcgattttttcaagtgtccgtttggggtactcaaacatttatggggagcaaaaatccaacgcagaataaagtacagactatagggaagctattcccgaaggattcggtctccccataaatctgggcgcatcggttcagggggactgccccgaaacccaaaaaaaaaaatttttttggataaaattattt

SEQ ID NO: 27694 - DNA, 1258 bp, Heterodera glycines
acacattggaggagggcaaagtggatcgggacgaccattgttggagacggacaccgtcaaataactgaagaaaggggcaattaattagggaaattagggaatggggtgggggggggcaacggactggccaatgaacaaattgaacagggcgaaaacgaagccggacagaacggccaaggacaagtcgcagctgtacagaagcaattcgcccaacggaaaaagtgccgccatcggagcaaaagaagagaaaccaacgaccgatcaatgggcaaacagagacaaacaattaatcagttattaaatgatcgacccttaccaatcacggggagagggtggcagcagccgaagtaattaattaattaattattaattgataccctcgccgagaagagccattaatggagatgaccgattgaagcacagaattcagagagtgagggaagagatggccaaattggaaattgatcagccaaagtccaatgagtggcagacgaaataaatcaccactcaatggacggtttgttgaattgcgcaacgcaatgaattttgactttggtttcgaatttgtttttttttgatgtgagaataatccgattttgagaagtgacacaatttcaaacaaatggaagcaccgacagaaagaacaaaagtggcaaattcagtgaacaaaataatcaaaataaatgtgaaatgtgcgacatttattaaaattaaattttaaaacttacggaataaaaatttaatgcaaaaatgcgattttcaaactcaaaatatgtaaatccatgcaaacattaaaaaatattcgcataattcaactgcaacagcatcgaatatttatttagcatatttattttttattgtttgtttttttatctttttaaattttgtcgtcccaaaatgaaacgcttttcgttggcattgtccgtgcgcgttcttttctgccaatgtttgcgctttttgtgctttcgatcagtgaaaccattcttttctcgtcaacatttgacaatgcctttggctgaacaaattgttcaaattaatttaaataattatctttttatttttccattttttcattttccaatttttctgttcattatttggcccatttttgtccaaatttcccttaatttggcccatttttgtgcattttgtcacctttctctgttcgtcgtccatttgccatctttcgttattttctccgaccattgtcattcccacttttctgctacccattttcttttttccttgattttcttct

SEQ ID NO: 27695 - DNA, 1175 bp, Heterodera glycines
gctggttcctctgcttcttcaaagggcttcatttgcaaagagttcggccccaatttcaccttcttcgggaccactagaaccagaagacatttttcacagcaattcaaaaatattttcagtaatagttatgaatggcatggtcactcttttttgggccggtcgagaaacggagttatttattattgataagaaaaccattcatgagaactccaaaaatgcagtgcaataaactaaaatgccttcttaaaccccgctaaattaagatattttataaaccagtaatttataaaaatatattttttaattaaaaattcttatttcacaaataataaaataaaaaaacaagattaattattagaaattatttgtttttaatgaaaaatttgatttgttagtgtactgtcgaaaagtccttcactgtcgaaaagtccgctgtcgaaaagtccttctgtcgaaaagtccttctgtcgaaaggtccgctgtcgaaaagtcctagcgccatccaaaccacaggagaccgatgaaccccggaaaataattattcctaggaaaagacttgaagagcaaactcctgatcctgaatcaaattttgatagactaaattctttaactacattattactgacattctctcccttatttgcactatataatgtcaaaaagtctgcatcgggaattttggtattcatcctatcaaaatgattttaacgccaaccaatggtcttggatgatcaacagagttaggattccgttttacggactagcccatctgatcaaaaagcctaattgttgatcaatcatctatttctaattttgccgtacaacggtgccgagcattgcgcccagcatcaccgagaccagcgtggcactaaccattgtttttttgcgcaaccattccataacggcggcaccagcggtgcccgggccaagtcccgcgggcggcacagccattttatggggcggatgagaagcggcggaacgcggcatgcaaaagatcggtattgtagagaaaattattcaaaatacttcggctaaacaaatgtctattttaatatggagataatcaccgtaaaaatgtgtgctgttaaatctaaatgtgtcaatttttgcgggaaaaaatgccgcgtgatatttccgcattaattaaaaattcaaattaaaattaaattattttt

SEQ ID NO: 27696 - DNA, 839 bp, Heterodera glycines
  unsure (1)..(839): unsure at all n locations
aaaatctcctaacaaagcacacccaaaactcacaaagttttccccggcggcgcctaacggcacagccggcccccctgnttcccgaaaattttttggaaaaagcgcgcccgaaaaaaaacggtttttgaaaagcaaaaaaaaggtcatcggcagccgaccccccttcgcaaaaaatttttccgacccacccccccctttttaatgtatgtgccaaatgttgttttattcaaaattttagcattgcctggcccccgccgcttcaatccgtcgtgcgtattcaatggttgaagacaaattgtgcagcacgcgaattttagccgaaattggaaggtgacaatggcgatgaacagcggagatcatcgactcgatcagttcaggagactccttaaaagaaaaccaaaaaggcggaattaaaaaatctttaatcaaaaaggattctttgactttacgatactactggataatttgatttaatttttttcagatcttaccgtaaatggtccaatttttatctcgttaaattttagcatgtccataacattctttattctttgggtccgctacttttttgtgcctttttctccggccaaattcacctgcaaaaatgcgccataacgcccttttttggcgatcagctgagggcagcccaagttcaggtcaacaccgtcgcactttccctccaccaaacggcacgcactcagcaaagtttgcggatcattggcacaaaattggacaatcagtggcctacagtttgcaaatggagggtaaaggcaattttagagaaatggaaggtgggaagcagggtaagtcccagggggggggggggggggtacgcgcgt

SEQ ID NO: 27697 - DNA, 1513 bp, Heterodera glycines
tgctcaggtccagcctctcccacctgggcctccgttgcctagtaaagccaaaaagcggaaaagcaataaagttgatgaagataccgaaagaaaaagaagcagaattgactctcgaaagagggacttactggcagaggcagcctctgcccctttgccggacgactttgaactctcacaacaacccgggacctcggctcaagtcgagcctctcccacctggacccccgttgcttagcagaaccataaagcggaaaaccaacaaagctgaataaaaatataccgaaagaaaaagaagcagaattggttctcgaaagagattatcttcaccaagtgttaccaaaaatctgccaaaaaggcaaaagaactcgggtagcgatgcactctccgaagagcagcgtcgtcagtttgcagaggatcaacatcttttcagcattccaaattcgcaacttaccaatgagcaaaagagaagacggcttcagttcgtatttaatagaaaccccgccaagtacggtgttcagggtgacaccattttgaacagcgcaggaaacccaataaccgacagcagtgtcgcccaagcattagactatattatcgaacgcagagagggacgaattcctcaattcagacagccaccaggaacaaaattcattcgagatcgaatcaaccgagaacttattttgcgaacatggacggctccaccagtaccaccaagaggacccaaacggaaattgatacaaacagaccaagcgccagaattaaagcaaaaatcacaaaaactcagaggaatgagacaggcgagattcagggagcaagaaggattgatgcttccgtttccaacgaggggagtcaagcggaagtcgacggtcctgccaacagtagaaacggaaatcccaaccaaaagccagcgtctcaggccacaaaaatggaaaaatcaatagaaaatgtgttagaacgcctctacaatgacccaaaatcccctgctgcgttcgccggtgttgacagactgtggctggaagccaaaaaagaattaggaaataaaattcgtaaaaatgatgtaaaacattacttggagggacatcgcacctacactttgatgcgcccaaggcgcgtaaattttctgcgcgctcgaacgactgcagccggttttatgaccgattgtcaggtggatttggctgactttcaatcactttctcgacacaacagcggcaatcgttatttaatggtggtaatcgatgtcctttctaaacggattttcgtaacacctcttcgtaccaagaaatccgatgacatggtagaaggctttaaacgagtgttttcaactatgccaatgaaaccacacagaattttctccgacaagggtacagaattcagaaatcagcagctgaaaaaactttttgatgaagaggaagttgagaaatatgagagcacacattctgagaagaaagcagcattagccgagcgcgcaatacgacaaataagaaatcgggtgtatcgctactttgcacaaacaaaaa

SEQ ID NO: 27698 - DNA, 1207 bp, Heterodera glycines
taacttttgatgctgatcagaaaatcttttataccaacttgatcaaatcattccttcatggtgattagaaagtcaaaaagggcttgaaatcgggataattttagaattcctaggggctggaaaaatttttctggaaattttggatagggctgccagaaagagcacaaaattctctatcgaatttccttttgaatggtagggctacgacttgtatataaaaaattatacttgggttgaaaattggacaaaaagcggattgaaattaatttgtggtggcccatgtactggggtaaataaataatatacataaacaaaaaataatcagctaaaattccagtcgaaattttaattgtacaaatcttacatcttaatcaagacttttttccaccattgtagttattaggacaaataccatggacactaaatgccatgggacgcttaattaggacaaaccatggacactaaatgccatgggacgcttaaagtgtcttgggacgcgtaaatgccatgggacgcgtaaagttccgattaaagtaaactttagttcataacttattgtctccactttttcgaatggaaaaaaagtggggagagaaaagaaagacacgaatgtattggtgggatgtttatattccaatgcaggggtcatcaatgatgcacggaataggcactggacatatgaacggagagagggagttggagctcagaagggtgtgggtgataatgtgggtggcatggcgtcatcattctttcagataaaaattagatattggagtaatacttgcttctgcaaattcgttaatttttaagctacaagtaaactacctatacataaaaaaaaataaatttgatgaaaataaaattcttaaagattggagtacactaaaaaaagttgagattcaaaccctgctaaacattattatgcaccatgaccgaaaaaagaaattatacaccgcactgtgcataaccggagctctatttttcaatgccctcaggggggggcgggtctctaattgtaaggcaataatgggggggggggcttaattttacaaatcccttcttttaaaaattcgagatcaacttaaaataataatttgcattaatgatgccttttcattagtttcattttcacgtatgtacattcatggtcataagttataataaataaccgtctttgccggagtaatttccataataaagtgaattt

SEQ ID NO: 27699 - DNA, 1448 bp, Heterodera glycines
  unsure (1)..(1448): unsure at all n locations
aatcgctgggaaaagcattcttttatacgttaacctgcaaaanagcgtccgaaattggtgctgaccattctattccctaaaaaaagtctcacacggaagcaatagtaggaacgcaagtagtacttttgccagtcttaaaaatacagcgcactgattcgtgcgatttatcagttttaaaatatgttggaagtcaatattgatgggttccgcgggttctaaattggccaggttgctgttttgaaaaactggcacatgaactccaacaataaaaatttcaatattcgtgaataattaaccctcgcatagaagtcaacatcacttttcttgcaaagcttcatgagcaataatttaaattgcttgtgattatattcaaacgctggaaaagcattctttatacgttaaacctgcaaaaagcgtcgaaattggttgctgaccattctattccctaagaaaagtctcacacggaagcaatagtaggaacgcaagtagtacttttgacagtcttaaaaatacagcgcactgattcgtgcgatttatctgttttaaaatatgtttgaagtcaatattgatgggttccgcgggttctaaattggccaggttgctgttttgaaaaactggctcatgaactccaacaataaaaatttcaatattcgtgaataattaaccctcgcatagaagtcaacatcacttttcttgcaaagcttcataggcaataatttaaattgcttgtgattatattcaatcgctggaaaagcattctttatacgttaaacctgcaataagcgtccgaaattggttgctgaccattctattccctaagaaaagtctcacacggaagcaatagtaggaacgcaagtagtacttttgacagtcttaaaaatacagcgcactgattcgtgagatttatcagttttaaaatatgtttgaagtcaatattgatgggttccgcgggttctaaattggccaggttgctgtttgaaaaactgattttgagtgtccccgaagtccatatcaaatgaaatcgaaatggacagctaatacagatcgaaactgaataaaacaaatgatattgtttgaattttgccccatttatgctgtatccgcagcattctaatttccatattttgtgcataaagtaaattgccctattcctcgacccaatcccgtcataaacttgatccgtctgttcatcccaatctcaagccaatcctgtccctctcatttatcgtgccgtttctattcccattcaccctttgttgcatatgccatccctttctctccttattcctgagataatgccgccatacccctcatcctatccaaaagacctacccatttgtgccagtatataagtcccactcaatttcccccctcgggggcttgcgacattgtctgcgctgaatcagtctgagccatttcttgactttggcaacccttctccaaataac

SEQ ID NO: 27700 - DNA, 945 bp, Heterodera glycines
ttggaatataaaaattgttccgaattgaacccggaccgggttataggaactagcccatttttcttaccactgatcaggttgtatttttccagtatttcccggttaaggacaaaaaccaattgaaaaccctgacaaactctccgttccaaaccctgtctctaagaattattgagaaaaaccttttgattgaataaagccaatggagaacagtaataaaagcacaaataatagcatttttaattgcatatagagtttatttattttatctgaatatttatttttaatggaaaataaatttaaaatttatttataaataattaaaataaatggtgagcataatttagccaacaaatatttgccataaaacggaaggaaatcgcagtcgaaaaacagaaataataaataatataataataacaaaataataataataataatatccaataaatgttatggaatgattttcacatgaataactcataaaatggaaaagaattttaaatttattagttgaggcaaccgaaatcaaaaataagcgagaaacggaaattcaattatttttttcgctacgaatcccgaatttatcatttttcattgcgagcacttccctaattgataattaagtttttgcaactcttttgtttatcttttctaaaattatgagttagtcgacttctgccaagcgtttttctgtccaaatgatcccttcccaaaatggtttcagctttgttcgttcacatcaagcacggatttgtttgtctcattcaccaattcctcaattcgatgctcttcaacaacggataaactaaaaaatgtaaaaattatatttaattatatttaaataagtgattcaagtctttctttaatttacattttgtttaacgcaatgtatgcaaaaaattcgcacataattcctgccccaattgcgctgatggctggttcatg

SEQ ID NO: 27701 - DNA, 963 bp, Heterodera glycines
tgttaatcatgtctactgtaaaatgcactattttcttgagaaatacaatacttttttagacaccgaaaatgaagatgtccatacatatatcagcaggtataagccgtaaagacttttgagatcattttgtacttattacattgggcctgctcaaaatttcccagaactcctaggaattttttttcaaaatttttcaattttcaatgtaattagtagggatgatatttttaggtgctaaaaactggcaaaataggtaggttttaggttctaaaaaacccgcaaaataggtgctaaaaatgggaaaataggtgacaaaaagttccgaatttaggggtctaaaatcgaaaattttcttttaaaagcaaaaatattttgtcaagtcattaaggatatacataattttcaaaatcaaaaactatcgacaagaaaataaaataaataaattttggagataaatttttgagaaatttttcatttcttaggggcgcatttttgaaaattttctggtcgattcttagggatgtattttttgaaaaaaatttttgggtcggttcttaggggtgtatttttcttttttattgcatttttgttaacaaattttgggcaaaacaccaaaataggtgaaaataagtttttaaaattttttttaggttttttaggtgctaaaaataaaaacctagaaaataggtgctaataactcgaaaagtagcttaacaacagccaaaaaaaaacatgtttttcgtgcatttcaggctacggggagctcaggaaaaaataggtaaaaacctaaaaatatcatccctagttataatttctcaaaatttcttcaaattcgctaatgtaacttaaaacatggccaactactttattagaaatcattttagaagataaaaacatgataaatctaaaatttactcatttttacgaaaaatcaacccgaaaagcgaaattttcgtttttttg

SEQ ID NO: 27702 - DNA, 1024 bp, Heterodera glycines
tttgtatggtacaaaatttctcgcaaaaaagagatagccatttttctggcatagagaataaatttaaaaattccctgtagaatagaatggccattgctctccgcgcccctctgcccatgctgggaacatttgtatggtacaaaatttctcgcaaaaaagagatagccatttttctggcatagagaataaatttaaaaattccctgtagaatagaatggccattgctctccgcgcccctctgcccatgctgggaacatttgtatggtacaaaatttctcgcaaaaaagagatagccatttttctggcatagagaataaatttaaaaattccctgtagaatagaatggccattgctctccgcgcccctctgcccatgctgggaacatttgtatggtacaaaatttctcgcaaaaaagagatagccatttttctggcatagagaataaatttaaaaattccctgtagaatagaatggccattgctctccgcgcccctctgcccatgctgggaacatttgtatggtacaaaatttctcgcaaaaaagagatagccatttttctggcatagagaataaatttaaaaattccctgtagaatagaatggccattgctctccgcgcccctctgcccatgctgggaacatttgtatggtacaaaatttctcgcaaaaaagagatagccatttttctggcatagagaataaatttaaaaattccctgtagaatagaatggccattgctctccgcgcccctctgcccatgctgggaacatttgtatggtacaaaatttctcgcaaaaaagagatagccatttttctggcatagagaataaatttaaaaattccctgtagaatagaatggccattgctctccgcgcccctctgcccatgctgcgaacatttgtatggtacaaaatttctcgcaaaaaagagatagccatttttctggcatagagaataaatttaaaattccctgtagaatagatggccattgctctccgcgcccctctgcccatgctgggaacatt

SEQ ID NO: 27703 - DNA, 616 bp, Heterodera glycines
ccccgccactccttggccaaagtcaacgtcgtagaccaaacggcggagaatggcaacacccgaaagaagggggggacagagaggaagggaggggcgagcaacccaaatgtccaaacggttgagctgaggaagcaatcaattgctcagcactcgcagagagaattggtgatgaacggacgccccccccccggctatgaacggacgccccaccccggcgatgaacggacgccccctccggcgatgaacggacgtcccccgccctcctctctctctcttttccctaaagatgatccgttagtgagtaagaaaaacaaaattattgcaaatatgagacagagagcaggggacggataacaaatagcaacaaaatagaacataattttgagaggtctataagagaaaaagggtaggcaaaatagcataggaaagcacaggtccatccccccccccctccgtcctctgaacacaaaacaaaaaaagtcatgtatggggcagcgaaaattgtgcgctaaacacaagcccacaccccaccccacccctccccccaacctcaggcccgcagctgcacaaaacagaaaaaaacaaataggggcagcaaaaagttgagcaccaaaag

SEQ ID NO: 27704 - DNA, 737 bp, Heterodera glycines
aggaataaaagaaagcgtaagtaagcaatgaacagagaaaggcacagattaagtcgacgattaaagctcacaattagcacccaaaaaagacagtgaaagagaaagacattttatgcaaatttttcagcccattgccatttttgcaattcgttggacgcatcgcattccgaaaaagtgagcaccgaggaggacgggtccttctcgacgacgagacatttccccgattgtttgttgcggatttgtttcgtctcctgtaaacattatagcataaaggaatttcccatccgaaacacaacaacactcactctatcgtatttgaacggtccgtccaccgttcccttcgtgcaatggcccgtccgcagccgccctccccatccgtcagtaggtctaatgccttaattaacatttaatgagtttaaaccaatctctcccccgcattgttagcttacaccactccccctgcgtcatttgtccctccgtgttcagtttgattaattggtttccgccatatccgtggcatggcgtggcgcccattgtccctggcaccgcttggcccattgtgtcgatacattttcctgaacattcaacaatatttatttatgatagagaggaggtataacctgtggcgggatttttggcctctccccacacgtcatttggcggaagaaaagggtaacttacgaccacgtcataagcaattcgttcaagatacctttaataatacgaaaatttgacta

SEQ ID NO: 27705 - DNA, 2778 bp, Heterodera glycines
  unsure (1)..(2778): unsure at all n locations
ggagagaagaatttatgagtttttattctttacccaaatcatttttattataaaaaatgttgggaatattttttctctttgctttatttgccttttctgatggagtattaaaagcacaaaaatgcgaagattgctcaaatttgaatcggttttggaccaatctctgtaaaaatgccgtgccaatgtttaaaaatgccgtgaatggggtacaaaaatttgtgtgccgactgagtcaactcgacgaattattggacatcattttacaagtggatttcgagaaatcggtgagaaacagggcttctttttttgtaaatacatatttttcctggattctccatggtctaaatagtaggaaaacatttcttttgtttgcgaacgaaaattgggacttttatttgtatattttttacatttttcatggtttttctacatattactatgaagaattttttccaaaaataatccttttaagattttatttacttatttcgcgatttttattacataaaaaaagaagcccagtaagaagttattattagggatgcgatttttaggcaaatgcctaaaatttttgcgcacttgatacgcacagataatcacgaaaaacgcattttccgctagatttggggtgtttacgatgacttttataatgcctaacgttgcctattttgggagtttttgtgcctaaggtgcctaattttagggtttttgaaaaaatccttaacaaaatgcaataaaaacgaaaaacacacccctaagaaatgaccaaaaaaaaattcagaaaatacacccctaagaattgaaaaaattttcaaaaaattgatcaccaaatttactatttttttcatgataaaaatttttgactaaaaatttatccttattcaaagaactttaaacaattgaaatataagcaagtttaagtttttgattaagtttttacgttgctacctaaaaaaacgttnaataaaaaaattctatnttgcctatntaatgactatttcgcgattttttgtgcctaaaaaatcgcatccnntagtttatttaatagaattagaacttattttatttttttaagtataaaattgaaagaattatggaatacgccaaaaaagaagatgcccaacttcacaaattgttgcaaaaattaattgccgaatttaaaaaaataaaccagaactaaatcttttgtgtaagtgtatttattcgtatgtacatatgtaaataatagaaatgaacattaattttgtcagctaattggtgactccaattttctattaatggtaattagatattaaattatttaagaccctcttggggatgagcagcaatacgacactgttcactgttccgtcatagaaagtgcaaattacttggagcatcgctttggcattcatttggtcgaactttggcacaatccaacggaatttggcgaaataaattcaaaaattgtgccattgattaatttggcacgaaatcatctcataggagacggacaaaagcagcagcagcaaaagaagaagaagaggacggaagacagtggaaaagaacggaaaaaagaaggcggaagaaaggacgagcaaaaacgaacagtgccaacggaggaggggacaaatagcacggggactaatggcattttggacaattggtcgaatttggcggggcgtaaaggtctaagaaacaaaaattaattgaatcattaacagcgttttcattcttcttaattccccggcattttcagacaaacaaagaaaaacgactcttcctttgattacttttttggcccgggattttatacgattttggtgctgtgccttttgacttatcttcttagtttcattccgcggttaataaaccgaaacggtgtgtaaaaaataacttcatttcttttattaacattcgaatgtcgaaaattggcacaggtcaatcgctggcaaatccatcacaacagttgctgaggaactccgcagaacagcatcatcattcatttttaactttaaaaataatctttcgttttgtcctattttataaagtgtccttttttgtttaatttgtttgttttgtcagcacttgttgctgtacctaaattatgctaatgagtgtttcttctcacttaaggcataacacttttcaacactttgcccactcgcactatttccgaaaatgaaagctgtccaatttgtttgagcgaatttgaggctaattctgaaataaaacagctgccttcgtgtaacgtaatttgattttggatttttaaatataacttaattacttttaagaaaatcaatttatttcttagtcttttcacactgaaatttataattttcagcacaatttccacacaacgtgcatggagctatggtatggtatacagtaaacccaaagcaaatgctcttttgtttttttaacaaaaaaaaagatttaaaaatagtaaattactttattaataataaacaaatgctatgtgcatatttaaggctgctgcaaaaagacaaatgcccattatgccgtgccaaaatatttaaaactgaaaatgggacaggtaataaatgaaaaattatcaaacagtggttgatttggacatcttttcagtcaaattgaattactaaaaaaaaatcacggaacgtttaatcataaagcaaagaaggaccaaacgatgaatgaaagaaaaattgaaaaataattacaaaccttttttgtttacaccttgaaaattttttaattttttctaaagcataaatggtatggacaagctcaattttaaagaacatgaccaatcac

SEQ ID NO: 27706 - DNA, 843 bp, Heterodera glycines
aacaacccggattggtttaatgtgagcaggaattttaaaatgcaaaattaaaatttaataatttactattagaatgctttttaatagcatcactctttgaggaataaataaaattaatattgatgaaattaattttccattaatgcattataaaattattttattctttcagccatcacttgcctaaaacaacaaagaaaaaaatggacagaaatgggatttttgggaattaacgaaatgcgaccaccgattagtacaaaaaattaattaattaatcactttctcttaatattctttatcatttttggtataaatgtgcaacttttaattacaatttaaaattgtgcgttttctgttcagcaattctttgagtgctttggagaactttagctgtcaaggatttacttggaaatcacagtattttttgttccaaaccattttattttctttaaaaggtttattttttagataaatcaatttttttgctacttatatcggcaaaccttcgaccggttcattaccctacaattcctcaaaaattttacatttaaaattctcttattccaccttcaagtcgaaaagactggcctgggcataagccaaaaaaacattgcgcagtgaagaaatagaaacttgcaaagatgggccgaccaggcgagggatgttgtactttttggctaattaaaactgattaataaatctaattaaaaaataatccaccggcgtaaagcactgccattgcattgtctcccgttaattcggccaactcgcccaataaatgaagctcaacatcactttgaatgctgctgcttccacatcagagtgacctccacggggcaatta

SEQ ID NO: 27707 - DNA, 947 bp, Heterodera glycines
attaattttcgcttttgtttttcctaaaatatagcctcccccccccttaattagatcccttgaaataaagcctccttcgagaggagttgaaaaattgagccccaggggggctttatttttagtaaaatggaaattttatttttattttttgctttttatacccctattaaaatggaaaaaggaaattttattttttatttatagtaaattgtttttaattttacaaattttcgatttccctgaaaaaatctttctcgaaccagcaaattttgtataaaaaatttgggcctggaattgtttttttcttgcttcttattaaccctataaaaaaatttcaattccctggaaaaagcgttctcgaaccatgaaatttagttcaaaaatcagagggttattaattttctaccttatttctaattaaatcagagcatggtttttaaattgacgtcgctcagttggcactggcaataaattttttttccattaatttcagggaattgtccaattgttgggcatggaaaaacagttggtgatggaacggaacagatttttcaccaattttggcaattgggtggtccgtatggagacaacgagccaacatttgcgagccgatgaagcaccggcacaaatacagtacaactatttccaggtacagtaaccgtaataaaaattatttttaattaatggacctcattaaatcattgtcatttttatcaaaaaaaaattcaaatgtttattttatttttattttttgctggactagatagaagccgcgttaaacgcatgaaaatcctttttaaaatggcaccctctactttgtgacggctcccggtaaattggacaccagaaaattggacaccaatggaaaattagacactattgtaaataaaataaataagttaaaattaaaaaaaaatttatggaaataaataatgttattattattt

SEQ ID NO: 27708 - DNA, 851 bp, Heterodera glycines
  unsure (1)..(851): unsure at all n locations
agagttgtacgggaccaggacttggtactgaaaaaacgcactactgaatactcaagtcccgattttgacttgttttgatcaccgggaccgggaaaagtcccgattttttcccggttttcccagccaaaaagtcccagtttttcaacccgaaaaggtcccggtcccgggtttgcccaaaattcccggtcctgtacaacttcacttttaattaataaattatatagcacaaaatgattgaatttggtttttttttttgttcgcagctattaaaaaaacaacaacaatttaattgaatttattttttcaaattaagaaatttgtcgaaaattatccctagatgacggaatttacgcaatttaagcaacgacaaatttatcaccaaattcatttgccatttctattttattaaacaaaatatttttaaatttccaagaaaaaaaaaattcaaaacaccaaaaactttaccctaagcattttcaattaaattcacaaattttttaaaattaggtgctcagtaagcctggcgttatggagaaattcttccccgatgaaccgcaacgcgttgccgcactgcgcgaagtgttcaccggtctgtggggccttgagaatgacgacgcggtcaccaacgcggttattgaggtattanatganattttttaaatttttaataannatttttaacaattttttaaggatgccatccaagggcccagggattatgtgctgaaagcgcaaatgggcgctggcaaaggcaatttctttgacgacgaaatggtggaaaagctgaagacaatgtcgctggaggagcgnggcgcgtacattttgatgaagaaaatttggcctgtcgctgt

SEQ ID NO: 27709 - DNA, 1208 bp, Heterodera glycines
gggactgggtcgttttggcgcccacgttttggcgccgacgatttggcgcccacgttttggcgccagggtcgttttggcgcccacgttttggcgcgaagccaaaaattaaaaagggaaagacgtaaatttcaaaaatgttgcaaaaaaaggaaaaagatttttttttcaaatataagtaaaatttaacaaaatgaaaaaataacaacaattcacgggttcatatgataattgcgcgaaatgccacgaagaaattccaaaatgatatgatgattttgatttatgtggtaattgtgatcattgtcatagtttggattcaccggattataattctgcaccaaattaaagattcgctcgtcagccacttggtatttcttagctttctgcggtggctcaagtccagcaataaatgacgcatacttcccatcggtgcccttctgctcacggcggagaacgtcaatgaagtgccagatcgatggatgacggcaattgaaggcgccttgaagactgtggtgttctgcctctgcgtagttgttcgtccttgcttctccattcagagttcgagtgtagacgttccattgttctggtgggaagagtggttgagaccaagtcccatttggtcgcggttgtaattgttgagcaacctaaaaattgcacaaaaattgaagtacacttctgataatgatgagaccaaccagtcaatgagcggtctgagtgccgcgacgttcccaaactccgtgtctaatgcgatgacagctgtcctctgatgtcactcagcggtagaaatgcgaccgaagtcaacattctgactgtttctgcaaataccgcatccgcgcaatagcgataaaaatacgcagattaaataattcaatagaaaatgttaatgtacctgccagagactttgctccttaatttttttttgcaaattccgtacgaagtggaagaagcaaaaattgattgcacatccagggaacgcattaacagttctgtttcgcgcagctgtctcaaagtcaatggcaaacgaagttggcgagaatgtcggccacgcttgccgcagaagttcatacatcctttggtaggatgcccgtggcttggacgtcaggaggcaatggcacacatcgatgaccctcggaccacggccttatcataattttcctctggtaaaatcaacaagagaaaaaacaataactgagcaaaaaggggtaaatttg

SEQ ID NO: 27710 - DNA, 815 bp, Heterodera glycines
  unsure (1)..(815): unsure at all n locations
taattttttgtctttatttccacttttgttgtttgccatggccttttgttggctgctgcgatgagcgaattgtctgaattttgacaatttaaaagaggccaaagaataaaaatgaaaggccaaaaaatgattggttggtcaaaaagaaagcgtaaaatgggtcaaggatatttttcaaaagatgatcgatttggggacaaaagagtaagtgattggtcacagtggccaaaagagtggacaattggtcaaagagtgatcgattgggtcaaaaaattaaatgattggtcaaaacaatggacaattggccaaagagtgatcgattgggtcaaaaaattaaatgattggtcaaaacaatggacaattggccaaagagtgatcgattgggtcaaaagaatggacaattggcctaatggtcaatcgaatgaccaactgaccccgttacgctgctgttcgtccgtcccatatttctgttgcgtttcgtgcttttcttccacactttttctccgttccgccccattttttccctttgatttgtccgctttttccgcttcctctttgtccggatgttcgtttttcagttggccttctgctgatgctaaaatgccaattgtgtggtgtcgccgtggctttggcaccggtttttgtctctcaactgcgacaaaagttttttcttccatcgcacgacaaaacattaaatttatgagcacaaaaagctataaaacaaatcaattattttattattattttgactaattacctaattaaattatgtctttggtttttctgcgcttatgaccnntgcaggcccatgcaag

SEQ ID NO: 27711 - DNA, 1209 bp, Heterodera glycines
caaaattttttccattaccgcaagagctgcggaaattgtgaattaattctcagaaaaatggctatctctttttaggacaattttctatctcgtaaccccgatgctaatccgttccgcagagcctcttcaaaatttttccattaccgcaagagttgcggaaatgtgaattaattctcagaaaaatggctatctctttttaggacaattttctatctcgtaaccccgatgctaatccgttccgcagagcctcttcaaaattttttccattaccgcaagagctgcggaaattgtgaattaattctcagaaaaatggctatctctttttaggacaattttctatctcgtaaccccgatgctaatccgttccgcagagcctcttcaaaattttttccattaccgcaagagctgcggaaattgtgaattaattctcagaaaaatggctatctctttttaggacaattttctatctcgtaaccccgatgctaatccgttccgcagagcctcttcaaaattttttccattaccgcaagagttgcggaaattgtgaattaattctcagaaaaatggctatctctttttaggacaattttctatctcgtaaccccgatgctaatccgttccgcagagcctcttcaaaattttttccattaccgcaagagctgcggaaattcagaattaattctcagaaaaatggctatctctttttaggtcagtgtattatctcgtaactccgattcataagcaatttcggagaccctctccacattttctagggggggcccaccacgaggccgcgaagaggccgagtgagtaccttcggtgcaggaaaattattaaattttaaaaattttttaattgctttttaaatatgccaaaaaatgtaggcttaacttttttagtgaaaattcgatcactcatattttttgctaattgagcagaagcgtaccaaactttgcagggatactccccggtaaaggactaacttacactgaaatgagcgccgagctagctggctcaaaaaaattttcgaaaatctgagtctttcgtttttatttattttttgcaaaattaattcttaaatattttttcagaaagggttctgaaacgcaccaaattttatttacatgttagtttaggcactctgatgctttttctatcaaaaagggagaaagataaaatttttaaaaatttttaattcctttttaaaca

SEQ ID NO: 27712 - DNA, 1208 bp, Heterodera glycines
gagtcacccccaactcatccataacgctgcgagtcatcgtcgtggcatggcattttctgcttatgtggtcttagccgtggacatttttgattatgcggtctcggtcgtggcattttttggttgtacggtcttagtcgtggcattaaatgccacggcgacgactcgtatcgtgctatggatgagttgggtttaccccgaacaattacagttcatagaaataagagaattttgctgattgtattgccgaattgggatctttcaaatcctattcccaagtacagttataatggaaatttctaaaattcaagaacgcaaaaaaataggtatatgaaaaatgtagtttacttaatcggttttttttgttgccataatgggtttattttttgcttccactgaccattttactcgtttcaccgcatgtgcttttttttaaaacgtatttgccattcacgtacgaattccatcccctgttgtatagccttttttacacatatgaaagggaatatcacacaaaaagaaagaaacataaatgatgacaaacaattaaatggaataatagaacaaatgaacggcaatttgtcagcggagaaagtgctcaaaagggtctttcattggttgccctttgttctgtgctatgccaccatttctcgctgccccttctgtccaatttgtttctgtcctcttcacggtcatcactaattggtcaagggcatcaaatgggtctttcggtgctgtcgatggccgtgtctcaaccattcctaaaatatgaatttgtgctcttccgttagttcgtttctctttgtctgctaatttaattttgccgcttctcccctttacctcttttctgtacgggattagcactgctattcggctgaggaattgttgggaaagcggcaaatgaggccgattgtgaaatgtggggcagttgctgattttgttgttggtcaactgatacggaatgagatgaagttgtgggcaagaattcggagagtaaaagttccatgcgattcgaagcttcgagcgaactctgcggacgttgttgaaccgactggcgggaagagagagaagacagcgaaaaggggtcgaacggagcgtttttcgacgccgtcaatgttttttccatttcgaccatttggccgtttttctctgccacaatgcgccgtttttcatcgagtgaaagtgctcccctaaaaagttcgaattaaaaa

SEQ ID NO: 27713 - DNA, 1913 bp, Heterodera glycines
caaagaatcgatgtgtttaagccaaccctacccgctctactcacactgatgtcaacatgataaccactaaagctaaagatgatgatcacacaacattatctaaaaaagcttactaatagtatatttacataaatatctttacatataatcgttttttacttgatatttttagaaaaataattattattgaatgataccataatattcgactatgtctaattaataatgatcatttgtgcaattctttaactgggatgtcttgatcaccatatgtctatctgttgtgcctgatccttaatcccggcacccacacatgatacgggacctgccgatacccggactcccaaaagctgatagtcctcatacggatcacgaccgcctttgttttttggtagattgatcaaacaaaagttttcggccatgtaaatcgcgacgctggagaacattggaataatttatgaatttacaaatttattttgattgtaaattaccaaaaacttttgtagaggcccattattttgtctctgttaattcaatatttcacaaaaattcaaaattttcatttatttaataatttcattggttgaggcacttaacaatttaagtcagagctcgaaatttttcatttgttttaaatttttttcattcaaaatgttgaaagtgaaaagggcgacgctgccaaagaaatgatcagtgaaatttttgaaataattaaatcagaatttttaaataaaaagaaacttaaattaatcttgacaaaatctcacgggttttccgactttttcaatattttaaattctaatcataaattacaattaaaatgtccatcgatgatttaaattaccattgttcagcggtgacaattttaacttgaaaatttattaaatcattttttaattatatgtgttttatttaatcttatacaatatttaattttttgtcataatttaaataaaagtaacaaattttattgatcatttacaatgataacatacaaatctcaataatatttatttttttctgttccattatttaatataaattaaaaaaatattgatttaatttgctgaaaattttcaaactataactgcattgtcaacacttagaacaaattaattaataattgggattggaatcgcattgaatgcctacaaatttcaagaaaaatcggcacgaatttttcttagtttttttaaaaaaggaaaagcaagccttgaaaaatgcataaaaggttaaaaagaaggaataaaaaaatgtaaaaacatcgtccatttcatgacaatggaatgacaacaatttcgtcagctccaatgctacatcctaaacaaattgaaaattttaaataaacaatttaccattcaagaccggacaggatcaggcacttttgtcaggattttccagggatactgacccagacatagggttcaggatcacggtaaaactgggatttgaatacgggtttctgcattattcccaaatcctgatcctgacttgggttttaaaacccaggatctgtaatctatcccgggcccgattccgatcacgagtttggtaaaggtcccgccactgttaaccctatcccctgccagattcccaaatgctgaaagaccatatgttcatatcacggaataatttgtcttatccccgccccagatcccaaatcctgatactgatccagtcttgattttcatgattttggcactgttaatcctattccgggcccaattcccaaatcttgctttgacttcgagttttggaaaatttggtctcaattttcatataataactaacaaattttcaaaaattagctttttttcgaaaaaccaactttcttttctctcatctaatcgttgctgaagttcatgtttgttgcacacaatatcacaataacacagcaaagtttcgcttggctt

SEQ ID NO: 27714 - DNA, 935 bp, Heterodera glycines
gcacggatcgagccggggataagaccattggaaagagcagctcgagctttacaagaaggtatggaaagaaaaaatagttatttctgggactttttcagaaatcagaattaattctccaatgtggcccaaattttaggcccccagccacagccccttgcttctcccagttttaagtcttggatttgtcaaataaattcaagacttcaaattaataatcaaaaattctcttaaaatttttttgaacccaattcaaaaaaggaaaaaaatttgcagtcaaaaaattattcgaatttctccaattttgtttccataatttccgaaagttattcggtatcataatgccaaaacaaaacgaaatcgttttaaaatattcctttctggacttgacttggtttcttgatatcgaagctgttttctacgctatttctaaaacggttataccaaaccccagatttttgaatccggttttcagaaaaaatgccttgtggtgaaaacaatatttcacatttcactccataactttgtgagttcggcacggatcgagaccgggataagaccattggaaagagcagctcgagctctacaagaaggtatggaaagaaaaaatagttatttctgggactttttcagaaatcagaattaattctccaatgtggcccaaattttaggcccccagccacagccccttgcttctcccagttttaagtcttggatttgtcaaataaattcaagacttcaaattaataatcaaaaattctcttaaaatttttttgaacccaattcaaaaaaggaaaaaaatttgcagtcaaaaaattattcgaatttctccaattttgtttccataatttccgaaagttattcggtatcataatgccaaaacaaaacgaaatcgttttaaaatattcctttctggacttgacttggtttcttgatat

SEQ ID NO: 27715 - DNA, 1885 bp, Heterodera glycines
atattgggacacgaaaagaggtccatgggacacctattctactttacaatcaaaaaaatacgtcgccgctgaaaatttaaaaaccttatttttagatttaaaatgaatttaaaaaatgtttcccaccgctctgcgtctaaatccgtcccgatctctgatccgatcgcccgtcgttctccgtgtcaccgtcccctgcggcacttcgtcgtcgtccgtttgttgccgtcgtttcgtccgaggcgcaattgcagcgtctccattttcggcacattcaatgccaccaccggtaccaatggaacgcgtgcacattcaaatggggggaatgacgagaagggaagaggaggagggaacggacggaaggctaaacgaaaaaattgaaattgaaaagccaaacaaaacatagaaaatataggaaacaccaaaatttttatttatggttttatggcaggccgtacaattttttttaatcctaaatcttttgttgtcgttttcaagttaatttaaaattttggaatgggtcagccagcaattatcaacaagacgaatttcagaaattggtaaaaaatcaaacaattgaccttttactaaaatatgaaaatgataaacgaaaagccaaagaaaaaataaatggaaaagcaaattttaaaatgcacttttaacagtgacaagtcgtttccttttttgttagaaaaattcgaccgttcaaaggcacaaagaatgcaattaaaaaaatcggaaacctttgctcccaacaatcaaaggcagaaattggtggcaaacggtggagggaaaggcgcttcgcttttcgcaaatggcggcggtaaaaaccgattgttggcgctctgttcacctctcttctccatcaaagcgatgctcctcaaaaattaatgcgcgcacttttcttttttgcttcgtcgtcgccgccgtttgtctgtcggtcgatcggcaaaggaattttgagtgtcccgccgtgtgagcaaaagtaaaagttcggttggagttttttgttgcttgggaaaacaaataaatcgcttaaataaacaaaattcttttcgaatttaaaatgtatgtgtgggcgcgaacacaaaaaaaatgcacagacaaagtacgaaaatcacaacagaaaaaatggaggattaaagttcagaagcgatagaggggaaaaacaaaaaaaaaaccgacgaatttgagaatttcacatttcgaattcgaatctattaaaaaattgacgttttgttttttaaattttgtggcataatgttgaccattttcaaatgaattttaatcaattaaaaaatttaaaatttaaatatcaaaatcaaaataaatataggtatttcatttgtttggcttcttaaaaattacttaaaaggtaataaaatttcttaagcatttaattcagagttcccaagtgtgcttatttctaagatttgtgcttattttgaggggtcggatcttagaaagtaaaaatgtgcttatttctaagatttgtgcttatttcagcgttacgtgcttattttgtgcttatttttggatttgaaaataaaaaatgaaaaatttgaatgactattttgatttttcatttttttctgaagcgaatatttgaattaatttgatttaaaaaaaaattacattttatttcattttttgagtgaaattcacaaaatgccaccaaaacgtaaacatgtctacttggagagctacgaaaaagaattccggcacataaaaaaaagtcgaaaaggcgaagaatttgccctttgtgtcgtctgcaacgatgatattaatctcctttccattgggaaaaccgcaatttctctgcatcaaaaaacgggaaaacatcagaaagcggcgaaagccgcaaaccgatcaattccattgcatgaat

SEQ ID NO: 27716 - DNA, 1327 bp, Heterodera glycines
  unsure (1)..(1327): unsure at all n locations
gcgccggctgggaaattttgaaaanttgagtgagatttgttagcagcttcnaacaaaaaatgttaatnntaggattaataggctaaatttgtacggatttttttaaatgataaaaatatgtgtcaattaaaaacagaggaatcaattttctcgataggaaaccaatgagtatataaagagaaaatcaaaatattttaatttttatagaaggattgaaccaggagaaaggagaaaggaaagtcaagaagactatccactagaccatttgcacaattgttgttatttttaaaaattatattaattttatttttcgctttaactcaaattttcatcactaatttttcactcagccccccattcctaccagtgcttgtttttcacggttcccagttgccttaccgggaccgggaaataaattttcaaaatccgggatcgagaaccgggacaccgcaggaccgggaattcccggcccagtcccggtcccgctcaactctaatttaactgttaaaaagatcccaaaatccacataaatgcactctcttacaacagacctcctcccttgttcgccaatttttttttggaaaaagagcgccgtaataagtgttttaaaacaaaaaggtcgttgcattgcttggcctaatcccaagctaaatatttgactacaaacgttccacaaatttaagtcccggtcccggaagggccccggcccaaaaatttggacaaaaacgggtgtgccggacccgtgatcccgtttaggtctacggccccggtctcggctatttaaaaattcctactctaataattattatgatttttttatttctgcaatataaaattaagcattcactcgtaaggcagaagaatgtccatgggcaaaattctcagcacacctagcgattcgttttcccattttataaatgtgtcgaaggattgacaggaggacaaagaaggcaattgcctctgctgataaaaattgacctcatttttgcaatttggcattgcctctgataaaaagagtgaaaaaatgacctcttcatcattttaagtatagttcattttgttgtgttttacattttttcactaaaataaaaaatgtaagatgtaaaaaagaaaaacatttttttttgcattccaataaattcagaattttgtacttacctatgtacaggtattttaaagaaaaaatgctaataaatctacttgtattacattcatttcttaaaaattaacgtaaataatcagcattgtttttgtgggaattgcacttacacaatggttattcattcatgcatgtctttccgcattcacacagtaaaaaattaaacat

SEQ ID NO: 27717 - DNA, 1109 bp, Heterodera glycines
aaaatttttgaaaaaacgctaaaattttttcaaaaattttttttattgaaattttcttactaagaaatttcccaagaattttttaatgaaaaatttctaggtttgaaaatttttttaaaaaaaattttcggtggggaaacgacctgctccccgtgatcaacacccccgaaaacctcaagtttcatgtttttattccaaaataataaaggagaatatgggacccccattcttcacgattgccattgttcccattaaagccacagctctgatccattccaggcgaactcatcttggacggggcctgcaaagacccgccgattgccatcgtcgagccgaacacagcaaatgttcattccatcgaggcgttggaggacggcgccgctttcttcgaccttttggtcccgggttacaacgacagtcgctcgtgtaattattacactctgtcggatgacaaggtgtactgtaatgccgtatttctctgtccactcattggttcgttcctttgttctttcaggtcaatggtaaaattggcatcggagacttcgtttggttggagggttcagaagaagtgcctagagaatttaccatgcaacagcttcgtttcgatccattccttatgtcaaataccaacagattcgattgaaaatgtcggaaaaatagtggcctaactaatttattttattacttttacactattttattgtttggtatacggacgggtacgataacttttttatataaattgctgattttcctcccgttttacgccttacttttctgacggacgataaaattgcttagaattaagtgactatgatgtgagacagatttgggctaaatgcggctaaagtaaagggaggggtgcattttattgtgaatggaagtgaaggcgatttcttttctctcccctcgattcggcattttgctggcttttcgtccgcttttccccaatgtctcttcgatcgtttgcctttgccattgttttcttttgcattttttctctgttcggcgcttttcgtatgcttatacgcttttccgaccaaattgcgtttatcagcgaacaatttgaagcggaaatgaatgtgtggcgtgaattgacggacgaaacg

SEQ ID NO: 27718 - DNA, 1109 bp, Heterodera glycines
gggaagcgtggggggaagggtggggagccacgcatgttgtggtacacatcaattatggaagccgcgcatgcactagcaacgaagtcctttgcgcgaagcgctcatgtaatgcatattcttttcatctctcacaagtatactgtctacaccgagcaattactgtgcaaagcataatgtctacgccgagcaattactgtgcaaagcatactgtctacaccgagcaattactgcgccgccacacgctagtttatattaccatagagaaaaagggggactcgtcttaaaaactaatttgagtcgaacggctgtcgggaggggtctgaaagtggtggaagggtcttacaactttttgaggcgcatctgggaaaaatatgggttttccgctccggtggacggttcagcgccggcggcgctgaaacggcgtgaaattttttttgtccgtctttggtggcctgtaactttgcgggaagaagcgggagcggaaaatgcttgctggtaggattttaagttggactgtttggcacagaatgccgttggtttgggggttctatctgcaaatgccaatgctgcagaaaatggcaaaatttggcacccaatttcggcattttccgtttttcgcgaataactcgctgggggttaagcggagcgggttggcgccgcttgagcatttgtgcagtttttaaagctgcatccgatggcgttttcagattttgaaaattttcaaaatttttcgagctaggccccctcgaaaatttttagtttttgaattttatctttttttgccgatttttcccaggaaaacgaagaccactttcaagcaaccgtttttcgagctctatcgattggtggcatttttgaaaaaatttcaaaattttccggaaatagaaaaattttttggcctgaccgggacatttcagtcccgggcctataactcgtcagcggttgattttaacgaaaaatcgtccaagagcttttttgtagagaatttcgagctctatctaatgtgctttatccggtatttttatctttaatataaaaaaagatataaaataaaaatgaatttttaaatgcaaaaccaaaggggggacccccatggatttgcatttcat

SEQ ID NO: 27719 - DNA, 529 bp, Heterodera glycines
ctatttgccatttgttatttataaaaatcataaatacagaaaagtgctatgagcacaaggacacagtggtgccaatgattggcagagaagtgccaaagttgggcggcggtggtacggcggacgacgtgcggtgccaatcagctgcaattgacagcggtgatcagcaacaacaacatctcggcgaccgcattgcgttggacggcacttcgattgggtcggccgaataatgcaaatttcgcaattatttttttaacttttttcagttttcccgtcaaaatgttggcccctttgctcgtcgccaaaggctccaatggaaatgggacgccttttgagatcaaagtactcttttgaccaattggcacgattatgaggccttattttactcgatcaattatttttatgtaaatatttgggttttcctaccccaccggcaacattttcctttaaaaattgtgttgttttccggtggacaacctccgttttgtcggtcttccctggcacatcaccggatgtgtccactcgctgtgcg

SEQ ID NO: 27720 - DNA, 1305 bp, Heterodera glycines
ttgcccacttggaatgcatttcacaatgtcgaaaaaagctcggcattgcaggtgccgcaaaagacgacgacgacggcatcattacggtgcccatttcgcgcgttattttcgcgcagacggcaaacggttggtgaggcatcgattagtccagcattttaaggacagcatcgagtggtgaccttgaatttccaaaaaaaagaaaaattttgttggtcttacttataattacaactgccgattaaggtgtgagacaatgacggattctgttccgtgattttggcagtttcaaagtcccattacggtatttaaaaaaaaaaattaatttttcggtatcctcggttttctcaatcctttaagccctagcagatgatttgagaaagctcttttttttgcaaaagcctggctaaaatatgcaataattcaaataatttaaaatattttcaacagcttgaacgtagcgaatttgacgaggaaaatgaaatttcgccattcaaccgccagcaacagttagcgcctgaagcgctcgcttcggttgcgcgtccgtgccacaacacctccttgcgcgtgcggcatgcgttggctgatgcgcgcgcattggaatgtgccggaatgtcgcacaaaagggcggaagtttgggtcagcgttcacgcgttcaaacggatgatgagaaaagcggaaaagaatttgaaagtgaagaaagaggagaagaacgcaaaacaattcgccaaatgaatcaattaaaatggcaacaaaaagcatgtgattgattctccttttgtccaattaaaaatgccaatacccaatttaaatcatttgcacaattatattcagcattgaaaaataattgaaaaaataaaataaattatgataaaaaccgagatttatcaatgatggaaaataatatttaaccatcataggataagtcaaattattatttttttgttaggtaattttaggttaaataagtatgtacttttttaaggcttaaatttattcccaaaaaattttttattaaaaatcttttgaatcaaatttggattttaactcttttctgcttttatctttttaaattaaaattaatattttttcgaaaatagtttaatttattattttttgtacatttgaaaaacgcaccaattataaagctgaattaaaaatttagctgtttttgttgtttgtgttttatgagaagaatgttttttggattccttttttgggtggagtccccaagcgaagcaattccattgattttcagtgttgcctccggcggagtttggcagagtaatgggctgcaattgcgcacca

SEQ ID NO: 27721 - DNA, 1338 bp, Heterodera glycines
  unsure (1)..(1338): unsure at all n locations
gaacggtgctaggtggcgcaattaaaccaattttactatccatgggatgacgaaatttggggttttcgggttcaaaattagtcaaaaagcacgttgtaaacgttattggcacttatgaaatctcaaaagaacatttttgggttctaagtttcagtttttcgtcaaaaaacacgctgaaagtaagccaaattcattttccgttcttttatgagtctagaatttacctgcttgaaagctcaatcccgagaaatttatccatttttttaaagacaaacaatacattttggaatggatacaaaaaaatttttcatttttacgcgagtgtctatataaaggacgcttttctcacccaacattaatttttaattcgcctcatgcatactttttttgagctcctttcgtcaaatcaattaagcaaaaaaatagtttttcactaaaaatcgcggacctatcttgtattagtctgcaaatttcaaagactttcgttgagtttcaaaaaagttatggtcaaaaatttccaaaaccagttttttgaaattttctatcagtggacatttcgacagcaaaggacttttcgacagaaacagaaaaaataatggacttttagacagtaaacataaaaacaactaattcttattaaaatgaattatattgcttgtcagttttactaaatttattattaacatactaaaatgtattgtataactctaagaagaatgaaaaattttctcaaaaattaatcaccaaaatttatctttttaaaaataatttatctcaatactgatctggcttaattttgttgctttttcgataaaattttacgattttacacctctaatttaggaacttaattactctttactgtcgaaaagtccggcgcccaaaaaaacatgtttttcgtacgtttcaggccacggggagctcaggaaaaaaatagcctttagtacataagaaccgttttatttttcgaattttttaatgatttttttttgaattttgagaaattgaaaagttttgaatccgttttacaataattaaccagtgtcaatcagctaattttaaaaattttgtacttaggttcaaataatcgcaaatcttctcggtccatgagtcatcgaagctcttctgctcggtacagtttcttttttgaacagtgaaaaaaatgaaaaaattccgaaaagactttttacctatttttttatttcattttttaaattagttttggcttggtagctaacccaggatcctcttttggcaccgttttttttgagctgctcaatgaactcaattagtttttggcaagtggaattcccgatttgggttattcagctgntgatg

SEQ ID NO: 27722 - DNA, 1086 bp, Heterodera glycines
  unsure (1)..(1086): unsure at all n locations
ttttaatgattgcgtcgcaattatntggaactaataccaacaaatgcgatatgttcacttctcaaatgcataattgtattaagggataatgaaaggaaaaatccattttgccgattcatatgatgagtgaattgagttgtgcgttcattttgagtcaactttcaacaaaattagtcaaatcaaaaatctacgccgcagttggcagaaaacgcaacgccaataaattttcaaaaaaatttacgaatggctaacgtgtgggcgacatgaagtttgggcaccgggaagtttgggcaccaggaagtttgggcaccagaaatttgggcaccgggaagtttgggcaccagagggagggatttcaaaaaaataaaacaatataaatatataaaatgttatataaatcattaaaatttagtaaatttaacaacccttgtgctcaaaaatttctatgttcttgaaaattaaaaaatttttatatggaaacctggcaatcttataatttagtcaattcttatgtactggtttctgtttggacttagacctgaataccgtcttattgttagttgggcccgaaataacaagagacccgtctaatactatttaaatttataaattttaaatcttgaacatactgagccgatttgttggatttggatgataaataaaaaagtttaaccaaaaacatgctggagcccaaacgtgagggcccaactgacggagtccggtgggtcagttttttactgggaattgaagatataataattattaaaaaatatgcagactggacaaagaactcctttttccaagtcccggtctctgccatttcaaaattaaggtctctgatttaattttgttaggaatattcaaaaaaacccttttggaataacaaatgcattttctgatttcgagtttctttcagcaaatgttgctgacgcttatgtaattagtcccgcaagtaaaaatgatcacccaaaatagtcataaaatatcataaattgaacaaatctaagggccaatcattttatgcataaatacgaaagcttgaaagaaacattttttaaaatttggtttccattgggctaccgtacc

SEQ ID NO: 27723 - DNA, 931 bp, Heterodera glycines
  unsure (1)..(931): unsure at all n locations
cccacgcccttcagagcacgacacatatttcaacaaaaattgtgaaaaattgactagagcaatcgaacgctaacggacgacctaatggaaaaaaatccccgaaggagagaatttaattaaatccattccttcgggggaccgtgccgggtgccgcggggtaagcagtgctggttcgtttcatcacggcacagatccttttggatagtcagcaatcgttgcttaacttgccagatcggacgggtgcgcatgactttctgaataaaatatgatgaaacaaaaaaatcgattttttcaagtgtccgtttggggtactcaaacatttatggggagcaaaaatccaacgcagaattaaagtacaggctatagggaagctattcccgaaggattcggtctccccataaatctgggcgcatcggttcggggggactgccccgaaaacaaaaaaatcgattttttcaagtgtccgtttggggtactcaaacaattatggggagcaaaaatccaacgcagaattaaagtacaggctatagggaagctattccggaaggattcggtctccccataaatctgggcgcatcggttcggggggactgccccgaaaacaaaaaaatcgattttttcaagtgtccgtttggggtactcaaacaattatggggagcaaaaatccaacgcagaattaaagtacaggctatagggaagctattccggaaggattcggtctccccataaatctgggcgcatcggctcggggggactgccccgaaaacaaaaaaatcgattttttcaagtgtccgtttggggtactcaaacaattatggggagcaaaaatccaacgcagaattaaagtacaggctatagggaagctattcccgaaggattcggtctccccataaatctgggcgcatcggttcggngggactgccccgaaaac

SEQ ID NO: 27724 - DNA, 1058 bp, Heterodera glycines
gtatacaatccggaaaacccaaaactttccaaaaaagttttggtattcttcgacagcggatccgaacgctcttacgtcgaaaaggcactggcctcatttctcaagctggaagccaaaaatccagcagagataaccctgaccgggtttgcaggtgtcgacttaggcacctacaccatgcacatgacaaaattgtgcatgaaaacggcgatgggagagaagaccatcgagccggaaataacgactcgtgtgctgcgtgagatggctcacgtcgaattcaccgatctgtacgactctgattttgaagcaacgcaactgcaacccacccaaacagagtcactacagccactggtcctaattggcactgactactttgccgattttgacatcaaaacagagaagcgactcccatcaggcttttgggttgccaactcaaaagtgggcagattaatcttcggcaaaggaaacctttcaaagccaaagatggcgaaaaaagtcacttcaaccgccatctctcaagaggcagtggaagtacagcttcaaaacgacgacgacggactgaattcaatggtcaaacaattctttgatctcgaagctgctggtatggctgatgctgcccatccaaccgaaaatgagcaatggttggaccatttcaataaggagctccacttcaacatggaagagaaacgctacgaagtcgcgcttccatggaacaacagggctgaagagctacagcccaattatggattggcacgaggaagactggacaacaatttgaaaaagctggacaaagaaaagttccaactttacgatcagatcatctaagagcaactcagcaaaggcattgtggaaatggtgccggatcctaaggcatggactggcaaactgcactatttaccgcaccaagcggtaataaaggatgatcatcaaacgacaaagttaaggatcgtctacgatgggtctgcccacaccaaggacacttcctcactcaaccaatgcctcgacaaaggaccacagttgctaaacgatctgatcggcatcgtcatgcggtgccgcatgtc

SEQ ID NO: 27725 - DNA, 1115 bp, Heterodera glycines
  unsure (1)..(1115): unsure at all n locations
atttcgtcaaagatctgaggcttaaaagcaaaaatgagcattcgcttattcatcagtgtataccnccaccggggaacatctgtttgtccatgccgagcggaacgagtgtccgccgtgaacgtgccgttgccgagacgccgccgggcacaattggacagccgccgacagcaaaaaggaacagcagacagagacggaggagcactttggggggaagaaagtgccgaaatggaggacagaaagaggagaagaagcagttgagggaacggagatgaacagcatcaacagctttctgggcatcattatcatcatggcatttttgtggagcatcagtggagcattgtgtgtagcagcactccggcggaaagcattgcttttgcaagctaatttttgccatcgccgaggcattcatccgctgtcgagcggaacactgttgttctgttcctagtattgcagcatcgacggcaaaacaattgctgttggaattgtcggtgatgctcctctgcctcgtcgccgaacccgaaagtgccgtcctcgccatttgagtgccgtcgattgagtgggaggggaattgtggtggatgacggcgatgaaatcaaatggacctgtaaacgaaggaaggattgaatgagttttggcatttatatgtgccaaaaagcagtgggaattaatgggtctgctcatgatttgcggtcagttgagtttgaaacccaagtctatgaattaaaacagactaatgaggaggagaaaaatagcaaaattataatggcacgagacggtcggtcgggcgatgactggacaaaaaatttgcgaaaaaaccaagaccaaaataagcaattcccatgcgcaaaatggggaagccaattttggcacgatgagacaaaagggaaataaaacaaaaacttattgggaaagaaagtgtggccaatagaggagaaggagaaatggatctttagttctattacctaccatatttgtaaaaatagacatgttcaaatgcaattataaatttgaaaaaaaattagtttctcgggagaaacaggtgaaacaacacaagcaaaacaaaaggggacggaaatacatatgttatgacaaaggcacaggaaagtgaagaaaaa

SEQ ID NO: 27726 - DNA, 1068 bp, Heterodera glycines
tattttggagctccggcggtgccgataggcgccgccggggaaaatttttaaaatttgagtgcaatttgtgaacaaatttagtactaaaaatgacaatattttgtgattttaatttgattagattcacttaacacaacccactgagccacgcacactattaaggtaatgaagcaaaaatataccaaaagtatatttatttctaacttacaaaaagccgatcattaggggtgtaaaaaagtctcggtctcgaaagtctcaaagaccgagactgaaatcccgagacttgagaccaaaaaaaaaccgagacttttctcgagtcgagactctcgaacatcactacttagaattaacatttttctgttgcttattttgagaaaaaaaacaggtaaacatttactttctattttaatcgttaaaaaatgaatggctcgcttaatacaaactttgcggataatctcttacattgtaatccgaaacatattgctgtgtctgtcataaaaccaaacattcatttaaaagcaagcaaataaatgtattacaaaagcatttctgagagaaaatgatggcatcaaatcaaattccaattgtgtgagatcggcttttctcaaatataattaattcacttccgcgcagtccgacgatatttcgatgctttgacccgctttttcttcttccgctggtggccataaggcctgtaattaaacacaaattaggtgtgaactgtgaattatcttttacacttacccatacgaacttttgccaccatacaaactgaattggacattgttcaaattgtcgtcccaatttttttcattttcccattgatccgtcgccgccttttcactaattggacatcgcttcaacagtttttcagtgaattcacttctccaacaagtaataatgtcagcttctcattagtccgttcgttcatcaattcaaatggctcaatgggcgtcgaatcataaagttcaagtcggatattatagctgactgaagcggtggcacagagaaatgcctaaaaaaggaagcgaaaatcaaaggcaatcaatcagtcaatcgtttatgtga

SEQ ID NO: 27727 - DNA, 1661 bp, Heterodera glycines
  unsure (1)..(1661): unsure at all n locations
agtacacgtgaacgtgtgattcagtccattacgttccttgtacatggtagtgagaagtttgtgattacacaacactaaagccttgttcgctcagcatcactaagcagtctgttactaacgtcataagcagaacagttaaacaaattcgtgaattgatcaagcaaactcatctgagcaggagttagttacacgaaaagtgaatgcgtgctttttgaaagaatgaatggtcgaatcactcactacacaccctcaaaatttgtattcaaattttgcgctaaaaaattcgcttcaaaaaatcgtacatagcagcctatttaagtgcagattgtatgcttaagtatacactttaatccttcattaaaactaattttttgaaaaatggacaatttcattaaaaaaagtgaaggagtttgtatgaataatcagtttcagcatgaggacaaaattccaaaacaacaccaacaacaacaacaacaagatcaacaacatcaaactgatgtgatcgaacatgatcactgctacgcacgccccacaaaccagttatggaaattgaaaagacaaaaatacatgttgacatttaaactatgtaaaatgtgtgcacaagagctatacaaccgtaaggacgacataacagagtgtaacgatggaggtgtggacttgaactttcacctgtgcaaacattgtacaatgctcaacatgcgactcagcgatatgaattctgtgcaatttatggcatatcatccacgtaataacaactacaacaacaccaacaacagcaataaaaacagaaacaataaaaacaacgataatgacgaaaatgacagtcaaaataacttttggtacgataattacggtcctacatactgtagaggtggtccaagaaacaactacatgcaaggaaaacgaaagtgcttggaaagaattgacatggacgacatgaattgatatttaaaatattaaatttttttatttgtaagttatgtacggcctctaaacggattaaaattgattaattacatctgtgtccaaatttttggtggccaaatataaagtttaatcctttgactaattaccgcgtatgtgtattctcgggcctaactatggacaaagcccttagtctttgtggtcctgtgcccctaatctgatgattgattgacacattcgttttgatcgtcgcattgtatgtcccccacaaccgcgccctatggcaacaaatgttctttgtgacatccctcactgagtgaaagggcggtgccggagtttggaccaaatgatctcattctgccattcttgtaccattttcctccgttcgcttcgtttttttcgctacataattttaaataaaataatccaaatgagcaacttcaacaacagcaacaataatacctatgccgaaactgcttatgccccaactacagacaacaatatccctgacgctcagcgctggtggatttgggctgacgaaatcgaccaacctcccgctgagcgccaaattattcttggagtaagtctgagctggctgggtattgatatttccatcggtgcatgtgtacccgtgccatttcagcaacatgagcgaccgggagtggccctactcgtaaacgacataccgatgcctatatacactgtggaaacaccngtggtggattcatcaattacaa

SEQ ID NO: 27728 - DNA, 1592 bp, Heterodera glycines
atatttttttgcacggatgggcttaatgtgccataatgagagaacaatacaattacgcgagagcagtaagcttacatgtaattaaagtggtttatctgacatttgaaattggaaggcattttttaaaatcaacaaaaaaaaattaattgaagattttcggcccggatttgggatgccatcatgatcagactgaaaattgcagcagcaaggcccgcccttcccgttccctagtcgcccaaaaaacaatggccaccacgaggacagagagcagtgaggaagtgcgctttatgcggtgggcagacgtagcaaaagtgggcgagtgagcacggcgaagggggcgtgtcttgtgatgagtgatggcggaagtgacagacattgagagagactgagcatcactaagggttacggtagggcgccaattcaaacgcctgtgaaggggctttagtcaagagagagagacgaaaggaccattcgttcgttgggcgatgctcagcacaagtcgaattgtaatatgagagagaagtgatattttccgagaatagaaaaaccaagatcgagattttacacttaaaaatcgaaattctcttattaaattttaagaatcatttttcgggattctccatataaatttttgcctctaattttgagtcaattaatattctttaaaaatttggggatggtttgtccacagcggttggccaaaatcggaaataaaaagtgaggacaaaaggtgaaaagtgaatttttgttcagccaattttattaattttcaaaattaaaaatctcgcttctgagatatgatataaaacgattttattgttttctgggtcaaagctttttctctaacatgatgaaaatcctttggtaatagaacagagattttgtcttaaaattcaatttttaggctttttctttatttggaaaatacttaaatagaaaataaataaattttaataagtaacgaacgcaaatgggaacgaacccatgattagggtgcggatttatatattttatatatttattctgcagctttattttgatgagaaatgcacaaaaaacctcctttttagccgaaaatattttcattttaatgtcattatcaataaattttaaaaatatttaaactttcgcaacaaaatatttacgaaaattctttaactttttatctgctaaatattttggcattttgaattttgcttgtttttgtgcaaaatccgttcacgaattaggcaaaagtccaccaaaaatccccggcggcgcctgatcggcccatttttggattaaatctttaaatagtttcattccaaaatgctgaaattgaaagtcggcttaccgggattccaatacggttttgtctggatctcaatcccggtcctttttacaaaaaaaagctaggaccgagatcttggaaactcctggcgggatcccgaccccatccagtctctagcaatatgcaaattaggctttatattacgctttaataatgtgctggtttttgactcttttttttatacctttttcacatttttcgtgcctattttaggtgcctatttaagaaattttcgtgcctaaaagttcgggctctagtaata

SEQ ID NO: 27729 - DNA, 1446 bp, Heterodera glycines
  unsure (1)..(1446): unsure at all n locations
aaaaaaaaaaaaaaaaaatttttcttttttttttttttttttttctttttttaaaaaaaaaaaaaaaaaaaaaaaaaaaaatatggggggggggtggggggggggggggggcccccccccccccccccacccccccctcctctcttttttttttgttaaataataaagaataaaaaatatattttattaaaaatttattttttttttttttttttttttttttttctcccctccccgggggcggggggggggggggtggaaaaaaaaaaaaaaagaaagaaaaaaaaaaaaaaaaaaaaatttttttttttttttttttttttttttttttctccccccccccccccccccccccccctctcttttttttttttttttttttttttttttttttttttttttatctaaaaataaaaaaaaaaaaaaaaaaaaaaaaaaaaaaagggggggggggggggggggggggggggggcccccccccccccccccccccccataatgttttggcgggggccaaccgaaacaccgacgacgctccctccccagaagagccatcgccgacccccgctcctcgctcgctcgcttcgcgagtgctctcgtttttgctcgcctcgcaatcgtcgnncgaccggcggcggctgcgacngcngagcaaacagaagaagaacactcactcactgccgcnncacagannaagnccatcatccctctttctctgcatatgtctctctttactctnnttagatggatctctctctctctcgttcactatctcttttctctctctttctctatctcttctctctccctttctctctctttccctatgctctttttaagtctctctattctctatcacattcctctctgttctctattagtctctcactttccttctatgtctctctatgcctttccctctaggcaaaataactaaaaagataatttaaattttgagaaaaagctgatccacagttagaataaaagattaattattgaatttttgcatgagtttgtcataatgtttaatcatcttttaaacttcttagtaaaatttaaaattaaaaggagaataattagatttccgaattctgttaagaatttttttttggcatttatgggataaaaaaacatttaaaaatgttttagaattatttgttctaagacctagcccttgaaaaggcttaatttttgatccttcaattttttctataaaccgaaaccctaccaccactaccagcgagcgagtgtaatgagtcggtaaagtgtgaaaatcaaaggaaatgcggcggcggttggatgcgcctgtgctgcatccgatgctccgtctctgattggctgtttccctcgtcggggagaagccgatttcaccaccctcatttcttttcttctccacaccacccaaagtccacttccttcacccaacacaattcaatttgacttcaa

SEQ ID NO: 27730 - DNA, 1249 bp, Heterodera glycines
cggtcaatattttccaaaccatcggagtggtggacggaggaggacaaattggacaatttcacgcaaattgaggcacttatttataaatccaattataattatttagggctttctttttttaattacatttttcctggattctccatagcccctaatgaattttttcgtacatattttgcaatttttgaggatttttcaaggaatttttattgtgtcccaaaaaagttcataacttagttattattttttttttgaaaattacttttaaaacatcgattttaccaaaaaaaaatacaaaaattaatttttaaatactaaaaggtgattctaagcctatttagctcattttttggcattttgtgcctatttcacccgttacaaagaattaaaaaaaaatttaaattttatttatatattggtggttttatactatatttcatctttttagacataatttatttacatatttagcgatttttcttacgtaaaaaaggaagccctaataattattaaatataattcgaattttaataaatgtaaataatttaaacttgctcagattgcgggcgatgtctacccaagcagtattgaagagccccaagtgaaggaaagggttggaatttgctgaaaaaatttaaaaatgaatttataaattagggactttttggaattttttaaaatatattttaattcatttcgaattttttaatttctaaaatttcaaaactcttaaatgattttttcttcttcgacttcaaagggttggaatttgctgaaaaattaaaaatgaatcgacaaattagggactttttggaatttttaaaatatattttaattcatttcgaattttctaaaattcttaaaaatcaaacataattgattttatttcttcgacttcaatttgtttttactttaagcctgaagctgtcaaatcaaaacgccaaagttggtccaaaaaatttgaaaatgcactgaacgccggggacaccgttgtaatcagaggcaaaatggggaggccagaaatgggcgacaaacaactgagtctgtccttctatcttatgcacaattcgcccgaatttaatcgttacggtaggcattttctaccgtttcccaattccttattactgtatgccttttttcatttatttttctctctcattgtcagtgtccaaagttgcctggtttttgttccaaaaaggatggcaatttgacgatgggccattataattttgcggtatgaaatgtttta

SEQ ID NO: 27731 - DNA, 926 bp, Heterodera glycines
catcgcccgggggggggggggggaatttgcaaattgcccggaaacggggcattgtgagcggcctcatttagtgaatattaaatcactaaacgaaaacaaaaaaaataatgactcgaagaaaaaaaagccattcgtcggcataaaaacaattaaaaattagggacattccattctcggcaattagccgctttacacatttccaaatttggaccaatgcgatgacccactcaatcaaaaaacaacaaaacaacaaccagctgcgggcaattcatttcccgatttattggccgatgcgaaagcttcgtttcgtctattttaagccgatcaaaaacataattagcaaaaataattattataaaaagcaaatgcaattttaatttatatattcatttaaaaaattatattcaatgaaatttataacttagaatgttttaacctattttcttgttcattcccacatgcgccaaccttttgtgaatttattgccccccccccccccgctgccgacagatcaacgggaccaattcgcaacaaatgctcgtaaatcagtgccacgaacaatcctaacgaatgggcgattaaaagagtctggcgattcggctaaaattgtgttcatttaaggataaaagggaacacatgcgaaacataactaaattttgacagcgaattttggcgttttttcgctaaatttgaccttttttaaatggtcatttcaattccaatatttttttaacgtttcgttccattaataagaggtgaaaatccactcgacagcaccacagatattcatttgttccattgaaattgggcagcgaagaggacaatgagcaagaaaatgccaaaactgtgaatgtgggcgaaaggatggcatatcagatagcaattggacggggattgatgctgaatttggggcggggggggggggg

SEQ ID NO: 27732 - DNA, 1060 bp, Heterodera glycines
cagcatttctcaatttgcagaatttgtcatatttatatatttagttttttgaaagtttatcccgcataaaacagacagtctttgattttcgccttttttagattatttgtgcagaattctattgacaagcaattaatgtgataaaggaaatgcgatcgttcaacagtaaatctcatcagtatgactcatcaaagaatttccaagagcttttgtcgcctcgtctcttccagcgtcgacaacaggtttaaaaatgcataaatatttaagaattgccatggaatttcaattttcattaaattcgatctctctactttcattagcataatttttaaaatgaaatgtttaattttggagattttagtttttcaatttgttttgttttttagaatggcggtacgattgttcagcgagtgctccaacagcagcaattccagcaaatgttccaacaatatcagctccaacaacagcagcagcgcgaatcgccgcctccgtccaccgtttttggcaacagttgtgatggcactttgtgccaaagcgatcgtctgaccagcgactcatcggttggttggttggcattccgttttgatgtgtttcctttccattttgctacccaaaatttatattttgggctttaatatctgccataaacatttgtattaaaaattatgagtgaaattggaacaaaataaaaatacatttttttacgtctttgagcccaatttacttgaacatttatcgtctcacgaataattctttctgaaatttacatttatttcaactaatgttttaatcgtggacctggatccaatttggacctaggtttatggacaaaatcagaattatgaaaaactcgggttgccgaaaaatggcctctgggccttggtatgaatccaactatgattttaccttttgggggtccggcgatgccgattgggcgccaccgatttttttttttaatttaacgcattttgctaagaaaaaataattcaaaattttaaaaaattgccaatttttcttggaaaaatttttcatttcggggagggggaatttacccaatctc

SEQ ID NO: 27733 - DNA, 1514 bp, Heterodera glycines
  unsure (1)..(1514): unsure at all n locations
gtatgctatatacagttttttcactatttttttcctattttctagttttttattttgcacctaaaaaattatgaaaaaaggtagctattttggtgatggtggcacggagaaactcctaaaaaatatcaaaatgctgtctcaccgcacnccatttgtaagaatcgtatttgtagaaaatcagccaagagtgttctctgtctgtcaataggtataatttcaaaaaatttcgttaattttcgaaaaagttttgagaacattgttattcgaacatttttggccataacctttttgaaagataccgaaaattttttgaaattttgcaagcgaatagagaacacttatttgttagtgctactggatgatatcaaggattaaatttagttgttttagagcaaagttataagcaaacatttattattttgctggttttttaaataacgacatagcaccatttgtacgataaatgtagaataagagcaattgaaaaatttaaatgttgcaacgacaaccacctgaaatcgttgacccatacaataatgtccataaagaattatataatctttgtaacacaattgcttcggttgcccgtcgatggtcggagtgtgcaattatttgggcaacgcttggctagcagttgcatttggcacatcatcaccaatcacagcgtggaacaggagatcaccggaattgattgacataaatctttgttaataaataaggattttttcgggccaaaatggcatgaaaacgccaaaaaaggcatttatggcacgaaaatcctaaaaagaataataaaacccaacctagaagcttcaaaccaagtagaaaatgtgttatttgtgcttaataatatgaaacaagtgcgcaaaaaagacatttggctcaaaatgagcattggacgcgtatacagaaacaacaatttggagaagaaaggaaaattcacaaggactttggattaatttggtcaaaagcatccacttttggggctttaaattataattatataaattttcaatatgtctaagtaactatccttttgaaaactttttgttttttgtaactctttataagtatttattttgattggataacttataaacatgaacattttttttcttaagaatcaaaatttttgaatgttatttgttttaatttttaattttaaaataacttagtaaattattagttgcttttcatcaaaattcaacaaattgtccatcagtttctttaattcccagaatatatcccaagtttttttattttaatgttttgagcagattaatgaagcatatgactagtctagattgatattatttaatatttctaatattaaataaacccacaaaaaatgccgatgagtgaaaatgaattcgattcgcgcaattttcttgtcattctcggtttattaacttttaccgctacataatatattattttccaaagatcaaatgcaaattgcgtatattttttttattaacttaattaaatctttgtcactaattttgatttaaata

SEQ ID NO: 27734 - DNA, 1911 bp, Heterodera glycines
tgaaaaatttggctaattcctaacaaaattcattaaaaatccttaaaattttctcccggcggcgcatatcggcaccgccggctcccaaaaatctttttttttctaaaaattggattagtataaaagtggttggcttctcctccgccacttcattattataattattcattggccatttatttgtattcgtctctctctcttcgacttttcgccctaacaatgtccttaaaagtgatttcggagtccgaaatgggtcaaaatggatgtcaaaatcgattttcccaatcttaaaaactcaaaaaacaaagtttttcttagaaaaaacaaattttgaaagataattataacaagtacccatttttacaaggcatcaaaaattgctaaaaattagtataaaagtggttgctcctcctccgccactttcattattattattttccattcgccatttatttgtattcgtctctctgtcttcgaccttttctccatgacaatgtccttaaaagtgattctgtacgttttttgcatttcttctcgacatttaccattttccttctcattttttagtctgatcgctgtaccaatgtttatgatctgttgtgccattcttttgaagtattgggaccgtttcaaaaaaccaccaaaacaacaacgaggccatcgcaaaattgagaaagtgccggaaactgtcataacaatttgcctcgacgaaattccagacaaccaaaatgaagcggaggaaaagatggcaaaagcgatgtgaaactaaaattaaaaattgccaattttcaatttagaatttcctttttttcagtttcatctccgccgactgttggctcggagtgttcgatttgcttccgacttctcaacttggcctcggaattgcgatgatcagccaccgatttgactattacgtggacgaacatttcaaaactcgcaaatggacattgaaatttattcgaattcgatacaaaatcgaagaaaatggcacaaagcaaatggaaattgtcaattacgattggaaaccaatgccaattccgcaaaatcaattgccacgcaaagtgatcggattcgaaaggatcatcatcacgtaaaattgacgcttaattgattcttgtcaacacttcccattcattttcagtttcatcgaccgaaatgtcatcgcttttctccgccattttcgttcacttttcgcctcattctgtccaattagtttggccatcagcacgaccaatgaacgcatttcggagttcatttttcacatttggccaatgctcggaaaaaactgtcgcgtgatggaattgcccgctccaattttccgccgtttgcgacatttcgtgccgtcaattctcaaagattgtatatcgcttcgcgttatcaacacctattcctatggtttcttcaccgaattccctgccgatgacagtgctacggcaacggatggacaagcggtggctaaatggcttttcactccacgtccggacaatgtgccaaaggtgttcaaatgctacttggacaaggatgatgcgaatttgacgtccaaagttgaagcattcaaaacggtgctttcttttattatttcatatttcgttaatcaatttttcccgtattttaggcttttgccaatgcttcatctcccgccaatttcattgtctccatttggtttagttattttgctgactccgttttggcctttgattttaccaacgaattgactcgggaacaattgacactgaaaagaactgactttcactactgttttctgttgatccgttgtccaattgcgcgagacgaaagcaaatgggcgaaatgggaaaaggaagcgattgactggcaaagttatggtcaatggaatcgaattagcatttatcctatttttgtggatgacatcggcgatgggtcagcgaatat

SEQ ID NO: 27735 - DNA, 1078 bp, Heterodera glycines
aaaagcctgagatgatgcaaaagcaagcaaatggaaaacgtcggaagggaattgtggaagggtaaaaaaaggaggggggaggtaaataagtaatcccgtctatgaaaattcaatttattttgaaatttcctgttggataaaggaagttgtgggtgaaaagtgagggagaaaaaagggaaatagaaaggggaagagaggaaagagaggggagaaggggagagggggggggaagaaaatgggagagaggatggggaggtaaggaaagagaaaaagagagaggaaaaaacataggatggaagagagtgagggagcaagagagagagacagagagagagacaagaaaaaaagagagagaaaaagagagaaagacatagagaagggggggggaggggcggcagaagaactgctaatcaaatactatcaaggtcaaagtgataaaaaggtattcccaaacgaacaaaaacaaaccgagtcaaaaggagtcactgaagaaatgttaggcaccggcggcgactgccaacagcagccaaagttgggaagaacggcggaggcggcagcttggtgaagtccaacagaaacgttaccgttggacaattcgttggcaccgacgaggccacccaaagcaccggtggacatcaaagatacggcgaaagacgacgaattggcggaggagggagacgaaacggcgacgcacagaccccccgggttggcacagagcgatgccgagttggccaaacccacgcccgtctccggttccgatttgctgtcggccccatcgttagccaatgccaacgcagtctccgccccgaatggtgccgtccgcttcccctccctccgcgcgtgtcctccgttttgctgctgcggcgggtgtctcttcctcgccgactgcaattttgccacttcctctcctccttaaccattttaaaggccattttaacaaaatgccaagatggtgtcgccaccgtccggctcctccgcgctttttcccgtcggcaccgccgtttgtgccgccgccatccgtgccgatttcatcgcagccactgtctgcggtttgttcggcttcgattgttgtcgtgct

SEQ ID NO: 27736 - DNA, 817 bp, Heterodera glycines
cagtgtccgtttgggggtactcaaacatttatgtgggagcaaaaatccaacgcagaattaaagtacagactatagggaagctattcccgaaggattcggtctccccataaatctgggcgcatcggttcggggggactgccccgaaaacaaaaaaatcgattttttcaagtgagtgtccgtttggggtactcaaacaattatggggagcaaaaatccaacgcagaattaaagtacaggctatagggaagctattccggaaggattcggtctccccataaatctgggcgcatcggttcggggagactgccccgaaaacaaaaaaatcgattttttcaagtgtccgtttggggtactcaaacaattatggggagcaaaaatccaacgcagaattaaagtacaggctatagggaagctattcccgaaggattcggtctccccataaatctgggcgcatcggttcggggggactgccccgaaaacaaaaaaatcgattttttcaagtgtccgtttggggtactcaaacatttatggggagcaaaaatccaacgcagaattaaagtacagactatagggaagctattcccgaaggattcggtctccccataaatctgggcgcatcggttcggggggactgccccgaaaacaaaaaaatcgattttttcaagtgtccgtttggggtactcaaacatttatggggagcaaaaatccaacgcacaattaaagtacagactatagggaagctattcccggaggattcggtctccccataaatctgggcgcatcggttcagggggactgccccgaaaacccaaaaaaa

SEQ ID NO: 27737 - DNA, 919 bp, Heterodera glycines
aagagatagtgattttttctggattaggccggagaaataaaaattaccagctatttgaaatgcagtgggcaagcacagcgagtcgcttaaatgcacaccctttgacacgtaaaatattccaaaaaaagagatagtgattttttctggattaggccggagaaataaaaattaccagctatttgaaatgcagtgggcaagcacagcgagtcgcttaaatgcacaccctttgacacgtaaaatattccaaaaaaagagatagtgattttttctggattaggccggagaaataaaaattaccagctatttgaaatgcagtgggcaagcacagcgagtcgcttaaatgcacaccctttgacacgtaaaatattccaaaaaaagagatagtgattttttctggattaggccggagaaataaaaattaccagctatttgaaatgcagtgggcaagcacagcgagtcgcttaaatgcacaccctttgacacgtaaaatattccaaaaaaagagatagtgattttttctggattaggccggagaaataaaaattaccagctatttgaaatgcagtgggcaagcacagcgagtcgcttaaatgcacaccctttgacacgtaaaatattccaaaaaaagagatagtgattttttctggattaggccggagaaataaaaattaccagctatttgaaatgcagtgggcaagcacagcgagtcgcttaaatgcacaccctttgacacgtaaaatattccaaaaaaagagatagtgattttttctggattaggccggagaaataaaattaacaaccatttttaaaggagggggggagaacacccaggcgctttaatgaacaccccctgacacccaaaaaatttccaaaaaaaaaaaagagattttttttggaataaggcggaaaaataaaaatt

SEQ ID NO: 27738 - DNA, 1627 bp, Heterodera glycines
  unsure (1)..(1627): unsure at all n locations
gcaaagggctgcgaaacatgaaagtggtcatgccctcgcttgcgccctcgatgagcatgcacgagggtcatcagtgtatgtaatttggtgtccgacatttgcgctgtccaataaaaatagacatntagataagcattgagcgacccactgaaaaaggtccaagaggcgaaacccaaatcgaaacacgtccattttacaccaaaaagcagctgaaggcgtttctcaaatattacttaggtaaattttatttacaactattagaattcttaataaaaagtctgaacaagcacccaaaattgatcagtctaaatttttcaaaaataaaaaataacaatgaattagacgaaattgtagaagcttgtgacgaacagaaacaagcatcaacattactgttaaagtattggcgccaattcaaataaataatgttggagtgttacatattacagaatttgaatttggcgcacttcgattattgattaatttggtgacgtgtcaatcccaccccctaatcgcgaccttagcaagctcattggaaaaatcggatcgccaaattccattacgattcggaatgcggcaaggtggttcaatcctcctgttgcaatcaaaacgtggaaaaagctggctctccaaaacttgacaaacccgacattgaaacacggaactgcaatgaagtcccgttcaacatcgaaggaaaatttctctgcaccgtttgccaacccaatcaagcacccaaagagcttgtggcttatggcagctcagaaattaattacgaccttttcggacggccattgattgaagctttggaagtcatctcacgtaaaatcatgtaccccgacatccacccaaaatctcaaccagccccagcagaaatcaacgccatggccattccccagccgacgcacaaaatttcggatttggtatcgctaacaaaggcactccaggctgatttttcggatgtttttggccccggattaggccgttgcacaaagccaaggcccatttgattcttaaacccgatgctcacccaacatctgcaaggcacgacccgtcccacacggcgccctttaatgccgtcaacgaagagttagaccggcttttgcagattggagcgatcaaacgaattgagttcagccattgggcagcaccgattttggccgttatgaaaaagaatggaaaaacacgagttagcatcggtttttccaccggcctcaacaatttgcttgagttgaatcacctcttgccccggcctgaagacatttacacggccatcagctgctatgtctatttctccaatctcgacctctgagacgcgtacaaatcgtcactggcatcccaggcacgtttgcctacctagacgacggcataatcgcctcataaaagcttgaagagcacatttctttgctctacaagctcttcaaacaaattcaggaattttgcctataaatccaattggaaaggtgcaaattcatccaaccgggttgctttttctcggcccatttcatctccgtgaaaggaactcgccccgaccccggacgatcagaagcaattcgccaaatgccgccaccgcatgatttgagcaaccttcgtacagtctcggcgcattgaattattatggaagatttattaa

SEQ ID NO: 27739 - DNA, 1258 bp, Heterodera glycines
gcgaagcggccgaaggtcctccacaaaattatgaatgcggcctcgcgatgcctgtagactgaaaatcccttatcacatccagaaattcatttcaaaatcgagcatgcactagcaacgaagtcctttgcgcgaagcgctcatgtcagcgcccgcccatatataccaaaagtatactgtctacaccgagcaattactgtgcaaagcatactgtctacaccgtgcaattactgcgccacaacacgctagtttatatatatatacaataaacttgcagttcgtagaaaaaattataagtgcccgtggtttgcccggagggggctgaaattttgcaggcaggggtaacttttgattgcgcatctgggaaaaataaggaaattccggtccggaagccaactgagcgccagcggcgctgaaacggccaactttgaaaaacgagctcggttttcgggctgtaacttttctcagggaaccgggagcggaaaaagtccgctgagagggcacaccccagacatgttggctacaactttatcactgatcactttttgatcagatcaaatgccgagcctgtagaaattggcgactgaacggcgctcaaaatgtcggttttggcttttcgtgaataactcgctgggggttaagcggagcgggttggcgccgcttgagcatttgtgtagtttttaaagctgcatccgatggcgttttcagattttgaaaattttcaaaattttttgagctaggccccctcgaaaatttttcgtttttgaattttattattttttgccgatttttcccaggaaaacggagaccactttcaagcaacagtttttcgagctctatcgattggtggcatttttgaaaaaatttcaaaattttccggaaatagaaaaattttccggaattgagctccccatttccgtttaaggcttataactcgtcaggggttgattttagcgaaaatttgtcttagagcatttttgtagagaattttaagctctatctaaagtgctttatctcatgtttttatcatgaatttaaaaaaagttataaaattaattgtgattttgaaactcaaaaccataggggggaccccatgtttttgcatttcatgaaaaaattttttactcataaaattgccaaaaaatacttttctggggtaatttgaggtgctgaacacgaagatgcactttatattgcgttttggattttttggagcctgtgaggaaaaatttgaaaaatcaataatttttggccctgaaaa

SEQ ID NO: 27740 - DNA, 1008 bp, Heterodera glycines
ctcttcatcctcctcttcatccccctcctcttcatcctcctcctcttcatcctcgtccgtcgttaaaaatctccccccccggcccgccgagggcgctcttcctcgaaatccagtttatgcaaattgcagctgcgctgcttttcgggtcaccagcccagcaccagtgtccagcgcagcaggcgagtgggccaaggccagcagctgctgtgctactgttttggccagccaatacataatgccaatgtcaaacaacaaaattggacaaaaggacaaaaattgggggaaatgagagagagagaaggggaaaatggagaggaaaaaaagtgagagagaatgagtgaaagaaaaatgataaagatagagggagaagagatagagagagaaagacaaaaggaaatattgcgataaaagtggagctaaaagaaagaaggaaaggtaagtggaaaaaagaaaaaaagaaaagagtaattaaaattaaatgggtgcaaaataagtaggtcaacaatgggagagagagaaagaaagtgagaaaggcgagaaaaggagtaattaagaaaaaagtaaaataaaacggaatgggagaaaaagataaaaggtgaaaagagagggagagagagagagagagaaggtaaaaaagagaattaaagagtgaacgagagaggaaacaaggaggagggaaagagagcaaagtagaagatagacaaagagagcggggagaaaaaagagatgagaaaaaaacagaacgggtggagagaggaaaaagagaaaggggagaggagagagggagagagaaagggggaaaaagagaagaatagaagtgatagaaagagagagagagagaaggagaattaaacagtgaaagagagcgggaaaagagaagagggaaagagaggaaaaaagagagggagagagaaaaaggaggaggaaaaaagagagagagaaagggaaaaaagaacacattaatggtcagttttttgcccgttgggaacgatcgtcggccgcgatttc

SEQ ID NO: 27741 - DNA, 1393 bp, Heterodera glycines
aaagaggctgaggagatcatgctcagaaggatgccgaggctaaagccaagaaagacgcattagagaaggctaaaaaggatgccgaggctaaagccaagaaagacgcagaagagaaggctaaaaaggatgccgaggctaaagccaataaagacgcagaagcaaagaaaaaggaggaagaaatgaagcaaaaggctaagcccgaagaaaagcctgaggcacctgccgaaggcgtggccgtagtgccggaagcgaagaaggcggaagagacaaaggaaaagctgaaacaggaagagaaaccaatggaagtgccaccatctccagcagaaaagaagagaaaagaggctgaggagaagaaggctcagaagtatgccgaggctaaagccaagaaagacgcagaagagaaggctaaaaaggatgccgaggctaaagccaagaaagacgctgaagagaaggctaaaaaggatgccgaggctaaagacaagaaagacgcagaagagaaggctaaaaaggaggacgaggctaaagccaagcaaagaagcagaagagaaggctaaaaaggatgccgaagctaaagccaagaaagacgcagaagagaaggctaaaaaggatgccgaggctaaagccaagaaagacgcagaagagaaggctaatgccgaggctaaagccaagaaagacgcagaagagaaggctaaaaaggatgccgaggctaaagccaagaaagacgcagaagagaaggctaaaaaggatgccgaggctaaagccaagaaagacgcagaagcaaagaaaaaggatgaagaaatgaagaagcaaaaggctaagcccgaagaaaagcctgaggcacctgccgaagccgtagccgtagtgccggaagcgatgaaggcggaagagactaaggaaaagctgaagcaggaagagaaaccagtggaagtgccaccatctccagcagaaaagaagagaaaagaggctgaggagaagaaggctcagaaggatgccgaggctaaagccaagaaagacgcagaagagaaggctcagaaggatgccgaggctaaagccaagaaagacgcagaagagaaggctaaaaaggatgccgaggctaaagccaagaaagacgcagaagagaaggctaaaaaggatgccgaggctaaagctaagaaagacgcagaagcaaagaaaaaggaggaagaaatgaagaagcaaaaggctaagcccgaagaaaagcctgaggcacctgccgaaagcgtagccgtagtgccggaagcgaagaaggcggaagagacaaaggaaaagctgaagcaggaagagaaaccagtggaagtgctaccatctccagcagaaaagaagagaaaagaggctgaggagaagaagactcagaaggatgccgaggctaaagcca

SEQ ID NO: 27742 - DNA, 1050 bp, Heterodera glycines
  unsure (1)..(1050): unsure at all n locations
gggtcccggggggccggggtttccgggctgacgcnnggggcaaggtgtgcatgggtgctaaacattgacacactcatggactaatgctgctgcggttgttcagattttgctcttaccgggtgcactgnctcacagggagtctggacggagtgtccgggctgtccgggcgatccgggagctccagggtttccggggcgtccgggctgtccgggcgggccagccgggccaggtcctccgcctgagcaacagtcttggcagcttccgtagccgccgctgccaccgtacacttgacgtgccgtacggtttccgctgacgatcaacggcagacccttcagctgactcacttctgaccagatgtccttggcattgctctgaaggggttggcattttgtcacctttcaaattgtgccattgtttttacttggcatgagctgagctcagagtccatcttcagcccaacgttggacacgtagctcttcagcatcggcagcgtgaagcaaaccgaaagcagagagatgatggagaaggacaccgtggagtaagccacgaagcggtaagccttgatgcggccgtcgaagtccattttgaataagtttgagccttgagggggggggggagaatgagtgttgggataggacagaaaaggcagaggaaaagcctttctcgaaatgagggaagtctcgagaaggacgaagtgaggagatggtttggtaggctgtgactgtttggagtgatggctgtgaatggtgagaagtgatcggagagggcccaatttataggggattctttttttgccgggacgcaacaaatggcctcgggggaggggaaaggcggggccaaccgcgcgacgggcggagtatcgccgatcggtgcgcccccactttttgcacatttcgatgttttttcgcgcacttcgacactttcgactgtccccgtggggccaaagcgatccatcggacggacgaatttggtcggccgatacgacgacaaaaccggtgagcgatggacggacggaatgactgacccacccatggacggccaaacggaggg

SEQ ID NO: 27743 - DNA, 1270 bp, Heterodera glycines
ttcataggaaaaatgggtttttacaaatttagcagcccttactcctaataaaactcctaaaaggtcaaggcggggaatagtgagtccgtcaggctggtcctttcccattttcctgggtttactcgagatcgggaatagaccaaggaggaggaaaaatttccgtccgtctctgcccttgcaaaagcatttggggaagcatcagaaaaaacatgtagctgtagtgtactgtttttcgtacggaaagtgtgtcggggaattgtgatggtttgtccatgccaatcgtttcgcaattcttgccatggtatttgttctttgtccggtatgggctcgtcccagcccctggacttttcccacatactctggaaaaatagtttagctcctaccaggcagggggagcataatccgaggggatcaaagaatgaagcaatggtttttagaataatcctacgggtcaatttttccggtgacggaacaatagggaatgagaaaaataaggtgtccgaactgagaatccatttctgcccaagtacaaggggttcggtttcagaaaggtggtcttcagatggcacaacacttagaattctcgagtccgctgcgacaaaatcacggagacgcatttttgcggatgagaaaattttttgtgcctcaatggccttttctctcgcctcctcagggcattcagctaataaaagtaaattgtccacatacagcagggaatgctgttggatttccttggccaaagtgcctggcgtggtttccaaatggtgttggagagtggccgctaacaaaaatgggcacgaaacaatcccgaatgtaattcgacgaaagcgatagatgaccaaattatttccggaaagaggggaattcgggtcccgagtcctcagaaatttggaaaattccctgtctgactctttcaaactaatcattagaaaggctttttctatgtctgcccacacagggtaaatagtagccctaaattggattaatttgccggctaaatcctgtacaaattaggacctgcgaaaagtgtgtcatttaaagaacgcgagtcgcgttcatgggaagaggcatcgaaaactatacgtaatcgtttgccaaccacagtgtgatggggtaaaaagtgttgaggggcatttgtccgggtactttcttcgatgatgccacgattcaaatagtcttggagaatttcattgcacccgttgaaatattgggggtgcctctcgaaattttcgtactaatgtggaaaaggcgagaaaaggcaatgcggaaa

SEQ ID NO: 27744 - DNA, 1577 bp, Heterodera glycines
ataatatgatgaattgcgagcaataagtagagcgaaaattattagtgctcgaaaaattttcaaaatcagaatattttgtgaaattgcttcaaaaaagttatttaagttttgaaatttgagtgcaatttgcttacagattttgtcctaaaaatgtgtaatttagcaatttatgaaatttttagaaaataaaggatttagggtccggcgctgccaataggcgccgcccggaagtttttttctttaattttggctagtttcaacagatttttgtccaaaaaatgaccaaaattgcgtcaaatttaaatttccagactaaatattgacattgccatataattttataattatgagtaattttaagaaatatgaacaaaattgtgccaatatcccaaaatcggaacgattcttataaataaaaacatttttaattttctcagatttggaccttctaaatcagaacatttcttaaaaataagaacagatcaaagcattgggttataatattgtaattgtttagatcttaaaaataaaacctttatattttagcagttttttgtccatgtttttcgtccacataaactgggccattccagttttaaaatcattgtgcatgaggcgctattgaagcaaaggctgagagtgtgagcacttctaaatcatttagattctcaatcttatcaaagccttgaaccaaattccatatagtcaaggcattgtggctgtatgttttttaagttctcgaattcttagcccttgagttgggtccaagtcatactaccacagcttattggctgcaaaagggctgctagctaagctccggacttaaactttctttttttgtttgtgctttaataatgtagtacaagctcattgctctgaattttgtgattatagaatatgcgaaagtatttatttgtgtcctttccccaatccatttgcaaatcggcatttttgctgttaatataaaaattacttttcaaatgaatgaaaactatgccttgttcgaactcgaatattattgaactgggttgagtgcttaatatgagatagacatttattatttattttattttttctagcattttttcttattaaaatttaaaaaaaacaattcgtaaggcttcagtagtaaaagcataggatgacggaggatttcctggatttggtaaattatcattttaaaatcttttgattgacagatttcaatggcattatcataataaaaattatttggtcaataaatttttagaaagcgtgaaaatggcacaaaaaggcataaaagttgtcttattgttagcataaccgtttttgtgttttaaaatggtaataattcttcgaattctctataattctttttgcttattctgggaatgttttcaagtggtatatttgtttttgttatttctgagatttcattcttggatttattcttaattttattatgaatctggtacttgccttgtaaatatattattaattcagcaatttggtttatcaattaatgtgatcaaccagtccaattagggatttgggaagcttccaaaacatttaacatgtagtaaataacaatatgtaca

SEQ ID NO: 27745 - DNA, 2124 bp, Heterodera glycines
gatgttttaccatgcttacaatgggtatttgcagtacctttacccccacgacgaactcaaaccgtgggccttgttcaattgttggcaattggtgatttaagaaacggttaaggttaacctgcaaaggccaggacacgtggggcggctacagtttgacattggtgggcatggacttttgaaaatcggcggagaaatttacaaagtgttcattgtcaggtggatgcactcgacacccttttgattcttggcaatgaaactgagtttagggtctgtgcccgcaaataatttgcctaattagcctaattcagcgagcttcagacctcgttatagaacagttggatgtgaacagaaacattaatgtttcggtgttcgaaacaaacattcggatcatcggtgaccatttctgttccttgggccttaatgtttgctttttcttgctaggtgggctgctttctgcgcatatgctttcatcccgttccagaggttcgtgccaatatgacctttcgaaatggggagttttgcctgttcagaaatggctcttcccgatggttggccttgctcgggtccgttgttggatttggccgagaaatttgcacagcgattgcttccggcatttagcacaaacactggaatgccttatggcactgtgaatttaaagtactgttggcgttcctttgttttttcttttaaattaagatacggcgtcaattatttcgaaacaccgatcacatggtaagcttgttttgtctattctttcaaggttttgcaatgttttattgcttttttagtacggctggcattggcacttttcttttggaatttggcactctgtcgcgcctcactggcaacccaatttatgagagggttgcgctacgggcattggatgccctttggaacagtcgctcctcgttgggtttggtcggcaatcacatcgatgtgcagacgggtgagaaacaaacaaacaaaacaaaagcagagcaatattaatatttttccaaactaatttcccatgaatttagctacaaatagtaaaattaaatttgaggtgtttttaccgcaactgattccggaattggggctggcgtcgactcttactttgagtacttggccaaaggcgcactgctattccaacggccaaaattaatgcgccaattcaatggtgatcatttcgttttctgaccatttattcacattttttgacctcgaaaaggcactttaatcgcaattcccgcgtagaattcgaggcagccattaataaacatgttcgtcgtgacgattgggttttgtgggtggacaaggacaaggcgactgtttcgatgcaaatctttcagtcccttgaggcattttggcccggattgctggtttttatttatttaaagtttcagaaaacattattttaagactcttgtcggtcgtgttgaggatgccgttcgtataatggcatcgtatggccaaattttgcggcatttgggcgtcccacccgaattttacaatttgccgaacagagagcctgtaaaatcctttgtttttatttccattggttgtatttattctccgcttcccccgaaggtcattggtcgcgctgcttatccgttgcgtcccgaaatccccgaaagtttgttgtatcttcacagggcaacaaatgaccctgcttatttgacaatggctgcttcaattgtcgacgtacctccaacttttcatatttttaaatgttccattgtttttacagaccatcgaccaaattgcaaaaacgaactgtgggtgcgttgttgtcattagaacaacgctaaatcattctgttgttcagttttggcactgttcgtgatgttggcacgggcagtgtggaagacaggtgggcgcccgagggatcatttcactcccccccccccgaaaaagagtttttagtgtgtaaatttacaaacagttcaacttcctctttctcaggatggagtccttctttttggccgagactgcgaaatatctctacctaatctttgacgaacataattttatgcatagtgttggctctgcgaaggcaaaattggtggagaccacggggggaccatgcgtaatcgaaggtgggtattgtatgaatggaaagcataggactgggacaaaagaggg

SEQ ID NO: 27746 - DNA, 1505 bp, Heterodera glycines
cacactcaaaaagttggaagaggtgttaaaagcaatccaaattgttaaagatagcgctttgtcactcctttccacgccagcttcgacaaatgccatccgaactcgccctcaacagtggagagaatcaaaaaccaaggccaaatcagcaaatgccgtgcaacaaaaccacccggcacagcaaaaaccggccacaggaggaaaagcaattcgtggacaaccgacccagccgtgcggctcatgtgttggtactgatcactggagatcagattttcgcttccgagaagcgacatgccacacgtgccaaaaacaaggccacattgctaatgtttgccgaaagggagcattcacgacaaagaaccaacgccgttcatttcacacggtccaagtcaaagcaacatgcctacaaattggcacgactcaaggacggtggtggaaaattttggtcgaaattaacggcacaaaaatcgaaatgaatgtcgacacaggagctcagacgacagtccttaccattgaaaaatggaccaaattaggacaacctaaattgttgccaaccgacattgagaatcgtaactgcaacgacgtcacatttaacacaattggcaaatttacatgtcttgacagcattaagggacaaccaaccaaaaagctaacagcttatgtgactgaagagctcaattacgatttgtttggtttgccatggattgaggcaacggaaatgattcccaaagaaatcatgtttccggagacgcacacatcggttggaatccgcgcatcatctgccgcacctttccaagaaatcgccgatgttaagtcactcacgacggctctcaaagaaaattttccggatgtttttggtaaagagctaagacagtgcaccaagattaaggcacaattgattcttaaatccgacggtcgatcggttttctgtaaagcccgaccccttcctcatggctcactggaagcagtcaacacggaactggaccgcctcttacagatcggtgccattaatccgatagaatttagccattgggcagcacccattttagccgtcaaaaagaaaaatggcaaaatcagagtgtgcattgatttctcaactggcttaaacaatgcacttgaactcaaccgccacccactccctcggcctgatgacatttatgcagccataagcggcgctgcattttcacaaatttggacttaaaagacgcatacctacaaatggaattggatgacgaatccaaacagctctgcgttttgaacacgcatcgtggcctttttcagtgccaacgtcttccatttggcgtcaaatcagcacaggcgatttttcaacatttgatggatctaatatgtgctggaatccccggagcatttgcttatttggatgatggactaatcgcgtccaaaaccctcgaagagcacctttcagccatccatcaatggttcacgcgattcaaagcatacggattgtgcattcaacaaggaaaatgcaaattcttgcagaaagaatt

SEQ ID NO: 27747 - DNA, 1906 bp, Heterodera glycines
  unsure (1)..(1906): unsure at all n locations
gggggggggcgggtggacagcaatgtaaaagcggaatccaattcttcaatcggcggatacccctcgcgcagcccggtccgatccgaatccaatcgacgagacgggcggcgggcatgaagcggtggtcgggcgggagaagacggcggtccgctccgccgccgtcgccgctccgattggctttaccggcgcccaatggatgatgatggctttataaaaataattcctgaaattaaaggcaaacaatgtgaagccgggctgggccggtgatgcatggaggtggaagtgactgaatcactgagaatgaatgattgactaaagacgaaaattgggcgttgtttgggtactaactaaataactaactatctgctaactgatggttggttggagctggacacagcagcaaccagcagcagaatgctactgctttaatttggtccatcaatatgttatgagagagaaagagagagagagagaaagcccaaaaatttcccctttttttattttacaaattttttatttaattttttctattgcaaattaactcaattaattttaatatttaaatttaattagttatgtctgtgttttttaaagaattctatttagtcatggccaaaaaattgcttgacattttctcgattccgacggtaatcagaaaattttgtaccctgtttaatgatttttgagctaaaaattaatattggtcagtaaaaaggcaatgaatgaactgattttattttggtctccgaaacaatcggaagaggaagtcgagactagtgaagcactcactttttgactggtcatccccacaaagtcgagaggcgattaattttttttttaatnttctcgcgcaaattttttaattggaactgcacactcatcaaaagcagcacaatgagagaacacacacttcacanatttgttgatgaatgattttattgtttaacaattttttgtggccaatatttctacaggccaaatactgtataagttctcaataattcaattagctgaattcagtttaataggagaatacgcattttggaccgggttaaaatttcttaaatttttcatttttaattcgaaatttcagtcccaaaatacttctcatttaagtcaggctgattttatgaatcttgaattttagaagggcgttgcgcaccaaaatttgcattttgtctctttctttgccatttgcttcatcgtttttggcgaaatgcctcaatttaatttttaccaatgaatgggatacaaaaggcccaaaaatttgccgacatctttaaaacttttgttttttaaatattggcacatgatgacaaaatgtcgacttaaccaaatttagcaaattgttattgtcatgtcttggactaagctaatataactctattatttccaattatagaattgtataagttcaaaaaggtgtgtttatggcactttttggcacaatatggcacacatccttgcccagttttgcaacacaattgtgccattggccaccaccaccaacaaacacacaatgtccacacagataacaatctttggcgcacaatgaatgtccatcccccccccgcccgtcctttccccgtttttccgccaacaatgaatcatataaatattaaatattttctcacatcatttttacttttttttatttctttatttttatttatgtattgtaacaataaaggggagatttgctctgaatgatgaacttttctttttttgtgtctttgagaatcggtccgattgggtgcagatagattcatttgtatagagaatgaattttatttatgtccattaaacattttgctttacatagaaaatcgatttaaaaaaattaaatccgttaagtacaaaattcaaaattttattttctatcaaagaaattttttttttgcttgaa

SEQ ID NO: 27748 - DNA, 1573 bp, Heterodera glycines
aataaaagcacaattaaatcctgaaaatgcctttgtccctgaaaaggattggacttttacaaccacaacatcgactgctccaaggacttttaccacaaaatcattacaacgcgccgctttgatgagcgaatttcgaccattgagaaagtacggtaccatctaattggccagttgtacgataatttgcgtattgtaaaggttcgttcggccggcatcaaagtttgctgcggagggattatcggaatgggagagaataacgaagaacgggtgaaaatgtgaggcggaaaatgggctaataaccgtttgcttccatttggccaaggctcgtcacattggccaatttcgcacctccgcccgaatcggtgccaattaacaaattaatgcccttccccggcactccgttggccaatgccccggcgcccgaccccttcgatttcgtgcgcacaattgccacggcgcgtgttctgatgccaatggcttacatccgactgtcggctggcagagagcaaatggcggacgaattgcaggcgactaattttttagccataaaagcccgtttaatttaaatattacaaccaaaaattgactttcaggcactttgttttttagccggtgcgaattcacttttctttggggaaaagttactaacggcgtcaaatccaatgccagaaaaagacaaagaattatttcaacgattgggtctcaaaagagagcaaattgaggagaaaaaagctgaacggaatgacgaaaaagtgaccttgaacttgtgaagaaattatttaataggactgaaatttttaaataaaaaacaaggaaaatttcgtgagaggtcaaaaaatacaacaaatcaaaaaatggagaacagagaatgatattataaatttacaagattcggacagagacctctataatataacaaattgaatattcccgtatttaaattgcgatattttgcatcggtccgtggcctttcaaaatgtgcacgccgaagtcaaccaatggccgttccaacggccgacgacactccgccaaagtcctcaagcgatgcgttcaaaagattggcatccaagcggcgcaaatatcgctccaaatgttcaacaaaacgctgtttgaccacattgaattccatgacggatgacggacgaacgaacacccaaaagtcggcgaaaagagaaaacacgcggcctgaaaatgggggggggggattgttaagtgaagtgaaccaggaaggggggggattgtttttattgatgggtcataattaattaacaaactataaatttcagtacatttggattcgaaatgacaatcttttttgatatggtaattcgaatattgttagcataatatcgagtaacgaaattttcaataacttagaaattttttcttacattaatttttttttacttaataaaaaaattgttttacggattaaattcctttagagatgatttgatcttaataaatgtaagaaaagttattgaaaattattaggcaaaagtgcaaacaattcataaaatgctctgtttatgtaaaagaattttctgcccagagatgtttgattacgaaaatt

SEQ ID NO: 27749 - DNA, 1895 bp, Heterodera glycines
tgaataggagggtaacaaaaaagttgaaaattcgaaaaaaattccgccaaatattcaaaatttatgttaatgtttttggcaaaatattattaatatttttaccattttgtaattttcgactccatttttttgctgaataaaattagtgaaatttggctccatcaatacatcgccaatttgaaatatattttttccacaagattgtattttttaataatttggtaacgtattgtaatataaaatgttcaagttattgtttccatacaactacagtttggggtcggtcatatatatcatcattaacaaaatcaatgcagtactatatgatataaattctgtatataatgaaatatccaagtaaattttatttagccttggctgttaattgcattgaaacataacaccaaacttactacaattaccaaattcttagcctagttaagccccaagagcggtgattaacgcccttttccgtgtgcctaaccaattttgattgttttagcatttgaaattacctcttattacagtgtacaaaatttttacgtactaattaaagcaacagaatttcttgaaatttttttaattgcatatttacgtcatcattgtgagttcaattgcagcaccaaatacagcatcagcccaaatgccaaatgcccgcatcaaactgatctggtaattctcagtgaccatgttaaatgctatggctgaatacaaaaaattgatgaataaattggagagaaataagcataaaaaagttggcgaaagttgctttgctgttttcacattatcagaaaccttaaaaaatgaatttataatttaaacaaaaacataattattacaagagactgtatgtgtttaatgtatcaaaaaccgctaaaacattcagttatttacaaaaaaatatataaattaaaaacccgaaaattgggtaaatttgtacgaaaatatgcgttaaaattttataataaaaaacaaataaaagtgataaaaaaacaaggattacaaataaaaaaataaaattttaaaaataataattttttgttaacatttgcaattaataaagaaataaaaaatttaaatcaattaattaattataatggtatttggaaattaattgaagatttaaaaaaaaatttaacattacaagatagcgatgtccgatatgataattttttgcgttgcttgtgcaatcttaaaagcgtcgaaattgtttgagtgatcaaatttaatcgtgtaacggtccacgattcgccattggttattatgttcaaaaaagcgataatgaactgtaattcgaaattatttttaattacaaaataaaaaaataccgtagtgctagaccatgcgagagtgaaaccaaattttgaaaatttttcatatgaatttgtgcgtactgtggcaagaaaacggtcaattatcaacacatgtccaagcaaatggcggaataatgagttacaaataatgatggactgtaaaaaataaattttacagtacagttaccaagtgcaaatattatatctcatggaaaaatcaaaaattttcgagtttttaaaataaatttacaaaaatttgaaaatatgtatccaaaaaatgtgaaaatgcctggaaacaatcaacaatttttaatcctaaatttgattgtttgtgaataattgatcgtattttgtcaaaggtttagaagagataaattttacctgtaaatttacatcggatggtgcaaatgggtcgtcgattgtgaatttttggaccaacataactgatcgaaacaatacataaagcatctcagcaccagtttgagtgatcagaatgcttttcaggttaatgtgtaaaattttggtgggacaaatcaccgcaaaatttaaaaaagcaatggacaacaaaatgccataggtgaa

SEQ ID NO: 27750 - DNA, 672 bp, Heterodera glycines
taaataaaatatgtataaaaaacactgaaatatgtatgaaatatgtacaaaaactcccaaatatttactaaaatatgtaaataaaattttttaaatggtgattttttggaaaaaattctttctaaagggtgaaataggcacaaatcgtggtgagacgaaccgaaaatagtctcagtgtgggcgaaccgaaaataatctcagtgtgggtgaaccgcaaatagtctcagtgtgggcgaaccgaaaatggtctcagtgtgggcgaaccgaaaatagtctcagtgtgggcgaaccgcaaatagtctcagtgtgggcgaaccgaaaataatctcagtgtgggtgaaccgcaaatagtctcagtgtgggcgaaccgaaaatggtctcagtgtgggcgaaccgaaaatagtctcagtgtgggcgaaccgcaaatgtctcagtgtgggcgaaccgaaaatggtctcagtgtgggcgaaccgaaaatagtctcagtgtgggcaaaccgcaaataatctcagtgtgggtgaaccgcaaatagtctcagtgtgggcgaaccgaaaataatctcagtgtgggtgaaccgcaaatagtctcagtgtgggcgaaccgaaaatggtctcagtgtgggcgaaccgaaaatagtctcagtgtgggcgaaccgcaaatagtctcagtgtg

SEQ ID NO: 27751 - DNA, 796 bp, Heterodera glycines
  unsure (1)..(796): unsure at all n locations
ccaagcaaatttattgatgttttcaatgatttttgactaatttaagcttgttttaatcaattttagagcaaacgtgcgagttttgagtcgactttttgttcgaattcggctccgggatcccgaattggacgaaataggtgccatattcgtgatcagcgacatcgaaaacccctagttatttgttttcaggatcctttaaaacaaaaaatatatattttgaaaaaatttgacccaaaaggcggacccaaactgtactagtacccaaacccgaaccattcgacataaaaatttgaccatatcccaccggttaaaaaaactgagcttggtttgaaggctttttgtgttaaataaataatatacatatctctgtggccccaattttcaacccacacgaaagggtggctctataaattaggcaccacaattctgcaccattgctagcaattgtataacatggtactttgaaagtggcttataattatgcagaaagaaacacaaattaaaataaacattaattttacatattttgcgtcctttttcttagattgttaaatttttttaaattttcgattatttaaaataaataattgcaatttaatataaaattcatagaattcgaattgaacttttatataattttttacggcagtgaatggcaccaaattgagaatggctccaattttcgtcatctctcgtgatttatttgccataggcacacacgaatttatatttcaaaatttgggccttcttaaagggaaccacagtaggtatataaantatattgggtattaaatat

SEQ ID NO: 27752 - DNA, 1411 bp, Heterodera glycines
atgtccggggcgcaaatgttgggtaaccgaatccgggcatattttcccttctaagccccaaatgacaggtgctgtaagtccgaagttcgggtttcattcccatttcaaccacgacacaggttttaggtggaggaataagctgcaatcgaattttccaagcaactcattcactcacttcgcattccaccaaatatttgttcatcgattgagatttgtactcatcattgcattttgtcaaattcgagttgaaaagttcttgtagaatttctgaaaaggcttttacggttattaaattgtaaaaattcaagaatgcggtgagagtacgtagtctttgaaccaacaattcaccggtaaaactggagggaattcgaaattaaaagcgaattaatcaaaacgacttatttaagggggtttcgagttagttcgaagaaataaggcattattcattggttcggtgtttcggtaagtgttgccccaaatcataaaattgcacaccttccaccgcttccgtctccgctttgagttgctccattttaccctccaccattttttcgcattgctgccgcaccaccgtcgtctctaactcatgcaaattcagccgcgctgcactcaattcggcctcccgaccgcgctccaacgcgcgtaaacggagagaacggacggtgtccaatttctgtgaaaggcgggggtgttaattttttacgtattatttatttttgtggggtaatggtagagataatataaaatgcccgatttaaacgattttttatttcactcatgagttgtcaaaggtgctgataatgagcgaaaaatacgctatcagttttgtcatatgacaacatcaaagttatggtttcatcagtctatgattttttgtcgtattattttcattgttattttgctctcgcttgacaacctttttcttttcgttgtattggtcgtcaatcgccgatttgagtctcaaaaagcacgggcaaattcgtttccggaccgcctcacgccgtttctcaatctgaaaataaaagtaaaataataagatgaagaaaaaggtgttatgggtttggtaaccaggtcttacggtaatttaaatttagcaattctcatttactgcgcattactgaaacatatagatggacagacggcattgaagtcagcggattgcacaacccttacggaatgtactataacaatgactacggtgcagcaccatcgctaccgtacgcagcgtactggtcacagagtccagcactacagcacccaatgcgcggagccgcggcacacttacagtactccgcgtcacagaatccttattccaccgcctattggggtggctctctgagcccgatgaaagccaaactacgaagaagcggatgcttttagaataaacttaagaaaatttaggaaaattttt

SEQ ID NO: 27753 - DNA, 1596 bp, Heterodera glycines
ccccttaatagaaggttcctcagcaaaaaataatactttcttaaaaatgaattcgcttcgcccaccccttagtattgtgataaatctcgaataaaaaattctcaactattttcccaaaaaatgcagaaggtttttaaatttgaaaactccattcatctcaatttatattgcccgtttcattcagtgcttattttactatgctggccataaaaatatggagttttgcaggttcgaaaaagctcggcgcgctcttcatattcagacgtatcaactaagggcctatcgccactctcaggcgagtatggccaatcaaagcagagtgtgacgcataatcacgaagcactgctccagaattcttgtaatgtttcacggcagatttttgtgataatttttttcactgatttctttatctctacgcatatgcattatttgtttgagctcaaggccttatcgaaaaaaattgtcaataaaaacaaagtttgtttaatgaatatttacatcaaaaaattaatgacaatttcgaaaaagaaagtcaagtaatttttagaagcttttatttcatgttttgttgctcacttgttgaagccgcacatgagccgttggaaatattttcgccttttcttggcaagttttttcccgaactgtttcacgacagttaattgagtcaattattttcgccagtttcttttatctccaagcgttatttattgcatttcacttaccttggaacaagattacagtaaaataaaatattgttttgtgaatatttacgacaaaaatttatcgacaatttctaaaggggaaggaaaataaatgtttgcctaatatattaatttatattttcaaatgattgaaccggatctgttgcttgtgtttttaatattttttgattttgccatatattttggctttttggaatttttccaatgtccgaaaatttgtttgcttttacatgataagtaatgatttggttatttttgtatttttcttcttttcatcatgaaagtcatttagccattcatcccctctaatgaaaatagttttctgtagctgatttaacaatatttttctttgcactatacatgtagtatagcactggttgcgccttcaattctgccccttaatagaaggttcctcagcaaaaaataatactttctcaacaaatgaattcgcttcgcccaccccttagtattgtgataaatctcgaataaaaaattctcaactattttcccagaaaatgcggaaggtttttaaatttgaaaactccattcatctcaatttatattgcccgtttcattcagtgcttattttactatgctggccagtaaaaatatgagttttgcaggttcgaaagagctcggcgcgctcttcatattcagacgtatcaactaagggcctatcgccactctcaggcgagatatggccaatcaaagcagagtgtgacgcataatcacgaagcactgctccagaattcttgtaatgtttcacggcagatttttgtgataatttttttcactgatttcttttatctctacgcatatgcattatttgtttaaacggcaaggtgtcaataaaaacaaagtttgtttaatgaat

SEQ ID NO: 27754 - DNA, 967 bp, Heterodera glycines
agcgagcgtatgtcgcgattatcccaaatcgacgaggcgactccaccacctccggatcgaccgaatcggcacggagatggacactgctgctcacattcacaatgcgaccgccttcctcactgcgctccaactttggcaggagcaattcggtcaacagaaaatggccttaatgcattatattttattaatagtagcaaataaagacctaaaaagttggactgccaagtcagctcatggccatcgacagttttggtgaagcgtggataaaacattatgcccgcgttatttatcagaatgtccaatttgggttcatctgagtattaatttgggtggattgaaaggatataaactaaaaagaggcatacctctgttgaattctttaacaaattgatgaattgaagaaaagtcggccaaatcgcaatgacggacaatcatccgagtcatatcgcaaccgtactaatgaaaagaaatgctatgtaaataagggtgatcggaaatttacccgggaaaacagctctcgggcagtcgcttgtccctgcgagacgcttcgacacgccatgtacacctgaataacggaaagtcaaaataagcggactcatcccttctggatttgctgagtaaaggtaaaatgtaggagaaggtcttcccgcggggtgtgcccaaagcacggattttcaataaaaataatttaaaatttataaaataatatacgatcaatttacaaaagtatggtaaatttaacgagtaaatggattttttttcttatttttttaatgtccaaccgaccttcacataacgcaggttcaactcgcgcaccaattgcttcccaattccgctgttcgcacccgtcacaatggccaccgccccacgagcactgactttctcgcgaaactgtgcacctttaatccattgacggattgcgaagagaataatgaagacgataaggccaatgcacgtcagataaagc

SEQ ID NO: 27755 - DNA, 908 bp, Heterodera glycines
atccgattggagagcccgattgatttggcattggatgaatagcagcggcgtttgagacggagtgtgaccgacaagcaaagggcctgtggaaacagtgaaaattagaccgacattgaaaaggcaaaagccaacctttaaaactttccaaaatttcgacgtatctccgtccttcagcatctttaatgaaacgcttcaggtcttcaatacagacagtgctaactgagcgggttgggtccacgtaaattattcttccaccacggccaaaccgaacgggagtgtggggaaaacggaaaaacatcaattctaaacggaaaggagaaaacgccaatttgaactaaaagaggcaattactaagtcgtttcataaagatgaggctggaaacatatttccaagtgtttttcggggatccacttcaaccaattccgaaccccggaccgaaattcgtaaagtcaaaaactcaaatacttcgatttcattttagtctaatagttttgaatgattagtttgaatgatttttattgaagcaataatgtcctttcacttcgtttctaaaaatttttcgaagggacgggaataaactttattattaccttttatttttactaataatttttggaaggaaggaaaataattcatttttattgaacgacttacaagggaaccacccgaactgtaactcggaaaacgtatataaatttgtttggtatcattggatagagcagggtcgacttctattgtgaatttttagttcgggtggttcccttgttagtagtcagggccaaaaagaggcgatcctttccgacctttagccagcgagtcggtgctgttcacgtcctcgctttctatgcttggtcgatcgcttaaccttaaacagcaaaatcagacaagtcactcgcgctttgtcccac

SEQ ID NO: 27756 - DNA, 1762 bp, Heterodera glycines
attcttacgaagtcatttcgaaaaggctttttcagttccttatggaattgtcggaggaaatggacaatttggggacgaatttggaggacaaatcggacaaattggaccaggaaaatgaaaatataaaatgggaaaattggaaagaaattgtgggaaaattgcactttcgaaaatttggcattgcaattgttaagggacgaatagaaaattgggaaaaattgggccaaaaacagaaaacattggcactttcgaatattgtcgaaaaaagagagaaaattttggaagaatttgaaagaaatttggaacaaattgaaaaggcggaaaaacagcgaaaattgggtaaaataaattaaaataaataaataaaatttaaatttaaaaaaattcttagacaaaaatattttctgtcaatatcaaagcgacacaaatttatcggaatttattgaaaagaaagacaaaataaattttagtgagaaaaattcgcaattatttccatcagaaaaatggcaagaaataaattcagtcaaagaatttgagagaacaaatttagaggaaaaggaaaaagtagaaatttaaaaattaaagaataataaaatataattaaaaataataattaaaatcattttaaggaaaaaatgggaggaaaagcgtcggattatgggcacaaaaatgggaaagaaacgctaatcgaactgagacgaatattcaatgaatgggtaataattgctaaaacatcactaattaatagagagacctaaattttgaaaagacgggatcagatcataatcaggggtaggaattgggaacaggctgatccccgggattaaaatcctgattttgtcggtcgggattccgatatttaaagtgatcggaatcaggattcagaaatccttacaaaatcctgatcctgtccgccggtctctacaaattataaatattagcattaaatttgtcattttcgtttttagtccgacgcggcgcaatttcaatttccgagtcgcttctttatcaaacatttggacaacaaattcgagacaatttgtattttgccggatggatttgaccacggattaattttcggcacttccgcggattgcgacggaaacggcgccggagggaaatgcgcggacaattcgctgcactgcgcactttgtcaagttggcattttcaattaattgtttttaaaaaccaaaattgttttaatttaaatttaaactcccttttatcaatgaaatatgaacgagctggggaagcttttcaggaaaaaaaaaaattttggtaagaattttaagaaattggaagtccattttcccatttttgtcgatttttaactggtttttccgttttttccttcccattttattttggcacttttcgccataaaatattttagcccttttgatcaattgccaatttgttttttttaaattttctttttcttcagaatttggagttaacttttctccaaaaattccccaaaaataatttttcgtccgtcccatcgatgcgaattgggctccaaaatgtgcaaattgacgtcaaattcgtccaaattgcccaatttgcgcacattccgcgcaaaaatttcagcgcaaaacaattggaaatatttttgataaaattgggacaaatcattcacaaattggaggaaaattaccattttgacgagcgggcgcatcgatacgaaatgtgcaagagaaaagagttgaggaagaaaacctatgaagaaaaggaagccaatggatacggtaagggagcgact

SEQ ID NO: 27757 - DNA, 975 bp, Heterodera glycines
ttttggacaaaacagcttgccgtactaaactgactctcgtactaaaccgaccctcgtactaaaacggccgtactaaaacggccgtactaaaccggccgtactaaaccggccgtactaaactgacccggtccggtcccgtggcactctactactaatcatcaatccttcccttttcatgactataaaaatgtttgttttttcgctttgtctcgcatttgaaaaaataaaagtttctaacggaataattctgcaattcttccttccctttgtgacatctttcggaactcggccaaaattgtgctaattgccacaaaaatgaaccgacggtaataaatttttaaaagtcaaacaaattagtcatttatttaactaacaataaactgttttcccacaattttagttggatttgcaacgacgtttggatggacattttcccatcatttgaccgtgctcaactcggcctcaaattggcacttctttcgccacgtttcgatgcgttggtggacaaacatttcaatggcaaaagcgaattgacaatttggagaacaatcgcaattcatcgcaaggacaaaggaacagaaccgaaactgtttgtaaagatgggttacaaatttgtggaatttccgttgcccgaccgtccgctgcccaacaaaatccgttttaatcaccttcggatttagtaattaaaaaccagagagctatgacaataaaagcatttatttcattttcagttacatcgatcactcagtcatcgcttttcttcgttcaaatcaccaaattttcaacaaaagaggcacctatttatatttgtggattccatcaccacacaacacggatggccaactaatttgggatgtttttgttcgtgaaatttggcccattttttcggcaaacattcaacatttgggctttttcccgtggtgatcatttggacaatttgcttcgtcgcacttcgcccacaattcttaccgatct

SEQ ID NO: 27758 - DNA, 1015 bp, Heterodera glycines
atgtgcattcgaatgttttgtgttcaaggtttctgcagttcgcactaattatcgcagttggctgcgttcttcatcgatccacgagccgagtgatccaccgataagactagaattcattcttcaacagaagtgtaaaaaaaaataatgaaaaaaaagaaaaagctggcggtgcccgagctgacactcattgagtcttaagccacgtgctaggccaagcacgggccctaccacgtcgtctcatcacggccacggacgtagcagcaagcacaaacacaccgctagttacggcacgtaagaccgggaacgaaaccaccatccccagtcagtgtgttatgtgcctgccacaacaaccgctcaacgacgcacagacgccaacacagccgttaggtcgccccacgagcgtgcaccccacattggcgcagcgaaccaaccaagcgaggcagcccgccaccgacacattgccacgcagcagccatacacaggctttaacatgtgcagcactgagcggtataccacagctccaacgtatggaagcaccccaaaagcatggctcgtgaggcagctgccccgtaatgttgggcagcgtccacaagtcagctcgaacgacctgtgcccgtcagcggacgggggcatttggtggtgccaacgctagcccaacaggacagcaggtaggtggtgaataggaatcacttgggtaatgatccagcagcaggttcacctacagctaccttgttacgacttttgcccggttcaagccactgcgattaaatcggttccagtctgcataccgaccgaagccggaacactaaccgtccccgaatttctcgaaatggctcagtcccgggcagcgacggggcggtgtgtacaaaggggcagggacgtattcagagcgagtgatgactcgcccctaacaggaattcctcgtcacggacaatatttgcatgtccgatccccatcacgcaatttttcaccggttacaaaccccttttcggggaagacagcacgctgattttgc

SEQ ID NO: 27759 - DNA, 1436 bp, Heterodera glycines
  unsure (1)..(1436): unsure at all n locations
cctaaaaatatgttttccttttaactttggaatttgaatttttgttcgaatttgggttcgggattcggaattttgaaaaagaaatgtcatattcgtgattagcgccacaaaataccctaaaaaaattatttaaaatgtattttgagtgtttttatagtgcggtcaattgagtcccagctgagtttggcactccaattccggcactttttcagcctgaaaaagggcaagcgcgcaccaaattccatttttccggcccatttataacctttttacatcgattctgaccgtttttaagcaattttgagtttggtgactaagaccaatattttcccctcccccaatttcaggtccccttttacaatattttcttgataaatttggaaatttaccttttttgtattgtgaccaaatttatgtttttataaatagggctgggatttttagttttttaactattttttctgcggctttatttcgacgagaaatgcacgaaaaacccatttcgcgatttttcaaatttgtaaaggaaaattcactaattttcttcaaatatactaaataaaacccatatttttaagggaaatatcgaaccaaaatgctcaaaattcaatctaaatctgcatttattcgtgactggatcaaaaaaattgacggcgaagaaatttattcattaatggaaaaataatcttttgtcaagtttgcgaacagcaggtaaagacaacgacgacttgcaagaaacaacagcagaaacatgataattttccacagattccatgctcgcaatattgccatctaaaacaacactatgaaacggcaaaacatcgcgctaatttggaccgattttcaaaaaagaaaagcaagcagcatcagtcttttttgacaacgaataaaataaacaggaccaattttctgccgacctttgcaaagcatttgtatcggccaacattcctttttttaaactaaacaatgcagttttgagttcatttttggaaaagtattgttaacgcaccgtgccagaccagtcaactctacgaaaaaattatttggcacaacttttttctgaggttatatcaatctttcaaaagctttaaatttttgatttttagacaatgacaaaaattaaagaagacattggcgacgcatttgtttgggtttcagtggacgagactacggataaaatgggcgaatgatggccaatttgttgataggcaaattggatggcaaaaaatggcaccccccgcatttaatttctgtgaaagcgcttgaaaaggtgggcagtggagcaatggcgtgttttgtcaatgaaggatttggtcgcttggcttttgctcctagacaactttttaattttagacagtgtttctgctgatattaagaaagaacgagtgctctttttggtgacgaagaggggccngcgtacatgaaaaaggctggaa

SEQ ID NO: 27760 - DNA, 1187 bp, Heterodera glycines
  unsure (1)..(1187): unsure at all n locations
cgcccagcaaattcattcatcctcccctccccattcagtgtgcccccatttattgctgctgatcgtaaaaagtgatcagcatcagcagcaggaatcgtgcctgttgctgatcattttcagcttttgctttcgacgcatagcttatttgttagcgctaaatgaccaacaactgcagcagcaggtggggcaaaatagccatggcatgtgatgtgatcagaccagcgattttatgaagcccggctgatcaagccccaagaactaagcttgtcctgatcagtgnaacncaanagtcgagagatgatacatatttcttcaaattcaatttgcatttccttagcttttatctcgcaaaatcattttgtctcaatttccgagccttaaaaatgccccacaaatgtgctgcctattcgtgccatctttgcctgctgatcaaccatttcaaatctgctcatctgaaataaaattatactgctggacaatttgtccacccgttttaaatgttttttgttgtcccgtttcgccgattacgaccattatgacagcgaattcaagaaattcgcttgacactaatttattagttcattaattaaggggttggtcccggttaaaccattaaacttggccatgaaaccctgtcccataattttcggaccgttggccttgatgctgtcgaaattataacagggccatgaaaccgtgacctaacaacaagcaaaaaatctcgaattgtttgcaatatcccgacagggtttcccataatgaatattttctcgaccaactgttggttccgatcagcaggagaaaaagaacataaaaacacggtgatcagcaattattttccataattccccgtgaaacattttgcattactcatgtgaatacccaaatgatcatttagggctttaaattatattgaaatccatatttcctggacttttggagccgagcactgaaacgcacgaaaaacatgtttttagcttggtttgaagcttctagaataactttccatatccatagttttccataattcgagttttatgcacagatctccttattttgacattaaagatacccatatgcatcttgacatttcttgaaaaaagctctattaaaacggggccccatcaactaatttgcctttttaaaccgtcaaggtcggaaaattctccatttttttttaattttct

SEQ ID NO: 27761 - DNA, 1838 bp, Heterodera glycines
  unsure (1)..(1838): unsure at all n locations
ttctcattctaattaaataagcttgatatcattttaactctcctgatagtccctaatagcctgcaaaatttcaaaaaattctattgaaacacaaaaaagttatggccaaaaaacctcaaaaaactgactttttctggccattttggcgccgcacgctatatcttttgtcaaacagaatctatttttactaatattttgcaggctaataaagaacacttaggcctatttaatggtatcaaaattattttatttggttggataagaagttataacactttaaagttcgcggcgccaaaatggcccacgccaaagtgaccccgacccgtttttttcatttgtgagatacggtagtcatataaagctctgaaattttacgcgtgaattggtaggataagaaaacataattacatatttatgataagtgtacatatgtagtttttcaaaattttatcgatccttttggcaaagtgccgtccccccccccttcctattttggcatatccctccctcaccccttcagtgctcatcaccatttcgcttgcggttgcgctggtcgctctcgtcggcctttgcgcgttgttcattttccgcgctcgtcatcacaaacagatgcggagacgagcccaagtgtgttgagctcggctttctataaaattcaaaaaattgtagactttttgaaaattcatccaacaataaattcgcatcgaaaattgtaaattagtgaattaagtgtttttgtttaatttaagcaaatgcgccgacgacgaggcttttccgctggcggtgggctgctaacagtgagcaacgtgaaagggtgactttttgaaatttaaacccactaattgtccgtatacaaaataatacgtgtcgaaaaatttcggtattcgggtcgagacggtccaaaaaaagttttggtctggtttctgggcgaaaaaaggcgcgatttagggtgaagtcgatttgataggagaaatattgtctggacgaaaaaatgtctggatcgggagttgggcggcactctgttttccacgtgttgcgactttagcgccgcggatatttgcgcctcccagcaaaaatggacatttgcgctgcccagtcaaaaaaatgttttacaaattttcaacgaattttactaaagtttgtaacaacaaaaaaaaaaaacaattaaaagaaattcaaaaaaattaatcacaatgaaagactctaactttttgttttttgcaatgcgtacatcagcatcattaggcaaatatgatgccaaggaacacaaaaaatgaagacttactaagccacattaatatgtatgatgggttttgtagggcgacgcaagtgccgaggcgcaaacgtcggtacaccgttttccactctttggccacaataccgaaaatgcgtcagtgacaaattaaaatttaaaatattttaaaaaatcctgcctcgttaattatcactaattgccccccttgctttggcccaaaagtctcgggcagaaattcccttgaatgtaataaccaagttttgttcatcagtggtgcaccagttgatgggagctgtctgttttctggcatcccgtcctattgcgctggcggcagcaacaatggcgccggcggcaacgtgtacttgccgaacaccacacagttgggcggtggcagcagcggtggcattggcattccgacacattgtccatttgaaaggagcaacaaattctatgagtcacaggtcactagatatgtgatcactgatcacttcctatttgatcattttgtttttttaattagaatttttcgtcatttgtctgaggaaagaatcccgaantattttgccattttttgggattgtct

SEQ ID NO: 27762 - DNA, 925 bp, Heterodera glycines
atgtgaaacgaaatagtgcacaaaagggagggatgctagacgaaaagaggaattgtaggatggacgcaccgcatctgatattacatttctctgttccacaagtggtcagcggcgactgtgctcattgacacgtagttgtccaattaaggtacttggactttccacagtaaaatgtggtgcaaattttggaactgtcccgcctcacggcggggcttaaaagcatttgtagcgcaataaaagttttttgttttgaatttttcacaatttatttaaaaaagccaaaaaatccggatccaattttaaaaacgaaaatagtgcacaaaaagaagccgcctcacggcggggcttaaaagcattgtacatcataattaaaagcgaaaataattttcgtatattttttcacaatttatttcaaaagacaacaaaaaattgataaaatgttgaaacgaaatagtgcacaaaaagggagggatggttagacgaaaagaggaatttttaggatgggacgcaccccatctgatattcccatttttctgtttcacaactggccaacggcgactgtgctcattgacacgtagttgtccaattaaggtacttggactttccacagtaaaatgtggtgcaaattttggaactgtcccgcctcacggcggggcttaaaagcatttgtagcgcaataaaagttttttgttttgaatttttcacaatttatttaaaaaagccaaaaaatccggatccaattttaaaaacgaaaatagttcacaaaaaggagccgcctcacggcggggcttaaaagcattgtacatcataattaaaagcgaaaataattttcgtatattttttcacaatttatttcaaaagacaacaaaaaattgataaaatgttgaaacgaaatagtgcacaaaaagggagggatggttagacg

SEQ ID NO: 27763 - DNA, 1317 bp, Heterodera glycines
ggacggttcggtgccagccgtttcagtgccagcccaagttttggactacaactttttttattgttgaccaaatctaacaatcttggtatcattcgaaagcccttcataagccctattagccttacaaaaaaccaaaaaaattttagcttgtaaaaaagttattaagaaaaaacttccaaaattttggtttttttgttatttcatgttataactagggatgccaaaaatatggatataaaatcgcaaaatatggccataaaatatggaccaaaaatcgcgaaatatggacataaaatagcaaaaatctcaaatatggaaataaatggcaaaacatgtcgggggtcgggtcgggggggagctcaaatgtcgggggtcggggaccccgatcggtcagatagctatggcagtaaagctaatcgctaagcaataggttagaaaaagcttctaaacatataaagcttcgaatgatactaagattattagatttggtcaacaatgaaaaaagttgtagtccaaaaattgggctggcaccgaaccgtcacctaccgaaaaataggtgctaaaaattggaaaaatctagtgtttttatgcactaaaatccccaaaatgtcaattttagggacgaatttttgggaaaaattttcatttcttagaaaaaatatttctaaaattttggtcaattttagtgtatattttttagtttttttttgaatggttcttagggtgtatttttcgtttttattcggagaaaatgtgtttttcgtgcttctctcatcaagtactatccgcaaaaaaaaggtaaaaaccaagaaatccgggctctagtgcagtttatgagtccaatcgacctttatgagtccaatcaattgacaatcccccgggtttttatatgtacaataaacttctgcgacgccatttgttgacaacgctcggttttggagattaatattttaataatcagagagaaaaagtccggattttgatgccattctcattcgatatcccaccatcatcaatcaccgtcaacccaatttaagaataaatttgtcttagaaaatgcccaaatgataccattactaaaatttcccaccgtttcccttccgcacgacgcgcggcagtactacagcgattttttctgcttctgatcacttttctccttttcatcactttttggctgctgctggtggtgttgtttctccatttctttacgatttagcaaattttgtgggaatttaggaaaggctttatttaatatttgtgaaattaaaaaaaaaaattttaaaaacaaaaaaatgatttcattaaaaatggattttt

SEQ ID NO: 27764 - DNA, 764 bp, Heterodera glycines
ctcctgcatttcatcactgggattcaaatctccggcatttcaatcactgggactctattctcttgcatttgaatcactgggactcaaccctccagcatttcaatcactgggactcaatccaccagcattccagtcactgggactctgttctcctgcattccaatcaccgggactcaaatctccggcattccaatcactgggacctaacctcacctggtccttcggcatcgcaatcaccgggactcaattctcttacatttcaatcactgggactcaacacaccagcattttaatcaccgggactcaacacacctgcattccaatcaccgggactcagctctccgacattccagtcactggaactcaattctccggcattccaatcaccgggactcaactcaccatcattccaatcgctgggacctaacctcacctgattcttcggtatcgcaaccaccgagactcaattctcctgcatttcaatcactgggactcaacccaccagcattccaatcaccgggactcaattctccagcatttcaatcactgggactcaaccctccagcatttcaatcactgggactcaatccaccagcattccagtcactgggactctgttctcctgcattccaatcaccgggactcaaatctccggcattccaatcactgggacctaacctcacctggtccttcggcatcgcaatcaccgggactcaattctgtgacattccaatcactgggactcaacttaccagcattccaat

SEQ ID NO: 27765 - DNA, 1303 bp, Heterodera glycines
  unsure (1)..(1303): unsure at all n locations
ctgtagaaactccacaaatcgttcacnttaaaataaaatttttgtaattaaatttaaaaacaattaattaattaatgcattttaattaattaattaatgtcggccaaattaaacaaaataaattcattaccgaacggatgttctctgtccattttatagtcattgttgaaagaggagacggaaaagattggacgagtgttggccaaattggagccgaattccatggctctgcccaacacatggacatggagaaacgaaaaaaacagaaaaatggcgagaaaagaatacatttaattgaatatattccaatgattgcttaatggaattgatcaaaaatgttttgacaaattttgcaaatgattcgacttattttttaagctttttctgtttgataatttcccaatgagggcgtaattggcaaaattgttggcatcaatataaaacatggaatgcattttaattaatgaagcaaatttatgaataaatggtccatcaaatgaaaaaacatttgatgagaagcgatgcccgggggaatgaaacaaaaaaagaataattacattttgagaagtacacaatcagacttgttatttattataaaaaggccaaaataaaataataaatatatcaaatgaaatgtaaaataattttaattcaaatttacaataaagtcttaaaatattagaaagtccttttctttttcgtttcgagtttcgtttcaatgtgccaattttttggggggtttctttcgttttctgggtttttctgtcgagaaatgccgacaagaaacattaattgtaagtcaaaatgtcagtctttggcaacaaagacgagcagttaaactttaagacaatatgtatttggcagcgaaatgcagcggaaaacggaggacaatggtggacaaatgagggcactttttgttggaatcaactaaaattaaaatggcaatttaaatcagaggtcgcatttttacttatttgtaagtattttacttattttgagggtccaaaacttacaaattttaaatgtacttatttgtaagtaatgtacttattttggcattctagagaaattcaatttttttatctttgttttgaagcgaatattaatttttttttgcagtcttgtttttttctctttctattactttttaattcgctttattgagattcataaaggttctatttagcctagcttataggttcatggctcctccaaaacataaatataaatttcatgctgattacgagcgtgaatttcaaggcataaaaagaagtaaaaagggcgatgaatatgcgaattgtgt

SEQ ID NO: 27766 - DNA, 1415 bp, Heterodera glycines
cgctgaatttccagaaaataaatgggacagagagtggggaagagatgagaaaaaagtggagtccgagtgagagagagagagagagagagaaaagccaggagagagaggagagagaaagagagagggggagaaaagagtgttgcaattggaatcaacaaaatgttcacctcgcatccgacgccacgaaatattccacctcaaagtttgccgagtcgcatggccgaacacttcgcgtcgaatcgctgcattcgattttacgtgccgtagaatttattgtgtctaaaaaagataaatgagtgtaatttgaaaaacccaatggcaaccattaaaaggagcgctgaaagaggcgaacatgtcggaagcgttgagtttgtttggcgtttccatcgcagtggtgcaactttcgtcgaacaccagcgaaacggggccacggcgtgctaaaaataatgaaaaataaaaaaatggcaaatttttgcaaaaaaagcaaaagcaacccaaaaaagcaacaaaagcgaaagggcttaaaaaaagcgaaaattggtaaatcgcctttaatatcggcactcggagaatcttttgaacggaaccaactgtcgataactaaaccaccgtaatggaaaatgaaattaattgaaaatgaaaactaaaaaatttcatttttactaaatgtttggaaatccaaaacaaaagaatcagaaaacaaaatttaatcaaagcggtatcaaaacgtacgtctgctgtagaagaccgggaaatggtcagtggtcagcttggactgacttttaatgccaaccaaaagaggactgccgcgacgagtggccaccaattggccaggaaaacggcgacttttgaacgccaacgcaaaagcaccctcctgaaaatttaaaaataattggagcacggagggaaaaacaaattgggagtccaaagaatacaaaaggaaaagtcgagcaattgcgacaattaaactgctgaccaattgttgcacgacaatttcgacgagttgccggaggccgtagtgtgggtgccgttggtggatgtgttgcgtgagtttggcgatcacttcggtgtccgtctccgactcgaatttgtagcccttggtcagcaaatagtccttgatctccttgtagttggtgatgattccgttgtgtaccacgacaaaatctgacaaaggcttttaaaattacgaccaaaatatagtatatagcaccggattaacgtaccgttgtcaaagttcgaccgttgcgggtgcgcattttcgtcctttggctttccatgcgttgcccagcgggtgtgtccgatgccgcaatggactaaaacaagcgaaaattcagttgaatgagccaaattagatgtaattgctcaccgttgtaggtgaagtccatgtccacgccttcggaatctgaaaaagcgat

SEQ ID NO: 27767 - DNA, 1055 bp, Heterodera glycines
tgttttcttttctttctgtttgatcattgccgcaattttttagctttaccgttgttggaattcgaaccgaagagagcgtgcacggaagtcggtgtccattgtccaaaaggctctgaatgcaccttactctgctgtaagatatatttgttaaaacgacgtcttttaaacacccctctttgcaactagcactaaaacctctaatttttccccaaaattctcataaaaaaagctgtaacgaatacacattttcaaaaagctttcccggcggcgcctaatggcactgccggactcccttctagtttttttttgttggaaaaagtgcgccccaaaaaatttcttgcagataataaggatttctattggtgaaaataattattatatttttcagttttgttggttgactcacaaagggccgcacgacgacgtaagagaattttcttaaaattgatggtttttatagtactcggtcaatgcatcaagattttgatatttagatatgtgaaatggcgtccgactacatagcggagcgcatgcaaaaacgcgaattcggtttttgtgtcggtcttgccaagaagtcaaactcgtccaacgaaagcggtggcctggtgtttttcgtggcgaaaaaacagtctaacgcaccaacgaagttgatgtaactgccggcggaggcaatttggaccaggcttgttcgacatcggtttttcttggacgaacggcggctgtcagattcctcagacgcagatttgccgacaaagaagcggaattggccacttacctccatctcgacgtggagttcgtggtcggttattgctgggagagggtggtttgagaaaattttatatccctcggaatccgtattacattttatttaaaatttaaaagattgccaatttattttgaaatctgaaattccggataaacatttttgcatttctcgctataactaagactcaagagataaataaaaccataaaatctggtccacactttcaatcgctaatttgtggaatttgacagtgaaatatatatgctaatttaattcttgcgtttttaga

SEQ ID NO: 27768 - DNA, 1342 bp, Heterodera glycines
caattatgggtgaataaaatgtatattcacgatttttatccaaaaaaaatttacaaaacaaaagggtcccccctatggtttttgataaaattcaaaatctatcactttataactagcgccaagtttgcttaataggcccaaataattgtcatattcgtgatcagcgacctttaaaacacccgggtacttggtttcaggactttttaaacaaaaaaaaatttgaccaaaaaaaagttgaaaaaattttcaaaatagtgctctttgtaaatagcgccaaatggccaaaatatggactaaaaacccaaaaatggcgaaatatggatttattcccgaaaacccccaaaatatggatttatatggactaaaaaccttcaccaaatcaaaaaattttaacgcagaaatgctatttttaagcccctttcttcatagcatatgcgcagaaaaaatatgttaattcatataatttacaaccctactgatgagtcgaaaaaagaaaaattctatttttgaaattcaaatttggcacaaatggagaaacagcgatagcaaacagaatttttatgcattcaattcagtacaaatataaggtaagtgatacaaacaatgcgtgtgttcttctgacttggttatgagacaacaaatgaatatatccatcacaaatacatcaataaatacactcggccaatcattcattgtgtgatccgtcgtccgttctttccatccttaataactgcggctgcggcgtccttggcgatcacggggcctcccgcgcgtgtagtcgtagccgcacatcggacaaaacaagttgacgcgcacccatttgtagaggcagcgtcggtgcagcggatggtggcagcccatcgtggtacgcgtgattcggctcagtcggccccggcaaattgaacagcgctcggctcgtcgcgatttggcggtctgtggggaaaacaattggggaaaattatggtttaaaatttttttttaatctaaacttacgtttcctgcccttgctctggctgccttgcgcagctgcgcttgacgcttttccgccttggccgcgcgcgcccgtgccgcgtacattgcgttggccattcgctgaaaaacggggggggggcaattagcacaatgaaaatgcacataacaaaacaattaattacctaaataaactgacgatttaagtggcggtggaggaggacgaataataagtggatggaatgaatgaaacgaatgaacgtggataagcaaaatgtgtgggccttaaatagcaattttttagtcgaaagagtcaaattttttcgataattcatatataaaaggcacaaaaaatcatttggttgcattattt

SEQ ID NO: 27769 - DNA, 1384 bp, Heterodera glycines
  unsure (1)..(1384): unsure at all n locations
actccttagcgtccatggcatactcacgnncagcacaaagcaattgaccacgtccctcnntngttcgagcaaacaatgtgtcgtcggacgactcgagatcgatggttntgataagttgggtatacccggcatatttgtatggcgaaagcactaaagaaaattataaatgattgattttgcaccaaattgctggcgaaccttgtaagttcctcttgtatacaatgctttgtgcacgaatgatgatcactatgcgattcatgtctggcgttgacgaggaattggctctgaccagcgtcgatgtaaggaattcgtaggcgtagttgatctgctcaaactgttcccgaccgtccgggtttttgtccgggtgatatttttgtgctaatttgaagtaggctcggcgcactgccgatgcgtctttccacccggcagtgggatccgtcgtggacagccccaagcgttcacaagcctgttcaacagacattttggccggtttgcgcgtgatctcatcatgccaagcggagagacaggcccgcaaaaactcgacgggctcgcgaataggccaattcggaaagcggtgattatcagtcaaatggcgaaggtaatagaaatggcagaacagctcttcttttagttgtggataatcaatgggaggaattggacaatatctgacaaaaaaattaatattgtatttgaaacaataaaagtttttggttttcaatacctgtaaagtgccttaacatttgaggaaagtctggacgaaaagtcggacacatgaagagcaatcttttcgatcatattgcgtcgcatttcactattccaaatacattcgggattctcaaactctccgaggaaaacttcggcatatttctccgctccatattcctaaacaaattttgaaaaagcaattcgaattaaaaaatgacttcgaggtagaaaatatttgcttctggcaacattgggcatagcacagaacgggaggcgagctccgacttggaaagagttgaacggaatgcttgtttcaaatgggtgtctttgaggaagcgagcaaccggcaaaatgttggacccattgtacatcaagataaagaaaaatatgcccgacaaatacagtctcgaaatgtaagggttgtcctgcatgacatcgttgaccaaagttgccactcgttgcacaatggacgggtcgtaagtaagcaacaactgcaccagttggtacagcaacacgggttcagaaagcacttttttgattcgaggcattggacgaatgacagcgcctgtctcatctctaaagcatttttaagaaaaaaaaaaatatgaacaattgacacttaaatgtatttaattaaaaaattcggggtagtctgggaattgaccccaggactctcgca

SEQ ID NO: 27770 - DNA, 1131 bp, Heterodera glycines
taaggggagggggagagaagagaaaaggggagagggactttataaggggagggggagagaagagaaaaggggagagggagaagagaaaaggggagagggagtgagataaggggagggggagagaagagaaaaggggagagggagtgatataaggggagggagataaatccaagcaaatggattgccctcatttgcaaatgttcagcaattttggccccttcgaattctgttggaccaacgacttttccatcagctgttcgccgtctgtggccttctccgccgtgtccaacgcactcttttcaaagttttggctgccgtcccaatttggcaacgctttcgtcaacgattggccccctgggcaattccctttgcgacgaattgtcccaaggggcgtttgtgcggggcattgggcgcccaacttattggacagctgcaacagctgctccaccttctgtttacttatgtgaatgggctattaaaaaccaacgaattcacttcccaattgcagttcttttcgctgaattccttttgttcccgtgcattggttgaaaacatcgaaaagtcgcgcaattgcgacgaaaacattcatttcattgttttagtggaaatggtgcacgaatggaacaacgctttaactaaattgcttttggtgatattgcttacccaattcaataagcataaaacgaaatgccgaatttttaggttatcgacgaggttttccgagatccaatcgacgaactcacgcggattaatgctgctttctgcgagttaattctttctccctctgtgagcccttcaattgtcgacaatgggccaaatgaccaaatcagtgaaaatggacacaaagagaatggacggattggggaagacggaattgacgacgaattccgtcttttggatgatttatctgaccgaatgagaagagtccgtctttacatgaaacactgccaacacaattggaccagtgaacttgcgaaaacagcagcggacaaacccatttattcccttaatttctcatcgcaacttttcacacgatttccattcgtatccacacagatcttgtcggaacattcatcaaatagataaactgaggatttattgaatatcttgaccttatacggtggtttttcc

SEQ ID NO: 27771 - DNA, 952 bp, Heterodera glycines
tggggagcaaaaatccaacccagaattaaagtacaggctatagggaggttatccggaaggattcggtctcccaataaatctgggcgcatcggttcggggggactgccccgaaaacaaaaaaatcgattttttcaagtgtccgtttggggtactcaaacaattatggggagcaaaaatccaacgcagaattaaagtacaggctatagggaagctactcccgaaggattcggtctccccataaatctgggcgcatcggttcggggggactgccccgaaaacaaaaaaatcgattttttcaagtgtccgtttggggtactcaaacaattatggggagcaaaaatccaacgcagaattaaagtacaggctatagggaagctactcccgaaggattcggtctccccataaatctgggcgcatcggttcggggggactgccccgaaaacaaaaaaatcgattttttcaagtgtccgtttggggtactcaaacaattatggggagcaaaaatccaacgcagaattaaagtacaggctatagggaagctattcccgaaggattcggtctccccataaatctgggcgcatcggttcggggggactgccccgaaaacaaaaataaatcgattttttcaagtgtccgtttggggtactcaaacaattatggggagcaaaaatccaacgcagaattaaagtacaggctatagggaagctattcccgaaggattcggtctccccataaatctgggcgcatcggttcggggggactgccccgaaaacaaaaataaatcgattttttcaagtgtccgtttggggtactcaaacaattatggggagcaaaaatccaacgcagaattaaagtacaggctatagggaagctattcccgaaggattcggtctccccattaatctgggcgcatcggttcggggggactgccccgaaaacaaaaaaatcgatt

SEQ ID NO: 27772 - DNA, 1238 bp, Heterodera glycines
cgctttgctgctgttcccttcgccaattatttggcgtcttccctcttccgtcaatcgcagccaaacgccgtcttcgttgcgcaacagttcgccaaattggagcgaacttccgcggtggacgaggccaaattggggggcacagagagaggggagaacgcggactttgagggcgaagaagggactgacgacggggaacagagcgattctaaatgaaagaacgggcggagcaagatgaaattggatgattcattagatacttttcatttccatttttggcattggcatttcgcatggaatcgcattggccaatgcttttgtgccgactttcaattgtgacggaatgttcgctgctggctttttggtcctcatggacttctaacgaaaatatttgtccactcaaaggcattccgtccacggcacattccaccaaatgccggcccaccctttgcggcgtccaaacggccgaaaacatttcgctaattttgaaaatattttcaatttcaaatggctaacgaatgaccttttccctcttcgaagcttcagctgatttcgcaaaggtcgggtgaaaacgaaagaaaaacgcaattcctccaaagaccaaagggcgaatttgggcagtgccgaaatgcattggtaaagggaacggccgcagggaacggcacggaaggacattttctgcatttcaaattaaacccactaaaagcccccccccccctccccgactcaccatttgttccgcttttagtccgccccaatcggtgcctccccctcctcccgcctcctcctccgcttgtccccccattgttccgctgctcagagttaccgtcacttccaattcgcacacgggcatcacttgccttctgtgctggtcccgtgccacaaaagtgatctgaactgtccccctctgatcagaatttttttcctcccttcgaattgtcccaattttcaacctcaacgggccttccgatgcgaatgtcctcttgatgcgcaattttaagctgtgagttgatcacactgacaacggattggtggcacagaaaagcggacaattcggcatggcgcccttcggcgaattctttcaaaaatgccaactctgaaggattttttccataattgaatgtcaaaaactatcagatggaccttcgctctccgcctgttgctggtccgtcccaaattcaatttgttccgttatttgtgccatcgacggcgtcatgccgtcgttcactccccccaaaatg

SEQ ID NO: 27773 - DNA, 1536 bp, Heterodera glycines
ttttcttctatttatgtgataatgagggatacgtggccttattagagggataaaattaatttataattagtttattttaaagaattttaaaaaatgtttaaattggctcaaaaattaccacaattgattatcgagaaaaattattttatggaggtgtttttggttaattctttgttattttcgtaaaaattatttgtctctcgaaattttttttgtcgagttttgactacctttgtaaaaagggaattttaatatacttaacattaagataaaaaatttatttggatatcatatgaaagagcacacttcaatctataagaattttatttttgtttatttttatctcacaattttccgtgtcaaaaggctcatggtaaatatggctaccatgggtaggatggtggtagcatttctaaccaccaactcccgtcaaatgaccatgaactacgttcttattgacagggtaaaaaagagggtcatggtcatggttaaatgaccaccaacttcgtggttgtttgaccaaagttcgtggtagctcttgttgaccgaggtttaccaccaacttcatggttatttaaccattaccaccttcttattgaccgggccctgagcactgagctgaaagaggtggccaggaattgccgttgaaataagtgttaatcaacggcacccacttgcttgtgcttcttcaacccattggccgtgcttcgaatcgccgagtgccgttccgacgaatcgcctgccgcaaaatgtgcacggtattcactttcgatgtccttttggttgaagttcagcgtccagcgattgagcgacttaatttttacaaagagaaatgaaacatttaagttatgaataagcggcactttttgatggagccaaaaacccttcgcgaaagtgccgttcgccccgtggatcacttgtgccaaccgctggtcaaagtcccgatgatccgtgtcttaaaaggaaatgccattcattccttccgcaagtggtttttggcatttgaacccaccgaaacgggtcaaagaggcggcgttgtggtggtgggaaatggccgtgtcgagtcggtcggccattgacaccgtcgaatggcccgcgtcggagccaatctcctaaacatggccaaaatgttcctcacattgctctttctctctcttttttgttcacctgcagtcccaaactgcgcgtgatcccttggccgggttatttgtgctgctttcgttggccaattgtgccgatattttgcccccaattctctccggcgtcgtccaactggtcgtcgtcggctgttgcttttcgtccaccgaattttgcgtcaccgtcgccgccctttccaaaggtttgaacaaagcgacggacgaatcgacgacggcgaaagattcgttcagcagcaaattggagggcggaagaacgccttaaggaaaaacgaaaacaaagtgaaaggaagcgaaacgacccagcgaaaataccatcgccgtgggtaagcatttggagagaagccgatttacgagtttcatcgacaagacgatgcttaaa

SEQ ID NO: 27774 - DNA, 1733 bp, Heterodera glycines
  unsure (1)..(1733): unsure at all n locations
tatactggcctgcgtccatcgatgatgacaaatggtcatgctaatcatgaaagggccttttcggaatggcccattaaccatgttggaaatgaaccgctctgagatggatagacggaataaccaacaggaagggtgtggcgacttttgggctgagggagataaagcaaccctcccaaaaaatttaaagaaaaattaccaattgcacaaaagatttagccactgactggtcatgtatttaattaaatagcaattcagtcattttaaggcataaaaatactcgagaaggctcttcaatgtaacacgtttgatttgtctctccaatgttcactccattctcaattggtgggtgatgcgttacttaaattcctttcgattacggcttttgcattatattcgtccgttatttgtttgcagggtaatgcgtattatgcccgtggtgactacaggaaggcgaggttcccttcaaccgttcggtctttttactccccgacccattaaagagaccatcacatggctgacctttgcgcttctaggttaactcttggttttattgtngtaggaaataatcaacattcgacagattgcaaaaggacgaattgcaacaagcgaagacattgtccaatttgtccgcaacttacattctgtaatggagattattgtttttaattatttgtgtgaactattagtaaataagggctagcggatgtgagaccttttgcatttttcgtcaatctgttaaaatccatttaaattttctccaaccaagcctatttgcacctccggccatttccctattcctggtatattcttttttcaaaatgaggcttttgataatttttcatcttcgagtcctgaatttaaacgtaaaaaggtggatgctatttgtctcttaagattatccgattttgacaatgcaattgactgtgcaaataacgtgattaattttgccaaaaaaattggcgacaaggtagttgcatagtgttgcagcaaaacattcttctgctttgtttagtcgctcgaaagccgtgggctttacagcctcggggtaaatttgattctgaataatgtttaactcattattgttgttttttagcttgcctatttgcattgtgcgactcagcgagtctctggagcctacgaagatgaccaatcgacaaagcatttggagcaatctgtggagtgttttgagtgaatattttacataataaattaatgtactttcctgttatgtgactacagccaaaatttaaaaaaatcatcaaaagggcgtgcaaaattcagtaaggcgcgcgtataattacttagggaaagtgtgtagcgagggggggggggctttccgaaatcgaaaaatgaaaaaaaattgtaacgaaaattggaaaaaatttctaaaaatatataattttcttaagaaatttcatcaaaagtcagtcaatttttggaaaaatctgttagaaaatcgaccaaaaatcaataaaattttcaggtggctaaccctgctcttcaaaaaaaatttgtgaaattgtggtgaaaaagaagggttagttgcacgccgttttggtgattcaataaattgttcacttgtagtcacataacaggaaagtacctaaattaggtaatactggagaattggtgtcccggcgaaagattaattgaaaatttttcttttctaaaagtcgttaaaacatatttgtgggggttttctggtcgctgatcacgaatctgacattaatttt

SEQ ID NO: 27775 - DNA, 1894 bp, Heterodera glycines
atcctggcatcgcgtggccagcactttttgttgttgtatccaacaatgttctcattgtttgggtcgggatgctccgtcaagtaccgctgaatcaggtccctggtctcttcggcgttgaagcggaagaaaatccacactttgtcgacataacgacagtacagacgaattgggtgagctgcctcagtcgcaatgtcttcgaaagcgaggaattcattaggacacttaacaaaggaaattacaaagtaacacaaaaactataatgttccacttgtggtgggcctgtaatttcgctagcgcgccgtagaccgagaacgagcaaatcgagaacaagaccgtagtactgaacgatcaatgaggcaaattggagtcctcgaattatgcctaaaagagaaattgacgaagaaataatgaactctcaactggtgcctggtatttgaaacaaaaaacctaccgaaagagttagtgtggttcatgtccttgtaatttatcgtgacgttgtttttagctgtcatataatcggcgatattatggtcgacaatgagtcgtagcaatctgttgagcaatgtcaagtccattttctcgtacattttctccactttggcctcaagcaacacattgcattcgccttcgctggtgtcccaaacggactgcaaattgtttatgccctggcaccatttgtagacgagcaatggcggtggttcagtgtcggcaggtttcacccaagatggaaacagtctccgcttgtcagcttcataccacaaatattggtcgagataagcatccgtgaccttctccaatggctcgatgtcgtagacagggattaaatggctgtacaggtccatgaactcgatgccaacttctttgaaggaccgcatggtgagcatatgccgctttatccgagacaatgcctcatgtgggttgtcatatgcttgctcgatcagtgccaattcctctcgctgactttgattaagacggttcttcactgaataggcttctttgaggcgctcaagcgccaaaatcagcagtttagtgtcgtgtttgtatgatagaggcgggaaaggaatcggtgaaaaacgacgcgactccaaccaatggacggtggtcgtgtaaatggcaaccgcttcctcggcactcacatacggtccatccttcaggtaattgtgttgtctctcctgttctgcctgaaatgggtgagtttcgttagaaaacagaaaggcattcaataaaacaaccttcagatagagacgcgtgagacggcccaaattctttttgcacaccgttttgtccacagtcgcaccgcgtcgaacacgctcacggttgtagtgagccgagttagtccaccaatccgcttttgctttcacataacgcaggatcatgttttcgaccggagttgggagaccgggcactttccaaggaatgttcgccttccaacaccgccacgcctcgctgagatgttgcaagatgactcgcgctttattctgttttatgccctcgggcatcatatccaaaatgtcgtgcatcacagcggccctttgaaattaattttagagaatttgtacgaaatgtgtacctgagctcaaggtcaaagtgcgactcaacacgctgtttagtcacagtctttgcaactccttttgaatgacgaccttcgaattgtcgagaaagcaaatttccaagccaacgttcaagaagaggggtaatgccgcgaaggaagaacaaccacacacgccaaccaggtgcccaaaaaccgcagccaggaccctttcctaaaaaattggtaaatgtaaaaacctaaaaagggttcaacagtgttctcttccgtaagtgtaaaactgaaaaatacataccaactggtccggtattgaaccggtaataaatgagatgtttgaggtccttg

SEQ ID NO: 27776 - DNA, 756 bp, Heterodera glycines
attcacactgaaaagtgatttaaaatcaatgcaaaaaagaaaatttaatacccaaaaggcatttttgaaaaacatggacgctcaccttgaagaaattctgctgaaaatcgttttgggggagccatttgcgctcgaaagtgttcggatcctgaaaatgggagtttttcaacagatcagcagggcaactttgtgttacctcctcgaattcaggcaccggctgacctgaaatacagaaaatagttttgttggataaagaaaagcccaaatattcattgccaactcacccttgtgttcctccatccaagcgacaatctttttgaaagtctccgccggaatctccgccttggtcatgtcgaacataaagtcctcactcagtccgttggcttccacgttgaggtcctaaaaattgaaaaaagaggaaaaacgttggcacttttaaaaccgaagcatttggtggggccggcattttcgttaaacgatcaccctcccactcttttttgcaatgtttgcgccaatggaattggcataataagaaaggaaatggtgtgaaacctgcaacattttggcaaagaatccgcactgcgacaagatggagagacggaccacaactttctcgccatcacagcacacgcaaggaacctggggaaaaaagtggtatttgaaagcaaaaatgtcatgaaagcccatgcgttacccggggggggggggggtgaacatttcttatataaaagtgaaacctggaaaattgaactttta

SEQ ID NO: 27777 - DNA, 1146 bp, Heterodera glycines
gcggcaacatcatctttgaagtcacggagacgagcatttctatgacaaagtgatgagtgcgtgttctttgtaccaggacatggaaattctgccacaaggagaccaaacggaaatcggcgagaaagtgagtgtattgcctttgttgttaaaccttcgtttgtgcgaatttttccctcccatattttcaattttttttagtcaattttcttctaattaaagcatttttcgctagggcataaatttgtcgggcggtcagaaggcgcggattagccttgcgcgagctgtttaccaaaattgcgacatttatctgttggatgaccctttatcggccgtggacagtcacgtgggggcccaactctttaaccaagtgattgggccaagcggaatgctgcgcaacaaaacgcgagtgctggttacaaatgagccttcctgcttgaaatattccgattttattgtgatccttgccggtaaacgaacccaattgcaccattttattataccatttgaaacagatggccgagtcatttctgaaggcacttacgcggaattgaccaaaagtggcattttggcgcgtctgatggaggatgttgagtctgacagagtaaagtcggtctctgtccccacggaaaaaggtggtcgattttattggaattaatttcaatgaatattatgattatgaaaaatccataaacttaaaaaaacataataaagaaggagaagaagacaacataagcgacgacaccgacgaaacgtttatggatgaaaatgcggcggatgttgagaatctgctcggcacttctgcaatgtctaccgtttccggcatttggcacgccgaaagtacagtacatcatccacaatgttccgccgacaacgactcgtccgtgcggacagtgtcatttcttcctacaattatccctctgttcaacgacatttgaccggaattgaaaaagtggagacaggacgagtgagttttagaaatatcaaataattcgtcccttcgcccgttgaattcatttttcgaaatctgttcaaaggtgaagcccgtgatttacttgcgttacttccaagccatgggcttctctctctccatccttttcctcctccgcctcactctgagcactgccgcgtcgatgagtcgtaaccttt

SEQ ID NO: 27778 - DNA, 951 bp, Heterodera glycines
gaaagtttaatttggattagcttgacaaaggttatgggcagttttttgtttaaaatttccattttgatggttttttatataacgacatagcaccatatgtattgcataaaatttttatcacgtaaaaacataatacctaaaaaattcctgctaaggttttttggtgcagatgaaaaaagtcttttgcagcactatgatcagatcacttcttcatgttgatctggatactccaaaatacacgaaaaaatttctagggacttgggaaaatttttctggaaaaaaacattatgtccatcagagagcacaaaatgctctaaatgctaaaatgtgcaaatgatcacaattctctaagcttatacccgctgaggtatgggcactcatttgatcaacaccaaattgaagtacccataacagggatggcattccaggcgctaaaaattttctgaaatcggaattccaaccccaaaatgtcggaaatcggaattccgtgccatccctgacccatacctcagtggcagggatgtgcctaggtttcgcttttcgcatttcgcctttcgcatactcgaattttttggcgtttcgcatttcgcttttcgcatttcgctttttggcgcgaaacgcgacttttacacccctaagaattggattaaattgccataaaatttttcaaaattttacctataaattggctaattttcagtgaaaacctgtttataaatgatcaaaatttccaattttttccccggcggcgcctatcggcaccgccgcgcccccaaaactcctattttttcttagaaaatggcccaaatcgcaaaatttggtaatttgattaaaaactgttctcagcggcgccccaaaactcttatttctcattagaaaaataataaaatcacaaaatttgatcattttttagtgaaaatttgtcaacaaattttaatcaaattttcaaaa

SEQ ID NO: 27779 - DNA, 1113 bp, Heterodera glycines
  unsure (1)..(1113): unsure at all n locations
cttcccattccctaaaaaggatcccaactcgcgtctgaagagactgatcaacactgctcgactcactctgttcatgaaagggacgcccgaggggccgaaatgcggtgggatgaaaagggggaaggaacccctggggaaaaggcaaatttgaaggaaattctaaggggttcgtattaccagcaaattcaaatcgttcagtccagagagattcgttttttagctttaacacaacggaatttagtttgaattcccttttcaggcttcagccgtcagattgttgatttgtgagtggtcggtccgcatcggagcaaatctcatcgttccttttttaagattgcgcagtcacaacgtggatttttggacctttgacatactcgcggatgagcaggtgcgacaaggactgaaatcctacagcgattggcccacttatccgcaagtctatttggacggagaactgttgggcggactcgatgtgatcagagaggagctcaatgaacaaaatttcgtagataaattgccgaaaaagcattaaaatggaattcttttggctctctttatttattcaacatttattgatgttgaaatagcaaaaaatactaaataaaatatgtgttttgtcattatcgtccgtacgaaaaaaacaagtgacaaatacaatgagttggttatattgaataggaaagggtgtgtaatgagaacggaagaacaaaaagatgggcatgaggtccgtgtgtaaagtgaacaacgagaccttcggctgccgtccattaatcggtcatgttgtcaaattcttgctcggatgttccgttggtggctgaactgttgacgatgggattgcccttgagaatcgcctcgacctgagaattattgccataatggacgagagggggaaattaaattggcaaaccacctcctttctgaaactgctcaagttttgcgtgaagttgtctttgttcttcagggaaacgttgtcctctctcactccgtccatcagtcgtgagaaggccttaggtgaaaaaatgggaatgaattgcaaattgtgaacagttgagcaatggcgaacaaacttgctcaagcggttgctgaagttgngtgggttgctgacaaatgaac

SEQ ID NO: 27780 - DNA, 1157 bp, Heterodera glycines
acgaaatacctaaaatcgatacggtttaagtcttagataatttactaatcaaataattactgttggtttttgacagcaaattgtctgattgaatggcaaaaaagcagtacgaccttttgttcaaacttctgttgatcggcgacagcggagtgggcaaaacttgcattttgtacagattcagcgacgatgcctttaacacgtcttttatttcgaccattggtatgtcaaatagtatcacaatttcataccgaaattccacatgacacttcaatttaccttaccttatcttctgggcagaaataaaacgggccgaatttatgaattttactaacgccaaatgaatttatcagattttcaatctttttgtttgatttttccaggaattgacttcaaaatcaagacgattgagctgagagggaagaaaataaagctgcagatttggttggttttacttttatttgattgtaaaaaagaaaaagaatgttgtttcctttccgttgtgctttttttcgattatttgttaatgaaaatgcggacactccaaataatggccctaattcaagtcaaacggttagcgcttttttactattttaagggacactgcgggtcaagagcgttttcacacgattaccacctcatattaccggggcgccatgggcattatgatggtttacgacataaccaacgcgaagagcttcgacaacatcgccaaatggctgagatacatcgacgaggttttgccaaacaaaaacccaaatccattctccaagctttgctattttttcaaatggaccaactttaagcatgcctctgaagatgtcgtaaaaatgttacttggcaacaaatgcgacatgtccgaccgaagagttgtgccgaaggaacgtggggaaaaaattgcgattgaccatggcattcgtttcctggagacatcggccaaggcaaacataaacatcgaaaaggcgttttacgacttggccgaagccattttggacaaggtttctttttttcttaatctgcgattttcctttgtcattttgatacttttagattgtgcccccccccccttttttctaattgaatttccaaagttacaaattcgtatccgggattcagaatttttaaagtgaaatcactgccatttaaatatggtactcatg

SEQ ID NO: 27781 - DNA, 974 bp, Heterodera glycines
gcactgaaccgtatacaaaaactctcacattctaaaataactcagttaaaacagcttttaatttttattgttctgaaaccaataattttatctgtaaaaaatagtcccatatgaaccaacacataaaaagtgcctttgcgcaacaatctcccctctggtgtccttcattttagaaaggcactgaaccgtatacaaaaactctcacattctaaaataactcagttaaaacagcttttaattttaattgttctgaaaccaataattttgtctgtaaaaaatagtcccatatgaaccaacacataaaaagtgcctttgcgcaacaatctcccctctggtgtccttcattttaggaaggcactgaaccgtatacaaaaactctcacattctaaaataactcagttaaaacagcttttaattttaattgttctgaaaccaataattttgtctgtaaaaaatagtcccatatgaaccaacacataaaaagtgcctttgcgcaacaaactcccctctggtgtccttcattttagaaaggcactgaaccgtatacaaaaactctcacattctaaaataactcagttaaaacagcttttaattttaattgttctgaaaccaataattttgtctgtaaaaaatagtcccatatgaaccaacacataaaaagtgcctttgcgcaacaaactcccctctggtgtccttcattttagaaaggcactgaaccgtatacaaaaactctcacattctaaaataactcagttaaaacagcttttaattttaattgttctgaaaccaataattttgtctgtaaaaatagtcccatatgaaccaacacataaaaagtgcctttgcgcaacaaactcccctctggtgtccttcattttagaaagcactgaagcgtatacaaaactctcacattctaaaatactcagttaaaacagcttttaattttatttgtctgaaaccataatttatctgta

SEQ ID NO: 27782 - DNA, 896 bp, Heterodera glycines
tttgttcgaatttgggttcggggttcggaattttgccttcctaggtcatattcgtgttcagcgccacaatttacctaccttaattatttataatgtcttttgagtgctttatatagcacggtcacttgagtcccagttgagtttggcactccattttcggcacttttcatcctgaaaaagggcaagcgcgcccctaattctatttttccaacccatttcaaacctttttacatcgattctgaccgtttttaagcatttttgagtttggggcctatgatcaatattttccccttgaccagactgtttggctcgaaattcataccattttttcatacgattctcatgagcagtggtatcattgaatttgctgtggccaggggattgcacgtcaaatgcagagaaacgggtattgaaaaaaacaattggagattggatttcgttattttcctgtcattgttcgtccgtttcagcagtgccatatttgcgcagttccattcgccgttttcccgttgatgaacaacgcgtgccatggaatgtgcctcttgtggactattctccgtgcgattacaccgctgattcggtgcacggaaagccatgggctgacccatcggagccgtcaaaatgtaaattcaattcgatggacgacggggtgaacagagtttcgtttcacgggtacaatagttaaaaatgataaaaccaaatggtaaacattttcagcagttacaatttggacaccgatgggaggcctctgaaccctttcggacggacggggctcagaggcaggggactgtttggccgctggggtccaaaccacgcggcggatgccattgtgtcacgacggctggcgaatggccaattgcaatttgtggctattgaacggcgtgacactggtcagt

SEQ ID NO: 27783 - DNA, 1358 bp, Heterodera glycines
  unsure (1)..(1358): unsure at all n locations
tagaactttttattngaggaataatttatccaatgaaagtatattttttnagtattaataatttatataatttacgcattatttgataaattaatttaaatagaaaaaaactttaaaaaattaattaattttttttatgaattaattaaattaatgttaagttaataaaaaattaatgctcaattttaccgaatgatattaattttatttttaaatattttaaaatattttttttttgtcaatttaatttgaatttctttaattttctcgccatctcatccttgaagctctgaagcgagtgatgggcaagattgtcatataatattatttttaaactatttaatgatgacatagtacaaaagtgaaaagtaaaatttgtttttattgtacgattgatttggatatttttgtttaatcaatatttaagaaattttcttttaagttcagttattaatattaaactatatttttagataaattgtatgaatatttttctttagtttttccattatcaaatttaatcaaatattcattcattaaaaactgattagtaggattaattgtgcttgatcgttatatattattatttttaatgatttttatcagttactctcccattgtctctatagtttatttcagagctgcgatctcaaaattttgaaaatcctcatttcagccataaaaaatcctcatttgccactaaaatacctcaaaaaaatcctcatttggaatgaaaaatactcattttttaaaacatcataaaattgcgatatggaaaatatggatatagaactccttcctagagactcaaaccaagcaaaaaacatgtttttcatgcgtttcaggcctccaacagtccaggaaaaaaatatggatttccatataattaccaaccctattataagcattttatggaagtctgagctcgaaaaatcgaagttgcacttcacttgggccaatgctttcactgtgcatctcttaaattttttgcttttaaattgctctttttgtgacgtggttttccaaaaaactttttgggaacattgggggagggggtccggcagtgccgataggcgctgccggaaaaaatttggaatttttgagtgcgatttgttaaaaattttgtcaaaaaaaaaatgattttgactgaggatttttcgaaaaaatgtttaagattcgaagaaaaagttcgaacatattgccaaatatacctaatttttcaaaaaatcatgcatttttatcacttttttgtcaaaagaccacaaaaatacgcaacatttttcaaaaaaatcctttttgaccctctaaaagatcacaaaatgagtaaaaatactcagatatcgcagctctgcattaaa

SEQ ID NO: 27784 - DNA, 1345 bp, Heterodera glycines
  unsure (1)..(1345): unsure at all n locations
tttttttttttttttttattttttttttttttttttttttttttttttacctttttttttttattgttttttgtttttttttattttttttttttttttttttttttttttttatttttttttttttatgctgttttttttttactaattaatggattggatgtgtttgtgatttgttgttgtgttttgttatattgatttgtgttttttttttttttttttttttgtttttttttttttatttttttttttttttttttttgggggggggggggggggggggggggggggcggggggggaggaaaaaaaaaaaaccccccccccccttccataaaagaaaaaaaaaaaaaaaaaaaaaggagagaattttttttttttggggggggggggggtattaaaattatttttttatatatttcctcgggggggggggggagagggggcgggggggggggaaaaataaaaaaactcctcccctttttaaaaaaaagggaaaaaaaaaaaaaaggggggaaatttttttttcgcggggggggggggaatttaaaatttttttaaaaattccccttttgggggggggaaaaaggggggggggggaaattaaaaaaaaaatcccccccctttcccttaaaagggggaaaaaaattacaagggggggaattttttgccctggggggggggaattttcaattttcgaaaatttgccctttttgggggggccgaaaaccggggccggggaaattccaaaaaaaatcccccctttccccttaaaaggggcattaaattccaatgggaacggatttttttgggcatttagggctggaatttcagaatttttggaattttggccatcttaggggggacctgaaaccggtaacgggagaaatacaaaaataagtccccatttgcgcttaaaagggncgatnaatgtcaatttgaggcgatattttgggcatgtagtgctggaatttcagaattctcgaatattgacatcttagtgggaactganaacggtacgggagaattacaaaataagtccccatttgcgcttaaaagggcgataaatgtcaattggagcgatatttttggcatgtagtgctggaatttcagaattctcgaatattgacatcttagtgggaactgaaaacggtacgggagaattacaaaataagtccccatttgcgcttaaaagggcgataaatgtcaattggagcgatatttttggcttgtagtgctggaatttcagaattctcgaatattgacatcttagtgggaactgaaaacggtacgggagaattacaaaataataaaaatgaaaaaacaggaatttttctttaatagtaa

SEQ ID NO: 27785 - DNA, 131 bp, Heterodera glycines
ttttttttttttttttttttttttttttttttttttttttttttttctttttttttttttttttttttttttttttttttttttttttttttttttctatttttttttttttttttttttatttttttttt

SEQ ID NO: 27786 - DNA, 933 bp, Heterodera glycines
tatcagtagttactccaccagattttcggggttgtatttcatctccgccatttcagtcccagtggaaagggacgtttcagtaccaaatttaaacctttaaaaaacacctataataaatatatccaatcccagaagaggtaaataattgaaaaaacatctgaaggataaaacccaaggctaaatcgtattagagaaggaaagggaggcagaggatgggtgtcaactgtcatgccttataaggaaggcaagggacgcatgccacctgagcgcccgcgtgtgtgccatttaaacgctcgcgtatgccatttgagccccagagttatttttacagcgcacccatttgagccccagatttatttttacagccccgccatttcagtcccagtggaaagggacgtttcagtaccagatttaaaccttaaaaaacacctataataaatatatccaatcccagaagaggtaaataattgaaaaaacatctgaaggataaaacccaaggctaaatcgtattagagaaggaaagggaggcagaggatgggtgtcaactgtcatgccttataaggaaggcaagggacgcatgccacctgagcgcccgcgtgtgtgccatttaaacgctcgcgtatgccatttgagccccagagttatttttacagtccaaccatttgagccccagatttatttttacagtgcaaccatttgagccccagatttatttttacagcgcagccatttgagccccagagttatttttacagtgccgccatttgagccccagagttattttttaagtttagccatttcactcccagtgcccacgggatatttcagttctgagacccaaagcctattgagtacccaaagtctacggagggtcattacattccttttagtgcattcgaccacgcagggcgacggagggcattatcattcttt

SEQ ID NO: 27787 - DNA, 1319 bp, Heterodera glycines
gtgatcgaagaaaatgtgtttttgcgtttatctcaccatatgatatccgcaaaaaaaaaatagatgaaaccctaaaaattcgggccctaggcctaatgccctcctccatctgtaaatccttttgcgcggtatttccaattcatttgcaattttttgttcaatccttccacaatcttgttgcctataatcgcttctctgtttgtattcatttctcattgaaatgaactgatttataattgcaattttgtctgctcttttccaattttgaaaattcaaacttttaaatttgccaattttgttttccatttcttcttcagttgaatatgtcggcacaatgttttcctcggcacattcccttggaattttctcctcttcttcctcatcaaaaattggttcttttttggcatatttctccaaatccactttttcatcaccaaattccatctcttttttgactttttgtgttaaattggtccgtttttcatcttcgaaactttcattttcaatcttctcataatcaacttcttcaacctttacttccttttgaattgaattttgctttttatttgttattactttgttcattttccataattcatcaaaaaaatcatcgcccaattcggcgagtccaattagtcccataaaacacaccaaaagaatggaagcggtagtaaatgaatacattttctgtaattattgtattaattataacaatcatttacaatggtttcagtgataacaaaataataaatattagtgagagaaaattgaataaaattatttattctaaggcaatttaaatgttggtaattgagcaattaggccatttggtgccaaacatttgcaaaacaaaaatcggaaatgggcggtcattgggacagacggaggcaaaataataaaagagggagacgtggaaaacaaacaaaataaaacaaaacataaaggaataagaatgctatttaattatttcatttttgtttatcattcactgtcataggtaaaatatttataatatatttttttcacgctgtctacataaatattattattctagataattattttaaggatcatatattattgaaaatttagtttgcagaattttagatctaggacaatctgtcgagttatgaaagataaataatatatgaattataaattattatttcgtttgatcaacttaccctaatcccaaagtttgaatgaaacaaatccttaatgatatgacaaacaaaaaacagaaatcaagtcttaattactaatctcaaagggctctttgcaattctaaaagcgacaaggattttacgaattcctcatta

SEQ ID NO: 27788 - DNA, 500 bp, Heterodera glycines
atgcatttactttttgaacttgtggcccaaaattgactcggtgtgttgacaatatgaaacgaaaaagtgactgccccatgtggcccaatcagcagggcccaatcgtactggagccaaatccgaccggggcccaatcagcagggcccaatcgtaccggggcccaatcggaccgggcacaatcagcagggcccaatcgtaccggggcccaatcggaccggggtccaatcaacagggcccaatcgtaccggggcccaatcggaccggggcccaatcggacggggcccaatcgtaccggggcccaatcgtaacggggcccaatcggaccagggcccaacgaactggggcccaatgggaccgggggccaaacggatcggggcccaaaggaaccggggcccaatcggaccgggcacaatcgtaccggggcccaatcgtactggagccaaatccgaccggggcccaatcagcagggcccaatcgtaccggggcccaatcggaccggg

SEQ ID NO: 27789 - DNA, 1984 bp, Heterodera glycines
  unsure (1)..(1984): unsure at all n locations
attaattcaaggcaaattttttttattaaataatttttctttattttgatgttttttaaaagattcatattaaacaaaacaattattaactttattattattttttcaattgtgaccaaataattaattaggtctgaaagtttcttaaaattcataaatgaaacttttgaaaaaaattttgctttatatcatttttggtggaggcttttactcgaactttagatttttttgtaatggatttaaaaaggtcttaatatttttttgaggaattttggctgaaaatttttcaggttattctggccctataaccaaaagaattggattgaaaatgcctaaaaataaaggatcctcagaagcaaaaataaaatcattttaatttatttgataattggtctaaattaaataaatattgaaaaatgccgaatattgagttcacacccgccaaaaatcagaaatttgatcaaaatcgctaaaaatttttaaaggaaccttcggaacccagcacctcccgaattctaagaaattttttttgttttatatcggtattttttgcagaaacatttaaattttttggtcgccgttactaaattttggttgaaaatggcacaagttttctaaataaacctcagatcaaacatcaaccggaattttattaaaatatttgaattttcaatgaaaaaatttagtaacaatgataaactcacaattagcgcaggtagtgcttcttgagaatgtcgacgattacgcaggcgaacattgtgaggccctcgggaaattgcaaagcgactgaaaatctttgaatttttgatttcatttcagtaaaagaaatgggacaagaccagggttcccggatatttgcaggtgacctcagggtgtatcaagtaaatttagcataaaatgtaaatttatcgaatccctggttattcccaaaaaacatttgaattttcattaaaaaattcagaaaaatcgtgatttgtttgccaattaaattttttgtcatattgggcgtaaaatgatttagaaaaattaaccacaaaaaagtaaccaaaatgcatttttttgcaaaaaaaatacccaatgggcttaaaaaccccaaatttattcaaaaaatgcaaaaaagattgacggattttttttttaaatttttttaaataaaaatcttanaatttttcaaagaaaaaataaaaattctttttaaaaactatggagtctttataaaaggtattaatttcatcaattaatttcatagcacattaaataaaaattcagggatagggacaaaacaacgaaaaatttcacataaaaacaaccttgaaattagcctttatgaataagaaattccaccaccctctcccttaaaaggcctaaatttttacgaaattgaaaatgctctaaatttttcatttttcatagaaaaaatagttttttttacttttgtgggttaaaatttcgaccaaaaaagcctttttaatccggtaaggagtaaaaatcaattatttagggcagtttgatccatcacatattttttcatacattaaaatagaaaatttttcagttttcagaaaaaatttccggtttttcaaatttttcttaaatttttgtcgttcccctcgccccctctctctcttttttactcactttaaattgtgcccaatcgaagccgccggggcccaacgagcgcatgtactcctccttcagatcatcggcgaaaaaatggcttcggactgagattttacctaaaagagaagcatttctttcaccccgaaaattagaaatttttgaaaagacatatctatttagaaaaattcacggcgatttttaaaaaatttatattttttgtccactgtttgtttcgtgattttcaattttttccgccaaatttcacttaagtgcataccttttagccaatttatgcagcaaatttggcgtacatgttgaacagttcggccgaggaaagggacgcttctgtgccatctgttccgct

SEQ ID NO: 27790 - DNA, 1434 bp, Heterodera glycines
  unsure (1)..(1434): unsure at all n locations
agggacaccgccatcagagacatcagagagagggcgacggagttgggcgagcagagagcacaacgaacgggacggcgacggcgacgacccagtcgcggagccgatatttggaatttgcagagacggaattcagccggcccagcagttattttcccgttccatttgtagcagcagcgaacagccaacttcaggtggactgatggaagtggtcaattcgctcttccttatggggcacgggtggcgtcagaaatcatttcattgtccatttgccattgtccctccgctgagcgacaataattcgtcgatttttagccaattaatcccaaggcgaaactaatccttttgactgatttgtaatcgcaaaatattttggattattttggaaagaccaaacttacgggtaggtgagttggccatggagaccgaagaccccccccgccccacattggcgccatttctctttttttgggaatttccattaatttacttttggaccaaaggcaatccctgcgaaaacgctaagtcagctgatcaggcaacacattgcacggaatcggtaagcatttgatgtgctttttgctaacaaaaatcatttaaaattttcaaagaatgaaacaatttgagacgcaatattccgccgacaatttgagggtaaattaattggcacaaaaagtagcagccggataacaatattttaattattgagtcggctcaaagtcgcgagaaggaatttcgacaaacgccgttccgtcggtggccctcaaattcgaccattttgagttatgccgagaagaggcgacaatggaaaacggagctgaaaagacggctaaaggagcagaaagtgcggacgcgtatcattccgccgcttttgataaggcaattaaaatttcaaatagtttaattaaactcagtgagccaattaattagtcaattaattgccaaacattccagcggtggcggtttttcatcaattctcacagacagagaaccggagaatcgctattacgtggtgggttttggcctttaccgaatgatcgctttttcttctgatcagacttttcgtctaatcaccgtcccccnccccccccctcagacgtacagtccacagacgcgcacttaccaagtgtcgcgccgtccgccgccctatttgtacacaacggaccaggactcgcttccccagcaattgtacgtcttcgagagttaaaaatggcattaaaaaacgaaaatcaaaatctgatcaaaaaattcccgataattattaatcagatcaccgaaacgtccattatattcatacctgtgcaagggggggggggtcagccaagaggtcttacgatcgactttggccctcccatgggagggtcagagcccatttccattacgatcgaccatttcttgcctgctgaagacctttttgttgctcttcgggtcaaaaaa

SEQ ID NO: 27791 - DNA, 1817 bp, Heterodera glycines
ttgatcccaaatgcattaaaatttatgatttgctaattcctcctcaaaattgttataatcgataaagtgtggtgaaaaaattatatataaatatatttttgatccagtaaattgtaaaaataacttcaagaaatttcgcaaaatgtccaaattttgtatgccaaaatttgattttttttgggcctgatgtcctgatattgaaaatgttcagatcaaatcactgctttagttaaaaaattaataaatatttaaattgaaacttgtgactgttttccagccgtcaaacatcagctcgaacacctacttggcgctgctaaaatcgctgcagttgcgcgagatcatcagcctggacgaggagcaaaaatggacaaaagacacgaaatcaaaacctataagacattttccggctatgaattgggctcgagtattccttccccccaatgaaaaatttttaaacctaaaatgggaaacgttctgaaaaaatatgcctttttaaagaatatgaaaaatcggcgaaaatttgaaattttcgatgcggtgctgattagggggtatattttcgtggtctcaacgtgtaattgggttgaggatgacaaatttcaaaataaaccgatgaacaaaaattaaatgaaaatcattttaaatatttattattcttctctttttcaagccaaagttgccatgcgacagtatcaggtcgcaactggcaatggttctttgcaaataacacatgacgcaaatccatcatattttttacagattttctccaatttggatgaacaactttttgtttcggcgcatccattcaagacaaatatatcattattttgttctgaacgcaggcattattggagagaggaaatggctccttcaattcaattttgtgttctaaaatgtcaagatttaaaaaatatgaaaaattagttagggatgagatttgtcctaatttgtcacatttgtcctgagttggaggtagcgaccaaaaattgttctgggttcttaaataaattcataattttaaaattttatggcagaatgttaatgttttctcaagaaaatataagatttaggcaaaatttggtcatttaaaaatctggttttttgatcccaaatgcattaaaatttatgatttgctaatttctccccaaaattgttataatcgataaagtgtggtaaaaaaattatatataaatatatttttgatccagtaaattgtaaaaataacttcaagaaatttcgcaaaatgtccaaattttgtatgccaaaatttgatttttttttgggcctgatgtcctgatattgaaaatgttcagatcaaatcgctgctttagttaaaaaattaataaatatttaaattgaaacttgtgactgttttccagccgtcaaacatcagctcgaacacctacttggcgctgctaaaatcgctgcagttgcgcgagatcatcagcctggacgagtaaggacagcgaagagagacaaaacagagcaaaaatggacaaaagacacgaaatcaaaacctataagacattttccggctatgaattgggctcgagtattccttccccccaatgaaaaatttttaaacctaaaatgggaaacgttctgaaaaaatatgcctttttaaagaatatgaaaatcggcgaaaatttgaaattttcgatgcggtgctgattagggggtatattttcgtggtctcaacgtgtaattgggttgaggatgacaaatttcaaaataaaccgatgaacgaaaattaaatgaaaatcgttttaaatatttattattcttctctttttcaagcctaaagttgcccatgcgac

SEQ ID NO: 27792 - DNA, 1356 bp, Heterodera glycines
  unsure (1)..(1356): unsure at all n locations
gagaacatttattcaatcggtcatatagggaaagactatgccgatttgcttaaaaatttttaccaatttattatatttcattaaacgggaaaatttccgaatacggtatctactcaaaatcgcacaaaaacacttacgggctttcttaggcgctgagaacgatggaacagcttaaaattcaacgcggaaaaccatttcacccggtttttgaaccggtttaaaactcggaacattgaggaagaagaaggaccctgaccttttaaaacggtcaaactcggataaatttggtatcattcgaaagctcttgatgagttaagtctaaaaatcaaggtatgaattcgaactgaaaccattaagcactggggcaactgagtcccagtgaaaacagacacttcagtaccaaaaaatgacaaggaaaataatttttaaaaaatgcaaaaaggagcatgcgaagacggagcaagtagtggggcgcccgagcgagcggagccttgctcaccatctcgtttcattgcagaaaattttgtgtcactaagaacttccgggcaattgcctagatcatttgtcccacaaaaaagagtttgtcccattcatttgtcaaaaaaaaattgttttcaaaagtcatgaaagtgtctcaaaaaaaattcgaaactaggcgattgccaacttccgtattgtcctttattcgtttgcatccagaacacacgtaacactgaccctcctctttttgcggccctgcctttgtccacttatagcacaatttgggtttagtggagatccgttaccatcacggatctacaacaaacgcgctgattataatttttatgcaaatcaatcggtaatacataaaaattgcgttagagcttaaaatttaaaaaatcacattcctttgattttttcatttcccatcaaaaacaagttggggtaataaaaacgagtggctcaaaaacgagttgggcaaaagcaagttgggtttttaccgaaagttttatcttcaccatttattccctgttagggatgtgtgtgatctatatgtgctgcttaaaaacccaaaaaaggtatgcacatactgtcttattttggatatttttctaaaaatgtttccacaattattgttttaatgcttttttgtgacaaaattgctagttttatgaaaattagagtccggtaaaaaaattttccgggacgggagtcccgaacgggattcccgtaaaaatcccgctcccgttataatcccgtctaacgggagtcccgggcgggagcgggagtaattcgaaaatttaattaaaaactcacaaaaatattttttaatgcacaaatttaaaggacaatcaatttattnaattaaaaatatat

SEQ ID NO: 27793 - DNA, 1082 bp, Heterodera glycines
tcttatcactggttttgttcattataaattttacaaattatcaatttttcatttcactcttttcccatattcccaggtcattgactcgtccgatgtcgtcatcgaagttttggatgcccgcgatccgatgggtacgcgatgccgccaagtggaacagttcctgcaaaaggagaagccccacaaacatttgatccttgtgttgaacaaagtcgacttggtgccaaattgggttacggtaaatgcatttttcaaccggcacaaatttataatttattccaaataattcggtcacgctttattttgtaatttatagcaaaaccttaattacattgcagaagaaatggctccaaattctgtccaaggaaattccgaccatcgctttccacgcgtccattcagcatagtttcggcaaaggcgcattgatcaatttgctacgacaattttaccggctccaccgcaaggaacggcaacagatcagtgttgggatgatcggttatccgaacgtcggaaaatcctccgtcattaacacacttagggccaaaaaagtgagtgaagcgcaaagggtggtcattgttgggcaagggcgtagccaggggcccccgaaactcaaaaaagtaaaaattttcagcaaattttatgcaattgcatatttttgaaaaatggacctcaaaatggcaacaacaaaaaatagccatttggcgacaaacggttacaaattcctgtaaaatacccccccccctaattcgggatttctaaaaaagaaaaatacgcccttaaaatcgaattgttgagttcagtccccccccccccccctcgaagcaagaatctggctacgctcttgttgttgggtactaaaaaaacgccaaaaaaatttaaaaataaacttaacttccttgcctaattgtagaaaaaaatttttgagaaaataagcagaaaagtcaaaatatgttctgaatttgaagaattttaggtgtgcaaatcagccccattggcgggtgagacaaaagtgtggcaatatgtaatgatgatgaagggcatttacctgatcgactgtccgggcgtcgtttaccctccccacgggg

SEQ ID NO: 27794 - DNA, 993 bp, Heterodera glycines
tgaatgagcaagcacctcgcgaagttcacgctgtaaatattttaatatttataaattaaacatatttaaaagttacgtatttaagaaatatttgactgtttccggtgtgaaattccatatattgagggatcaaatagcgatccaaccaatctcttgaaaaacgttgtgaccgacaaaaaagattggtgattatggaaagcacttggactcgaagacgaaaccatcgctgattgagtttagtaattaaaaatatttttgtgaaaagcgaacttcgctctcgaggttatcgttgctttgagggatactctcatcggatcgtcgaaaaaacccaaaaatcgcaggtacaataagaaattgaatcactgaaaaagggttaataattgaacggagatgcgatggtacagactttggctctattgctattgtataaaaacaggtatttgttaattgattagactcatattcgtgaataaaagcaagaccttcatgagagagtaagtcagggccatctatgagctcccaaagggtttgcacagaagattgttgcaatgtgaacaaactgtcggatgacaaagacggagggcaagacaaataacgggtgacatgcacaggcaatcgcagattagcctggtaatggacgcctttgttaacaataaaaccaaaaatgtttgaatgcgacctgttcaaaaagactcggacacgcagttcgaataggaatttctctttgcaaacgaaggaaccggaaaagatcgggcagatgactcaaaattgtttgtttgacagttggacattgttcggcttccgtgcacggatcatcaactaacagatgttcaatgtgagaaaaaaaagcatcaatttgttgttcatcgtcaacattgagcaaagtagccatgtcaacaatacgcatggctgcagacttccttggtgaaaaatattttaaacgtgttttgagctatttaaaaataaaccgattatgaattttcttaaaataaa

SEQ ID NO: 27795 - DNA, 1260 bp, Heterodera glycines
  unsure (1)..(1260): unsure at all n locations
tttttaatttgttatttaaattagttttcgtaataagatggagcctagaagcaaaaagataaaacaattaaacttcatcatcatcggctgcgacttccactcgagtttcagttagaaattgcacaatgtctgctgattaccgaaaccattgacagacaattaatatgccctgataaaatatcaatttgttatagcaaaatgtgtcctgagtcggattgaaaagcgcaattacatgttatttcctacggtttaccttaaattcaaaaatgaaattttaaaattaaaaaagattcattttttcaaattgaatgaaaaaaatataaacattaaatggtgataaattcaattaattttaattaaaaatacagtttttctcaatttttccctaagaaatttaaaaatgaatttatcacaagcttatgaaataacattaatttagagaaaaaaataaaataattatgattagaagagggaataccgcaatttaatttgtaaatgtttaaggcaccttcacaaatcgcgagaataaataaaaaaaagggcacatcagaactccgagcggcatgcgcagctaataaataagcaacacctatccgagtaaattcccttagtttaaatgattacattttattgaaaaaaagctattgtggttgaataaatttaaaaattgggtcggcatgaatatgacgtaaaaaatattttaaaatatgaaaaaagcgaataaaagaataagtgaaaaaatattaagtgagttcaaagccgaccaacatccttttgcaaaaccctaccaatttccattagaaaaaaggaagaaaagaattattatcaataattttcattttttatcatattttctatggaaaaaaatattaaattctatattgggaatgaataataaaaaactgactaatttaaaataggtggttaaatttttaatatttttgattgaaatgtaaaataaaaatttaaataaataagaaaaaaatttttgacgattgaaaacataaaccggatctattgctcgtgaaaattgattatataaattattcttcaaattttttaatgttaccgaataataaaatataaaactaaatttttaaaacatagagaacatttcaccttatgaatgcttttcatgagaccaactaaaatttaaaaaacattcgcaagattctgattttaacaataaaaactatttataaaagaaaacttaatgggtaacactgnaaaaaaatcgtgtccttagcatgagacatgaat

SEQ ID NO: 27796 - DNA, 1490 bp, Heterodera glycines
  unsure (1)..(1490): unsure at all n locations
aaaaaaaaagantaaagataaatgaagaatttgtacgagtgtattttgagatttcaaatcattaaaaatgggcacccgaaatcanactcaaataaatnttatatggaataattaataattgtcaaaattctccgggtncggtgggacagagtgccagactattttaaagagaaagaaagcaaattgaaattgaaacaatattgtgaaattgaaattgaccatctccaaattcctttttttgtgatttttggcttttatttccgccgtttgcttttttcacaattccgttggtgaacagtgccgtcttttctgctgctgtttttgctgcgtgccaatgccaccaccatcaaacagcagcacgtacgcgtccaactccgcgttgagcagcaccaatccgtcgtccagcagttgaatgcccggctgactgatgccgtacgggcagagacgcctttctaagccgacgaggctaacgcctgcgaaaacatttgaaagtatttgggacgacgggtgctagtgcgtttcttaaaactgcaacccctccgcctgatttcaaaaaattcttgaaaattttttgaaaagttaaaatatttttaaaaatttcgcaaatacatttaaaatttttagaaaattaaatattagaagaaatttacaaaaaaaaattctaacaaattttctgagattttccaaaaatatcaccattttttggctatcaaatatatcaattaatgtatggctaaattgctttgatgactttgacaataattttgtaaaaaatttaagcataaatatcatggtagacaacacttaaagctattgaatgatacaatgaaatattaattttgttgtatttgagcaaagttatgaaacaagaaatatttctttagcaaattctaattttctctgagaatttttctttaaatgaattttttttttacaaaatttaattttcacaaaaaaataaagtgccaaggtttgtgaaatttataaaagagataaaatttatgcatttaaataattaaaaaattaattttgcgtaaaaataattaaaaatgtgcttcagtctttatgagaatatttctgtttatttcacctgaactcagcgctttccctgcagtgttttgtatggcgttgcgcacagtgttcaaaaaactttccaccgtttgcggggaaaggccaaaaaagtcgaacgcatcgccacgaagtgccaacgttggaatggacaatgaaactggcaaatttaatcactttggtaaatattaatgatagggcccagattcaaaaacacacaaaaccactataggttttcttatgcgctgaaaacgattaagcaatcaaaaacttttacccgcttcaactttaaaccggtttttgaagcggcggttcaaaatgccgaaaaatttttcaaaccttttaaaagggtcaaacccggacaaatttggtatcattcgacagctcttaatgagttacattcaaaaacccaagaatgaagt

SEQ ID NO: 27797 - DNA, 1893 bp, Heterodera glycines
tgtcaaaaacttacaaggggtaatgcttcaacaaagaaacctttagtgataaatatttttgtttttcaggaagtgatcggtgtgttcaagccaaaaaatgaggagccttacgggtcattaaatccaaaatgggttaaatgggcgcacaaattgctctgtccctgctgttttggtcgttcgtgccttgtcccgaatcaggcaaacaatttacacagtcttttgacctttcttagcaattcagggttatctctccgaggcgggtgcttcgctggtggaccaaaaattgggcctggacattgtgccaaggactgcgattgtggcattggcagcaccgaccttttactatggacgaattgataggacggtgacgaacacaaaagaacaaattgccaggaattatcccgacttgggccggcatttcaagcgcatcggattgccaccaaaggtggggatgactttcagtttatcatcttccattactcgcagaaattcatttagcggggcagtttccagctgtttgtccgtggcttcaaagatgccaaatattggctcgaccaatgggaacaatctccggaaaagacattgccaaagccaagccgaagagaattgcaactccaatttgagaaaatggtcattctggattacattatgtgagcgatattgataatcattttcttttctaattttcaataatttaagacggaataccgaccgaggaaatgacaattggttgatttgttacacaccaccgacaacaaaagcaaaagaaggaaatggcaaacagagaagaagggttattgaaaagaaaagtttattccaatatttattttttctagtcatcaagcagcagtttgggcgagttgaagcgatcggacagtttgacccaattgaaggaggaattgggcaacgaaccggcaaaattcacggagcacggcaaaatcgtcgatatccatgagccggtcacttacagaagtgaaggtatcagtgcaaacaaactctttatcacttaattgtttgtttttaacccggtagggtccatcagcggtcgtttgtcctccaacagcagttgggaggacgtggaaatgccccaggtgaaagtcgccgccatcgacaacggactcgcctttccgtttaagcaccccgaccaatggagagcatgtgggtttggccgggcacctaccaaaagcacagactgacattgacaccccaattcagaccctttccaatgggcaaaactttcgatggcacagctcccgttcagtgaagaaactgtccacaaaatgttgccggttcttgaaaagagtgactttttgcgcgagttaggcaatgatttgcggaacatttttaaagtgggaaaatctaattaaaaaagaaataaaataaaaatttagacggataagggtttcgacaaaaagacgtttaacaagcagctcagtgtggtctatggccaaattttcaacctgcgcgaggcgttgagggaacggaagacgccggctcaattggttcaggtggggcttttggtgtgaggcgatatgttggaatttcttacaacgctcactagcagttgaaatgtgtctatattagtacggaataataactaatcacgtgtttcgaaaagttagtaacaataaaatgtctcataattttactccgaaaagttggcattgattttccaccttttgctttcagatgacgcccctgtacataatcgagatgaaaaagaatgtgttcaagcagaaagtgcacacgcgttccccgctcttttcatgctgttgactcagtgataggcctttattatcagacattttacgccatttaaaaagttgtaatattaaatttaataaatctcatactatactttatttaatatacataaatctttaaaatatataa

SEQ ID NO: 27798 - DNA, 1482 bp, Heterodera glycines
tatttttattctattcatgaattcccgggggattttggggtcccttatcatgaatttgtcaggtatttgaccaatgccgatttcctaacctattttgcattgataaaattcaaaataatccactttttaactagcgcccattaatttctgttatttgaagcgtaagaattgcaaatttagcgtttgggagaaaaatttgcaattttaaaatttataattttaagcttactgttgttagcacacatttagtaaaatattttggcattttttaaaatccgttccctattaatcactcagatgcaatgttgagtattactcagcccattctctacacgtatttgtttccgcttaactcgcatacagaaacggcaaaagcggcggaaagtcgaattggcattccctttataattcgccacattaattcttatttggcggcaaaaaacaaagagccaacagccgatgccaaagtgaacaaagcatttgccagaaaagcgcaggaaattttcacagaagcgtacaaagggttggcgaaacacggcactttcttcggcggcgatggcatgggacggagtgtgtgcattttgatggcattcaaacggctaattgagggcattttaccattgtgtatgacggacaaaaattgcagcaatttggaacagctcaaaaagtggagtgccaacaaaaattgtgcaacggacgaatgcaaaatgaatgcattcaatgtaaaaaaagaaagaaagtgacacgaaaaacagaaaaatattaaaaattattaaataaattttacaaaggatttttagtaataaatgttgataatatttaatcttaggaacaaagaaactttatggcatctattcacttggaaatgttgaggctatacatcggagaacaaagtgaatttgctgaatttataagaaaaacgcctggcgcaaaaaatcggatgcgcaaattgttagtcaaagaggcgaattatgaagagttgatggaaagttattcagcgactgtgcaaaacgaagaaggtgcgaaaaatatatttatggttaaggttatatttttaggtttttacctcttttttcgtgagttccctcggtctgaaacgcacgaaaatttgttttttataaacaacttttcgagttattagcacctatttttaggtttttatttttagaaccgaaaccctaaaaaaattgaaaaacctatttgacatattttggcgttttgcccaaaattgtaacattttttgtaaaatattatctaatcatgaatttacaaaccaaaagggacctcccattgatttttaataaattaaaattaacactttcaaaattgctcttctgatttcatattcgagatcagcatccaagaaaacccccagaaaccgatttttagctcaacattttttgcatccaatttaaattttttttagtttttactgataattggctggtggattcatatttgggatttctaaacaattttgaa

SEQ ID NO: 27799 - DNA, 791 bp, Heterodera glycines
ttacttttgttgtgtttatgcgttccatgcgtgttttcacttcagcaattttattttccatctcaacgaaagtgtcgtcatactccgacgaaatgcctggaattaatgcactttcatttttaattaccaggtgtttttttaaattcaccggtgtcctcaatgttattggcacggctgatcagtgtttccaattcttggccaagtgtttgcaaaattgcgtcccaattgtcaaagcattcgccgaacgctgggcaacgaggcaatacgccagtgtaactgtccaatgtaagtggattttcaaatgatttttttttagaaaaaattaattgacaagaaaaaacatcgaaattttcgattttttattatttttttggtttactggtcacgtactattgttttcgagtcatcgcttgaatgtcagggctattgaaaatttgcagactgtcagttgggggagaaataacaattgaatcgacaagggcctgaaataattagacattattatcagggtagtaattgtaaagtgccaaaaaatgtttgttgacagtagtataaggccccggggcgggggtccagacccctgcccccgcttaaaaaatcatacatttcacccatttttttaaacaacgaatgtgatccaggggcaggggtccaaccaccatccgttcaatccccataattggatccattgagtgctatggtttgaacttttctaccagtcaaccttgctcgctatcacttgcctatgtgctacgtctatttagggacttagttcacctaacagtttaatc

SEQ ID NO: 27800 - DNA, 1037 bp, Heterodera glycines
ctagaaaatcattcccaacgtttagcatcagatcgtccaatattagaagcagtggtttgggttgaccctgaattaacgcttgattcggcacaccgttatgcgtctcaattccccgcttcatcagctcaataaccgattcgttcatctcagaatagcagtacagtactttggcaggtggtggatcgattagctctgtgtaatttctgagcaacttcatcaaccattgagttttgccactgccagtggctcccgacaaaattagagtgaatggtgcgataaacattccttttttcatttgattgaatcttttttccttatttatatactttccgacagatttgattgtattattttctttaattatatctatttttaataattttgttattattaaattatttttagctcttctaagaaatggtgaacggttttttaaaatggtgtttatacatcaattatcacaaagtaatttggtctatctgtggcctaatggttagtgtgtttagttctttcggagaggggtaaaaagttcggtcccgacactatgtgattggatttttaaatgaattattagttataaattaatgctcaacacgaatacgtatcagtggcctaatggttagtgtgtttggttctttctgagagggggtaaaaagttcgatcccgacaccatgtgattggattttgaaatgaattatttagtcagaaataaaatgctcagcacgaaagcgtattagcggcctaatggttagtgtgttgggttttttcggcacaacctgggttcggttccgcgcggagttagcagattaaatttcaggacaaatggtcgaaaagggacaaaaggtcaacctgggataaatgatccaaaacggacaaaaggtcgacaatgggacaataggtcaaccatgggggcaaatggccgtttgagtaccagaaaggacgtttcagtgccaggactctggtactgaaacgtgtcagaaaatctgggactgaaatgtccgagactgaaccgtacagggaatcgtgggcttacacta

SEQ ID NO: 27801 - DNA, 1000 bp, Heterodera glycines
tgacttgcgcatacgctaaactccttggtccgtgtttcagacgggtcgaacagatgaccggcttttacaccgagaacgcacaactgagagcccgagctggaccgaactggttgctggtacgtgtcgcacgcgaccgccaccgacccccagctcgagtcaacacggacccgaaaccattgcacaattcacccagagtaaacagcactcccccgatccgggtaccagaccccgaaaggctggcctcaagaccgagctcacgcagctactccgagcatctcagcgcactccgcctgcaaatgccccattcgccactgaacagaaggacagcaaaccccagtctggaggctagcaggccaacgtacagcaacaaacgggtgaatgcagaccagatacgccagctctgtccgtttccacctcatcggtttcacgtcctctttaactctctcttcaaagtgctttgcaactttccctcacggtacttgttcgctatcggactcgtggccgtatttagtcttagatgaagtttaccacctgatttgggctgcgatcccaaacaacccgactccaagacacgtaaagatgggtaggcaccgccagttggacaggtcttgcaccttctctggagccccggtcaagggaaacttgaacaagcgggccaacccaagctcacggtctatacgctacacctcgcaaccccagaggagctgcgattcagcgctggactcttcccagttcactcgccgttactacgggaatcctcgttagtttcttttcctccgcttactgatatgcttaagttcagcgggtgttcacgtctgagttcaggtcgaaaaatcaaagcaggaatgccagtaatccaggcactccgccacagcatgcaaagcattggtgcgcttgagtttacgtccgtaaacgcgaattagaaccccacagtcgcgccagcacaccaaaccccacagccgagctgagcaagtaacgtaagaacacgtacaagtacatg

SEQ ID NO: 27802 - DNA, 1645 bp, Heterodera glycines
  unsure (1)..(1645): unsure at all n locations
gggttttgagtcccgtactgaatttcgcgaccaaaatttgnctgcgggggtgtgnnnctggaaatgtatgcgtgagcatagggcaatttgtgtctcggttcgttttgttggatattttctctcaattcatttagccgaatataacctcttgggtgaatggcggacacttggtgttccaacattgaatcagtccggccacggccatccaacggaagtccaagcagttcgttctcgttgtgctggtccaactccacttcttcgcccgccaatgaaagagtgtcgttgtctaaacggcgagggagcatgttttggagaacaaaattctgagccggtggtgcaacggggtcccggttctgattattgggacttgaagttcgaattgggacccgaagtgagctaaaagctatttcgcgctgatgattttccagaaaaacggcggccggttgaaaattccgcgacgcttcgaagttctccgccgcataatccgtccaattcgtccgcaatccttgctgatgtgcgacgtttatctcgttgtcctcaatttcgactgcaactccattgtctaacagacgacgcaactcctgtcgtgtcatataccgacgactgttttccattgtgaagagaagagaagaatttgcaagtttctacaagaatgcttgctgctgctttttcttgtacacttctacaagaaagtgcacaaatgttgggcgatgggacgatggcgattttgtagttttttttttttttgatggtttgttactcttctacaagaatgagtaacaggcgcgtcaattgatgactccttaatttctctgtcgaatttgtggtgtggacaattgctaatagtccccgaattgttgttgcaccaccaaatcaatagaaattaatcgaacaaactctgctcacccttgtccaggagcgccatgtcgtactcttctggtgcgaaagtgcttttcggtgcggcgatgtcaatggaaagcaattagtgataattcgactccttttgaaaacaattcactgttggttcgactttccaaaattccaaactcagtcaattggtggccaaaaatagaatccaaaattatatttagcacaaaacaataaaattaatgagaagatgagaagacaaccaaaaacataaaaacataatggtccaaaactgagaaaagaaaataactaaattaaaagagacaaaatgccacacaatatagcactaatttaaataattatccaaatatcacaaaggcaataaaagaagataaataaataataaagaatttattagctctgagtttatattttttattgtttgcccaaaaaatattattcggtctcaaattatatacgattagataaaatacgaataccaaaataataaaacttccattctaaataatacaattaacgattatttttaatcatatattagagtttataaaaattataaattacttttacaattttgaaaatattaaaaatttaaaataattaaataataattaattgattaataaatatatatctttcttattcgtgtggaatttattttctattaatcgcgatagaaaaatatatactgaattgaaatatttaatttaatttataatggactatcatagattcgataacaaaacaaatttagaaa

SEQ ID NO: 27803 - DNA, 1304 bp, Heterodera glycines
agattcatttttgtggttcaccattactttgacaataatgtatttttatcaatgtaattttgagtctttttctcatttgtgattttgagaggttaatgaggcgataataaaagccaaataatggtacagcatatcccatttttaccatagaattagtttttgcgactcagaattttcaaaatgttgctttctgacaaaaaaattcgatgcgattatgaaaggcgaaaacatttcatcaattatattttttctttattaattgaaattggccataaataggcatttttacctgctaaaataaggatttagaaagagtaaaggcaaaatttgacttaaaaggtaccaactgaatttaaatttggcattttcaatttagaaaatttcattatttctcacttattttgacactcctcacggttttcattcgattgagtccaaagaccggtcacagcatacaattaatggaaccacaaattcatcgccgccagatatctgctttaccgtttgagctgctcgctgggttgtccgtgccattgcggcattacagactcggcaccgtcaccacagctcatcgagtatcaccaaattggcttttaaataccgcgccggtctgtggacaaacttttgcccggttcatcggagaaggccatcacaaaaacgtaaataaacaaaaacatttttaattatggacttaacatttaaacacttaattatggacttaacatttaataattgattttatttataaattgtgacgataagctagcacaaagatggctttatactgccatcctttttttgtggaagttcattcgtttaattcaaaaaaaaagtggtgtaaaatgcagcgtccaacggtttgtatttactccgtttgaattgcttgtggcaaaaaatacaatagacagtggaccaaaccaaatggttggttctggtcggcagcattcggcgaaggtgaaaggatacgagcatactgatttgttataattatttaaattattcatattttaaataacatttattttaaggtgatatctcaatttaataaattcatttgaaagtctatgcaaaccgagatgattgtggatgaaaaacttcaaaattttagtaaagcaaaaagtcatgatccattttttatgaacaaaaagcatggccaattttatgtctactttctttagtttttttttgagattttaaattgattaagtgaaatagtgatatacaaaagaataaattcacagggtttcatcggtcaatgacacaaatgcatcttctccaaagtaaaaagactatttcagatttaa

SEQ ID NO: 27804 - DNA, 769 bp, Heterodera glycines
  unsure (1)..(769): unsure at all n locations
aaaacncacttcgccacacatgcaaatcnntttttggaactgccgaggccaaaattgaaacggtgtgtataacgatgggtcaaactaagtgttagacaaaatgatttataatgccaaatagcgtaattctgggtgctaatcaaaaaacatactgatcagtgatcaatgcctttttcgcattggttgttttgagcattcataactcgcaacatcttccagctaaacaaaacaaatttttatctaattttttgaaaagaagtgagtgctaaacacaccgtttcagtttctgtctcccagttccaaagagatttgactttttgtcttagtggtctagtatgtgttagtcaccaaaaggggcgtcccaggttcgaatccgatgcatgttaacgacngggccaggacgttttcgcgtggccattttcgcgtggccgttttcgcgtggccgttttcgcgagcggcacgttttcgcgtggctgttatcttgcgggtactactgtaaaatcatcgattacacttggaaataaatgctagaggaccgtaatatcgccttcaataccctttgatagtttctttggacgacgcataatagaaagtgatatcataataattgacgaaatgacaatgttgaagcgcacagtttttgaaaatattgatttagtctgccgacaattgtgcactcaaaaacagcatttacctttcggtggaaaatgtgttataatttctgttgattgaaaacaagtcactttccatatgtaataggttcttatgg

SEQ ID NO: 27805 - DNA, 854 bp, Heterodera glycines
cgatccacaaaaaatctcagtgtgggcgatccacaaaaaaactcagtgaataattaaataatttggtgctaggtcgatccacaaaaaaactcagtgtgggcgatccacaaaaaactcagtgtgggcgatccacaaaaaatctcagtgtgggcgatccacaaaaaatctcagggtgggcgatccacaaaaaatctcagtgtgggcgatccacaaaaaatctcagtgtgggcgatccacaaaaaatctcagtgaataattaaataatttgatgttgagcggatcttccgcaaatgtaaacgggccgaacttgccacgaagtgtcctttgcttgtcttttctcactatttgagtgccataactcgaatatcttagatccagaccaaagttatgaagcgccgcgaacacatgacgtactacgtggactacttccaccggaagaacatgaagggatggcgcgcctaagataaagactcaattgttttgtaaaatcttagttggatttcagctgaagcttttcaaatggcataaaattgatacaaaatcacaaaagtaaaaaaaaaaagaatcagtcaatcttcatcttgtcagtcataatacctttcgcgcaagagacagttgccagcaaatgtgtgccctcgggcatttttcaattgcatttgaatcacccaccgacactcaatgttcaccacgcacaaacaccaataaatatttgcgtcgctaatgccaaaatataaaaatttgaaatttttcttcgaaaaaaggggcggtaccatcggtggtattacttttgcctaattgcttctaatgatacatttcaccgaacaagagaacatatccaaaatttccagtttttt

SEQ ID NO: 27806 - DNA, 183 bp, Heterodera glycines
cggtgtcatctatgttactagatcgaggatcgatccccgagcggcgcgtagcgggggaggtgggtggcggaagaagaaaagggtggggggagtatgagtatgatggtcaatatggagaaaaagaaagagtaattaccaattttttttcaattcaaaaatgtagatgtccgcagcgttattata

SEQ ID NO: 27807 - DNA, 1665 bp, Heterodera glycines
tttcggcatttcttcggcattttctgcgtttcttcagcactttccgcattttctcgggcgtcaatacttttcgtcatttcttcggcacttttcagcgggctttcttcggcacttttgggcatttcttcgtcttttgatggcagagtgttgattgatggcacttttggcaatacgccctcacttatatcggattgggtttcctcggcacttttttgcattgcatcgtcagttttcggcatttcttcagctatcgatggtatcgcattcagtgagggcaattttgtcggtgtatcctgtggaatttcttcagtgttttctgttctttccatagaaatttctttggcattatcatcccctaggctgttctttttaagcatttttgccatattttccgatgattcccgtgacattcgccttaattctgtctctgcactgaaaaattcatcgtccattgagtccgaaacatcgcgaaacgttgaatttggcgttaaaaaattcgggctttgaattttatcccgatcatttgcatttagcttaatatgaaaattaattaaaatttaatttgtttttactttttacctcattttcttggttttcattcttttggccgggctcttcccggctttcttggactgttttatcattttttgccgtaatttctggctttgctgacaatttttcctgttcttcattaaatattttttcaacgcttgctggcactgcatttattggtggtatttttggcatttcgtcagcgtgtccatgcatgttaaggggcagtgaccgcattttctgcaaaacatcctttggcacttcgtcagtgtttgcgggcatgtctttgggcaaagatttcactttttgcaaggagccattcggcatttcgctgaagttgggcgggagttttccggcacttttcggcatttcttcggcacttttcggcgtttcttcggtactttttagcgggctttcttcggtactttttagtgggctttcttcggtactttttagtgggctttcttcgacttcttcggcacttttccgcatttcttcggtactttttagcgggctttcttcggtactttttagtgggctttcttcgacttcttcggcacttttccgcatttcttcgtcgtgtggtggcagagcgtttattgatggcacttttggcaatgcatgttttggcatttcttcaatgttccctggcatgttgacgggcagtgaccgcattttctgcaaaacatcctttggcatttctccaatgcttgctgacatgtctttgggtaaagatttcattttttgcaaagagcctttcggcatttcgctgaagctgagcgggagttctccggtacttttcagcgggctttcttcggcacttttccgcatatctccttcgcttttcggcatttcttcggcatttttctgcgtttcttcagcacttttccgcatttcttcggcatttttctgcgtttcttcagcacttttccgcatatctccttcgcttttcggcatttcttcggcatttttctgcgtttcttcagcacttttccgcatttcttcggcgtcaatacttttcgtcatttcttcggcacttttcagcgggctttcttcggcacttttgggcatttcttcgtcctttgatggcagagtgttgattgatggcacttt

SEQ ID NO: 27808 - DNA, 1019 bp, Heterodera glycines
attaccccgtgaatgcgtgataaaattattgcttgtagcaaatcacattaattcacgcttattattagaacaataaaaaattttattttttggaaaaagtaggtccaaaataaggccggattcgtgctcagcatccgaaaataaccccagaaaaattttccgattaagtttattttagagttactaaactccaaaatgtcaatttcgaacaattcaataaatgatggagatgatttgacgccagcagaaaatgagggtaaatgtttagaaaagggaaaattgtagaaaaattgaaaaattgaaatttagaatgtgaaattaaataaataaaattcaacatttaattactgtatttattgaattagagcccccaggggctctattgttcagccccctcaaaaaggggccttgattttaggagggctctaactcagagggtggctataattcagggggggggggctctaattcagtaaattcggtttaatattttcagaagtgaatggcgatgcaattagtttggacaacgatggtcaattcgatgggaaaaacagcaaattgtcactgatcgacaacagcttaaggtgaggggaaggaaaagttgaaacaatttggagaaatatttgaatttaatggaacaaaagtacttttgttgtaatttaaattcaggaatttcgtgaaaagattgccaaaatggaaatggaattgaaaatggccaaattggaactcgaaaatgtgagagttttgccataaaatttggaaaaagaacaaaagttaaaacagcagcaggaactgatgggcgaacagaaggaatttgaggaaaaaactgaattggagaaacagcaacacgaaactacgaccaaaggcgaggaagttttaagcgaataataaattaattattaaagaaattatttatgagttgaaaataatttaattcattaaatgtccatttaaattcgaaaaaaagtagttttaactactttaaggacagtaaacagttctaaaaatagcatatctac

SEQ ID NO: 27809 - DNA, 1266 bp, Heterodera glycines
ttcatcctgaccgattgtccattactgacagatagccctctgacggattgtccgcagcctttcaaaacacataaaatgctaccaacgcagcacatctggcaacaactggagattttgtatagaatagatacaatataattattttataatcacttcttttttaattattgataattaaattttaaaaaatgcatattttttggattttgttttcggatttccttatggaattgattttttattcatatttctaaaaattaagttatttttagatatttgacggttttctttcaaaaatttttaaacattgattaatgcataggccgactaagaattaattaacacgaatttagcagccagggagaacaaaatatttgtgcataattgacattggaatttatttagtcaaaaaaatctagattttttttgccacagaattaatttagtgttttaaatatatatttatggagcagaattttttttaactacatatacatagtattttacatgttaaattttgctcaaattttgcccaatttttttctaatttaaaatttattaatatttacaaatttattaaaaacccgaaaaattattttaatttttgacagaaatcttagcttccttttttgctattttaaaaaacttactaccccttaataatctttttaattaattagatgatccaatttattataagagtaaaaagtcattaaaaaagttcagatttaatataccattagatatgacgaaattttatgccattgtcctaattggtttttgtgtttttgttcacaattttttggatggtcaaattaatcataaagaaagcaacaaaacgcccgaatttatgtcgaacgtatgctgaaaataaattaaaaaatcggtttacctcagttggaccgtcacgtttgggccccagcacgtttttggctataatttttttttatcatctttgtatcattcgaaagcttagcatgtttagaagctatttgtaagatattgcttcgcgattagacaatttccaaaaaagttataacatgaaattgcaaaaaagcccaaatttttgaactttttccttaataaaatttttatatgctagaaaatcttttcgctttttgtaaagccaatagagagcatgtaaagagctttcgaatgataccaagattgttagatttggatgaccaaagaaaaaagtatacccaaaacgtggtggggcccaaccctggcggcccaactgggcgagtccaaaaattgttttttttt

SEQ ID NO: 27810 - DNA, 934 bp, Heterodera glycines
aattatttggcctcgagttcctcttggccaatgctgatccctacaattagcagtgatcgagagtctcggacaattctttgatcgagagtctcggacaattctttggcctcgagttcctcttggccaatgctgatcacttcaattagcagtgatcgagagtctcggacaattctttggcctcgagttcctcttggccaatgctgatcacttcaattagcagtcatcgagagtctcggacaattctttgatcgagagtctcggaaaattctttggcctcgagttcctcttggctaatgctgatcacttcaattagcagtgatcgagagtctcggacaattctttgatcgagagtctcggacaattctttggcctcgagttcctcttggccaatgctgatcacttcaattagcagtgatcaagagtctgggaaaattctttggcctcgagttcctcttggccaatgctgatcacttcaattagcagtgatcgagagtctcggacaattctttggcctcaagttcctcttggccaatgctgatcacttcaattagcagtgatcgagagtctcggacaattctttggcctcgagttcctcttggccaatgctgatcacttcaattagaagtgatcgagagtctcggacaattctttggcctcgagttcctcttggccaatgctgatccctacaattagccgaaattttcagaaaattctttggcctcgagttcccctgggccaatgctgatcacttcaattagaagtgatcgagagtctcggacaattctttgatcgagagtctcggacaattctttggcctcaagttcctcttggccaatgctgatcacttcaattagcagtgatcgagagtctcggacaattctttggcctcgagttcctcttggccaatgctgatcacttcaattagcagtgatcg

SEQ ID NO: 27811 - DNA, 1479 bp, Heterodera glycines
gtcccagttcgagtttttctctagatttccggacagtctgttactcaaataatcgaattcttaatttcgtttttgtacataaaaaaattcggcacttatgtattatctgtgtgccagattagaaaaaatttttttttgagaataaacttattataggttatttttcggtccgcgccccatcccctggttagacgatgaaaatattttccaaaaatttcacttttaaggtgaccaatgtacagtttgtacaatggaatttcgtacaatttttttaaatttctaataaatatagaattcttttcacaaaaatcaaaattatttttttctgtagaaagttttctgcaaatttcaaatgctccaaattttttaataaattttttaagtttttctaaaatcattccatttttcaagagacaaattcgaagttttaattgaaaaaattgtacgaaactctattgtatgaactgacatggcactgctataggatctgcctaagaaaaatttattttatttaaaaatgaaatttatatgaaaattattcagcggagctgaaatatttttcttggtatggaccaatttttctaagaaattgtagaataaaacccacattttacttttacctattttagtacatattttggaattttggcacccaatttttttaaaaactccaaccaaatttccaatctgtattagccaatctcccttttgattgatcaggaaatgatcaaacacaatggacacacgaagctgtgcccattttttgcggaagagcacaaaacaaattgcttcaaaaagcaattcattagggagacgaaaatttatttgcattttaaggaaaaatgatttcatttgttttctaaagcaattaatatgatgtaactggataatttggagataattaagttggttgttcctcatcaatctcttatctttgagcacaaacgtgatgggaaaatgtgcacaaaatatcgtaaaatatattttatattcaaaaagggataaaaaaaatttggattgttctaaattaaatttaaaaattacaggacgaattctaattcatatttctacaagctattttgtacttgcctatacatcgttaaaactcgagacctacgaaatgattttttcagtttacaaaaaatagcttcccgaatatttttatagttttattaaatttaccaaattcaaaaaaattcccttttgaattttttttgtccgataaattgtgaaagtcgtaaatgctggatgtcagtcttaagattggtaaattatcatagtgattgatgtttgagagtttcaatcgggagtttcgattcaaaaaactcgggtttctcaattcttcaagtcctttaaggtttctagactcgaaaattttcatccgacagctgactgacgtctcataaaaatggggtttcgaattaaattaaggacttttttcggacatttgcgccccagtgaaaatcggacacttgcgcc

SEQ ID NO: 27812 - DNA, 1993 bp, Heterodera glycines
cccaaactgggctttttaaatatgggaacctggtaaatcttcttatttagtcaattcttcagccgtttaacgtagggttagactcgcattagtttccgctcggattgagactcgaatacccggcttatacggaaccgaaatatcgagaaagtccaattttatttaagggcataaaaatgatataaaataatatattttgacatcgatccataaagaattgtaatgagtccaggaaaattaaccttttaattgagtgtataattcgcttaaaattttaaatctaatttgattaaaatttttgctttgagattagaggtattttttatatatatttaaatttttttaaatgctaaatattctgcagaatctttccggtgtccaaatttctgttgcccctcgaacaccaagaaatttgacatttattcttggaaatgagctgttttttcttgaaaaacaaaacgcatataaactattttaactattaaaattctttctctatttattaattctcagaaaactcatcaacagttgacgtcggcgaactaattaatttggaaaaagaattggcaaattttgagcaaaatattctccaattttataaattgggtaattacataaattgaccacttattctaattacggttttgtctaaaaaaaatccttcgaaaaatgaataaatggtcgaaagaataatggaattttatgtcaaaacccccaggcacggtaatggctgcaaatttagtaccgtacccgcacatccatgcctggggaaagccgatacatacaattgaaatggtattcaaccggcgaattgcactcccggcacaccgtgccattggcttctgtaaacatctgagtaagggcaccgatcagtttggacttaaaggcaacagcgaaaaacagctggacgaaatgcccaaaattcgaggaataattttgggacttcgtgaagagttcaacacttttgtcatcgaaattatgttgacaagaattgaaaatgaaaagggtgccaatgaaaatgggacgaataaatcgttggaaaaaatgaacgaaattctgaaatttttggaagagaaaaatggcagcgcattttgtgatcagtcaatcatcgaaagtgcgaaacgaaattcgacaatcggaggcgaaaaacataatacatttttgatcgaataattttaaaaataactgatttgaaagcagtttcgcaaaatgtctgatttttgccccaaaaatgtgttctgattttgaaaaattgtcgatccgagccctggttttacacgacttttaaaatttaatttttttcgaaaatggggggaaaaggtaaaaaaattcagggggatgacaaaaaggataaatgttgacacgttaataggggacgaatgcttaaacgacagaaaacttcatgccatccaaatgtctacgtcaaacagagagaaagagggagaggatcaaatttcagttaataaattaacacgcgcttaatgaccatcaattcaatttatttcggaacacagatggaattaaagtgataatacacagcaaatgatatatgcatacaaatgtacaatacatcaataaatacagatcacgattatgagacatcttctttatctttgcatcttctgacaggtcgctcgctcttcaggtttcgtccatccatccgccggtcgttgttgcatcttctcacatgtaggcgctctgttccgggacttctcatgctgcaaaaacaaaagattagtgatgcttttgctctcgtgtcccccttaaaccaaccgctggtggctcgtgcgcgggcgaggctcccatgtaggcgctcgcgactcctgacgatggagaggtttccgcggcgccggacgacggtgcaggctcggcggggccggatcccatgtaggcgctcatgatgaagtgatgagttgtcgcgacgaaatgtgtagacgagcttggcgcgcactggtgttgatgttgcgttgagttgaaggctggctggcactgg

SEQ ID NO: 27813 - DNA, 726 bp, Heterodera glycines
ttttaaacagaattaaatttaaaaaataaacatttactatttttaattgatttcattttcatgaaatttcaaaaatcttactttttcctatttgttaaaaaaagttttctcaagaattagactaggttgccgaaaatttttttgcattttcgatgccgttttgtcccgtcgacgttttggggtgggttgtacaccgtcccgcccactttccgccgaattttttttttcttcgtaagatccgattaatctttttgccttacatctcgctttatggtgttgtcattcaatatcaacaaaagttcctccaacttttcatcattttcatctgtatggtgcttacaattagctgctttatcaattcttgaagaagaaggagaatcattttgtagtgataaaataaatgcaaaacggatcatatcattatcaatcgatgtttctaaaaagaggaatgaattttggctttttagaaaaatataaaatataaaaaatatcctaaatatttaaataggctaatccttaaccaagaaaaaggtgattaaataatgttttttggtatatattgaacaaaaaattggtttttttagaaaaaagattcaaaaaaaatttccgaaatgtccgactttttatcaaaaatttcggaaatcggaattctgacatcaaaaattttttcagaaatcggaattccggccccaaaaatgtcggaaatcggaattcctgccatccctg

SEQ ID NO: 27814 - DNA, 894 bp, Heterodera glycines
tgaagatcgtcttagtgaggcgttttctaacgcaaacttcatagatggtattccgtcggaaatggtggccaattttgctccattgaacctccgctaaaaacagtgactttgccggggaacgcctatttttgttgcaaagtgagaaattaaattgtcttttttatatttttttaaatattttttcgtattttgcttgcttattcgtattttaattttgttattattatttttttcttttttttggcttttcgtttggagatttgtggtgggggaacggaagcgatgagttagcatgcactgaattaattcccccgctttttccccttacccagtcatctcgctcccttgcataatataccaaatacgtcatcatcataatttttccatttccccatcctttaaaaacatccagttggttggttatgttgtttgctttttttcatccttctccccttccatttttcaggtcgctttgcccgtggttttctcccccgcccggccaatggacgacgatggtgtcgacaccttttgctccacctatatcggccaaaactgtggacccgtactgttttcaattgaagaggcagggttggatcggaacaactgctacgaagcgtttgtctctctgtagacggaccatttgagtctcggatttcactcctttttcttttaggacctctttcaacgcacctccgttagaagatacaaatccaacatcatcatcaccagtgaggaacggctgtagatgggcactcgtgaaaaagtcggacatttgcggcctttggaatggcgatggagtcgcttcgccagtgacgccgctaaaaatgcaactgagtcccaccaccactggcagttttttgcttctgtcaacaccgtcgaccacagtgaattgat

SEQ ID NO: 27815 - DNA, 1334 bp, Heterodera glycines
  unsure (1)..(1334): unsure at all n locations
aaacggacggacagtgcgaaaaggtcggcctccttgcgcttcagactcgtctccatgtcctgccgctgcttgcccatctcgtccaaattctcgcgtgcaatgcgcacttcgccctcgaacttgcggcgcgctttctcctgctcggcacgtgcacgacgctcgcggtccatttcattttcaaccgactttaaaacaaaagaaaataatatatctgtactttttgacaatttgttttattgaaattaaggcacggcgtgccgttgaaagaatttgaaactttggccacctccaaagtttgttgcagtttctgtcggtgcgctttctccgccgcgtttcgctccgcctccatttgcaagtcgttctgcagtttggctgcaagttcctgctgctgtttgcgctccttggccagtttggactcggtcagttcctgcttgtgcagttcatcggccagtgtccgtaacttaaaaaattgtcaattcgtttgctaattttgccaattcattagttaatggtcgattagattgctaattatcgccaattgattaattaattttcaattcgtttgtctaattattgctaattaattaattaattgctcttttccgttacctggttgtccttggcctgcttctccgcctccaatttgcgcatgccaacgtccatgtcggtgatgtttttccgcaacgactcgcactccgcttcggtgcgtttccgctccttttgcaattcaatcgcacgcgactcttcgttggcaagacgcgaattcacttccaccgactcattctcaagcgcttgctgaaaccgaagagaaattaatttatccaaaattttcaaattttctataaaaatgaatttgaattaattagagggttacagtagccaaagtcaatgttgtgcgtacggtatacaacgttgtcatatgtcgtacggtatgcaatgttttaccattgctttcatttgcgagctaatccatcagttctaagcaagttttgtacctttttgaagcggattatttccaactgtgacttcatctcttcataccaatcaaatgctcttttcaagtgcatcatttgaatgtcggaagccattttttattttagaatgatcggaaacgacataaaatttgaatgatcactaaaattagctgatcagcagaatgagtgatcaatgggcgaatgatttgcgggggggnggggggggaagcgatgcttttgattgttcgattggccatgtgaatggccacacaaaagcagcaattagtcatatgaaggaaggaaaaacacgaaaagggtaaatattggatcgaatttcatttaaatgagtgatcgagtgag

SEQ ID NO: 27816 - DNA, 1153 bp, Heterodera glycines
ttaaaaataacaaaagagaaaaaacgcattaaaaattaaataaccttttaaagctataataataatagtgattaagacagacaaaaacgaattaaagaaatttttgccaaatcctggccattaatcctaacccatgaatgatacaaagaaaagctaaaagggtcaattaaataaaataaacgtcatccataaaaaggacaaactacgccatttattggacggacattcgtccaaaatcatagttaccttatggattggatgctcgagtttgactattttaatatgcgtctttaacgcacataaacttatgaaaataaatgtaattaaaaataatagtttaggggaaagatgattagaataatccaagagatgaaacaaattaatccgttctcttagttcaaaaatttttataaaaatcacattgtgcatttaattacccacgtttaggcaaatgttgcttattcatggattgataaaactcgttaaagaattaccaattaattttaaataaaaattttaaaattacaataaaaaaaataaaattaaactatactatacttttagaaagaatggatgaaaacattgatacagcgaaattgtaaattttaataaattgtcaagaactcggagtacaaatccagcagtagcatggcattctgccattaaaagtttattattaaaatcaaactcggaaataaataaagcgaataaatttaaatgtaacgtagaatattccaacaaaaattgtttatcgtataacttgcaaagaaaaaagattcattcttatcctttgtatactaataagatgtcagtaaaacaaaaaataaaataatgttactttttttaccaatcaatgcgttttaataatctacaaattataataaatcaaaaaatattttaaaaaatacaaaaaggaaaagcaagttaagccataaaaacaataaaaaattaaacaataaatttaatatgaaaaccaaataaaaaaataacaataaaaggtctataaatcatgtatattctttacttggcaaaaatgaacccaatgtatgagctctttaaagatagatatacacccagcattaacggctgctaaaaacaattgttaaatatttcatatttaatgtaattaattttaatagttttcatcggatat

SEQ ID NO: 27817 - DNA, 1071 bp, Heterodera glycines
gctggtcgctgtgagtgggaggtggagcgttttgctgctgcctaggatttggctggccaggcggcatattaagatcatcatcaccaaagaaagcttcttcaactgccaaattgatatttttggcttttgaatttggtggatctgggaggccacagtgcatgcagcttgagtttatatacgttatattgacaaggagtttcgtttcaaaaactaatttgagcttaacggctaatgggacgggtctgaaagtagtggaagggtcttacaactttttgaggagaattcgggaaaactatagaaaaaaattctcgacgcccaactgagtcccgaggagcgatttctcactttttcgtgcgtttgacggcccataactttttttctgaaactcggatcaaaaaattcccgctgtgagggcactccgcagaagtgtcctctataatccggtattttttattttttaatcagaccaaatcccggacctgtacagacacggagactcagttaatttttttttcccacttcagtaccaggctaataactcattaggctttgacctgagcgcagggtggccagcagacttattgtagagctttaaaagcccgatttttccaaattttaaaatttcgaaaattttcaaaatttttcgagctaggcctaaaaaacggttttcgggtttttgaattttaggattttttaacgaattttcccagaaaaacgaagaccacttccaaaacatagttttttgagctctatcgattggtaatttttttggaaaattttcgatttttttccagaaatagaaaaaatttttggcctcagcgggacatttgagtcctgggcccataactcgtcaggggttgattttagcgaaaaattgacttaggacatttttgtagagcattttaaatgctatcgaatggtgtactacatgatgtaaaattttcaaaaattttcgagctaggccccctagaaattttcaaaaaattttttggggtcgaaaaagggtgtgaaaaatatttttctgggctattttgaggtgttgaaaaaaaatataatgtttattttaagttt

SEQ ID NO: 27818 - DNA, 1077 bp, Heterodera glycines
ttttgatttgttgcccatttactggaagagataccgcagtgattgtccctctctcttttctctcttcactctctctctcacttttctcagtcttttttccctttccaactctaattgtttctactctttatctttctacactctctctctgtttccctaattactctctcattaatccccactctctctctctccccctttcctttctctcatccgtctccatcagttgtgccatcttttcatatgcctaaatgaagccgggcgattacttcgagattccgatctccaacagcttaaacaaaacatttctctccctcaaaaaggtgtcgccttgaggtacaattgatcggctcagaccgatttgggcgtggcgagcgactgattggccaagtgcactttggctcgaccgcctccggcggcggcactggcgcatcctccgcgtccgcgcggatgtcaaccgcggcgcggctatggcgagacgcaattgaacgccagtggagcgtgccgcgttgggtcatgctggaggctccgttggatattgccgcgggaggcggcgccattttggagtgaatttttcgggggtatttgatcagcgatcaacggcaaattccctttgattctcccgccggtggatatacatgcaatcatcttcattggataaataattttttaaatccatttcattaatggaagctcctaaaaattaaaatttgtttttaaacttaaaattcgaatattccaaaaaataatgaaattaaaattttgaacaaatctattaaatttaaaaatattctattgtcgtgcacaagagcatttttcgcgggtaattggaaacccttagctatacgagatttgaattttgaagttgcgggtcaatctgataaatgtcaaaatcaagggcttgcaatttataaagctcaagaagcgaaaagctgggaaaaacttatgaaatattttcacaatttttactggatctgaatgcttctgaatccgataactttgttcggcaacggattttgcggaattggcaaaggcttcccatcggatttgacaatttgcattcgcttggtgccattt

SEQ ID NO: 27819 - DNA, 596 bp, Heterodera glycines
ataccgtatttcttcgattatacccccccccccctcgattagaacccccctctcggataaagccccccttttgaggtggttgtactatagagccccggatggctataatccaagcaatacggtactctttttagtgatttacctgccccccctcccatttcagtacctttgtctgtttcgtcatcgctgttcgcccttacacgaccgaattgtcaccgattcaatgtccatttatttgtacaggtgtgtaaacaactattttttgcatatatttccgacttttatccttccttttcagactctccctcctctctctgttctctgtttcgtatgtttcgttcattttttggcaacttttcggtgggccacgcagccccgaggacatttgcgactgggagcgcctgtggggcttcttccactgtctttgggtttgggtccgtctgacgctgttggccatcggatgggcttggattgctatgcaatatttcatcggcgccctctgttgtcgcgtcgcgttgaatttcgtcaaaaatcgctaccggtgagcagagagtgaactggaaacagttcaattacctttttttaattttgtcttt

SEQ ID NO: 27820 - DNA, 1773 bp, Heterodera glycines
tggttgtcacttcgtttcgcaacgactgcgtgttccttctagagccgatggcaatcgaacaacgattcgccgatcactctcgactccgccacaggcattcgttctcccgcccacaatttttcatcctcaacgtcacggacaaactgaaccaaatgagaggaaggggtaattaatcaattagttaattaattggtctcccctaattatttctgccaattaattaatagggtcgcctcccctccgaattgtacctgaaacgcggcctttttccgctccaattggcgccttcggtcgtccagcggtgccctcagccgttgcaattgttcggtgatcgctattcgatgtgctttgatctgctccaactgttccggctgcatctcctccaacttaggctccatgtcctgcaacgactccaagtgcatcactttgcgtaccatctgaaaaacaattccgttgagtgccattcttttggcatttcgtcgtgccaatgccctccctctcacttcctgctccaactgttgctgccgttgcatggccaagtcgacggtggtcaaatcttgcggctccgagggcggctcgccgatctgtcgctcgatttgctgggcccagtctttgacctgtcacaaaatgccaatggtttgatgtgcacggcacttcgtgccaacttctccgatggattgcacatagagctgttgtcggttggtgtcgaacaatcgctgtcccttttcctccgtcgtccgttccaattgttcccactgctgcgacagttgcagcacttccgggtcgatcatctcgtggaattcgggcttttcctccgcgagttgttccgccgcgtggtgaatctgaacaacaaaccgtgggaattggcacttttatcctccctcccccgggggcttttggctttgcctcttcgaggcgccgtttgttggccgccaattccgcttggaatgcttggtgacgcatgaacttcgaagagatcgtcttcgcgtctctgtacgtctcgtcctgagcccggatcattttctcctcttaatttgaataattttcaggaaagtgtcacccgccacgcaatttcttgcattaccgcactcgtctcgacgttccattttcctaccccgcgtccctctccgcttcttccccactcgcgccccctccatcgcttcccccactcgctctcccccccgcttcatccttcatgttcaccccgccgcaccctctccgcttccccccccgcccgtctctccccctttgctccccaattcgttctcacctatccactcgcgtaactcctcgcagtcgctgaggaactgctggacttggaccgcctcgcggagtttgtccagcatcgcctgcgccttctcgcggttggctgctcgtctctcctcaatgtttcgcgcctttttgtgcactttgtccgctgcgtaatgtccgtccgcgcacaactggtcgcccatttgcaccaccgcgcgcattttctcgtcgttggcatccatcgtcgtcatgaagtcctggtgccgcttcagcacattctccgcctgctccaatgagacgggctgttcttcgcgtgccatctgagatttgtttcatggcaatcactgctttacggcaattgaccaacggtttgatcaatctttgatcgatcgatcacaccaaaaaatcaatcgataaaattccaatcgccgcactgactttattttcctgcagagaaaggatcacttccgcttgtttagcgcgtgtacagaggagaggaaggctgaggccctggctgaggaa

SEQ ID NO: 27821 - DNA, 1144 bp, Heterodera glycines
tttgacaatgttccatttttggcaaatttatttgtaatattgatcaatgatcattttcattaatatctcctgacatttgtcttttttcacgctttcttttgtgttttaaactggcgatgccttcgctcactcagaattaaattctctactaatttccattcataatccggaaaaacggtcaaaaattataatggaactaataaatgaatacgaataaacggcaattaaagagagaggagtattaatggtttaaacatcggttgctaaagtgactgcaagaaacgagctaaataaacagagaaagagacagagagagagcgagagagagagagcgagagagagcgagagagagagaggggggggggaggggagacttctgtttagtattgtataataaacaataattattcttgcataaatgacaaagcttggtgtgggcgggaaggaattggtgtgtttggaagaaaatttatttgcaccattttattaattaatatttgtttaatatcattgtggacacgcaaagaaatgcatttgcataaacattgaaaattcattgattttcaatacaatattttatatacatatacgaatataaattgtgcttttcatgccagaaatataattatagtaataaaataaaaattatataatattattaatttatttcatttcgacctacaaattttgataaaaattattttgattcgcttaaacaatgattatttcaaagttattgcttttgttattgagtgaagttttttatttgattccgctgggctcatctgatcgctctgacaaaacaaaacaaatgcatattgatcacccaaacaaatcggaatcaatgggctcatctgatcactctgacagaacaaaacaaatgcatattgatcatccaaacaaatccgtatctatgaattcatctgatcactctgataaattaaaacaaatgcatattgatcatccgaataaaaccgaatcaatggactcatctgatcactctgataaattaaaacaaatgcatcttgatcacccaaacaaatccgaatcaatgggctcatctgatcactctgacagaacacaaaacaaatgcatattgatcaccaaacaaatccgatcaatgggctctctgatactctgataa

SEQ ID NO: 27822 - DNA, 888 bp, Heterodera glycines
aataaatatgtttgtattacccatgtttttacctgcccacacaggtctatgcgcatacgcatataatttataattgtacatagcctagcaatatatatataagtaggcttgatgtcatcaaggaatgtataatattggcggtattctttcactttttacatatttaaaataaataaaaaaaagaaaaaagaatgaataaaataaatattttacatattaatgcataaaataaatattttttaggtgctgttttgttgttaagctaggtttcttatttttcgtttttttcattcccgaacctaaaaaaactaaaaacataaaaaaaaaactcaagtttcgtttaaacaaaaaatattaattaaaatttattttaacttttttagcctaaactgaccaattttttcttctcatttcctgcatacatatttgattttgtcttatttcgatgcatggccaaactattaataattattccacctttttttattaaaattaaataatatattttattaaaattcagattaaaaatatattaaatgtttctaatcattttaattgccattttttcattttaaaataatttaatgagtgcgtcgccgaacaatggtccagaaggccaaaaagtggggcaagacaataaagaaataattaagattctccctaatgaggatcctcagagaaatttgatcaaattaaattccatttttgcactacaaatttcaaaaaaattgtgacaaaaaaagttttacaaaataaaattgtgccaattttggcggatttaccgtacgcatttttcttacacataaattaggaaacacaagaacaacaacatggtacagcagcaccagctgcagcagttggaggcgaaaagcccgagtttaaatcgaa

SEQ ID NO: 27823 - DNA, 1592 bp, Heterodera glycines
  unsure (1)..(1592): unsure at all n locations
cttattttagttgatttttggcaaaaactcgaaaaacagaaaaaatgaagtaaaacgataattttcgaatattttacaaaaaaaaaacaaatatttttaaaaagaactaatattgcaattcctgattttgattacttttatcatttaaggataatttattttattttgttcaaaattcgaatttgaagtagctattcataagcacatttaatttttatgcatttgactcatttcattcaaaaggacaaatcttaaaaatggacagatgcttgaaaatgcccttctttttcaaaatttaattttatttaaattaaaatattaagaaaatgccctccatcatttccaaatcttcaattttgctgctttacccattgcttctcaccacgatggtgttcatttccacttcaacttcgtttcccctgctggtcacctacaatttcaatcaaccaatccaactgctcaaacttctcaaaattgacccgagggtaagcaaaatcataaataattttaattttctgaattcccgtaattaggttttagtaagcataaacaaaaaaatttttgcaagaaatatttgattaaaaataggattttttattcttgccgttttccgtaattacctttttagacaatttaaccttttttcgtaatgagataaaattcaacaaattgttaacatgtactaactcgaatatcactaaattttcagttataacttggaatctagatctaattatattcaataaatataatcattttaatttagcgacagttggtcttggcccgcttgtccgattttgggctgaaacgccatgcgccagccgagtcgccaaaatgataactctgccggaggtgcattattgaaattggaaaatatcaaaaaatttcccaaaaatccaaaatccatattaaaggatttttaaaaatttgagcctttttcaaaacacagccctggtccaaaaaattaggcttcttataatttagtaaaaatttggaaaatataatttttcatcccaattctccgaaggttgacctcgctgggctccttcatttaaattctacattaaacatgggaatataaaaataggaaatttcggcaaaattttaatttgttttttttcttaaagcatccatcgtttgaacccgcgaatgccaaaagtgggcgaaaccttttatgcgcttcgagcgcaatacatatgattgacttttattccatgtttttccatcgtgcaaaatatattttagaaacaaaaattcattaagaatgtgtgatgattcattttttgatgagtaattaattaattgcttttttctaaatgttattgctttattattccttcgccttttgagcttcactggtcgacggcaaaagatccgccgaattttgtttgctcgactccaaacttttgccgttcccatcatctaaagagtggaaacaattaactaattgctcaaatttgagtatacattaagtcccacaaatttttaaacatacgtaaaaatttaaatttttaaaaatttcgaagagcttttaagaaaaattccattctttatttaaatagtttgttgagaganaattcattttgttgtaa

SEQ ID NO: 27824 - DNA, 1024 bp, Heterodera glycines
aacgaaagactcagattttcgaaaatttttttgagccagctatctcggcgctcatttcagtgtaagttagtcctttaccggggagtatccctgcaaagtttggtacgcttctgctcaattagcaaaaaatatgagtgatcgaattttcactaaaaaagttaagcctacattttttggcatatttaaaaagcaattaaaaaatttttaaaatttaataattttcctgcaccgaaggtactcactcggcctcttcgcggcctcgtggtgggccttcgcccccccctcccacgcccttcagagcacgacaaatatttcaacaaaaattttgaaatcatgtttcccactcccttctcccaggggtattattttgtaaagtctttttttccccaataaacttttcaaaccccatttttcgcaccgtgaatgttatttttatcgaattctgaaccgttttgagtagattagactagaaaaaattgaaaattttgaaatcatgtttcccactcccttctcccaggggtattattttgtaaagtctttttttccccaataaacttgtcaaaccccatttttcgcaccgtgaatgttatttttattgaattctgaaccggtttgagtagattagactagaaaaaattgaaaattttgaaatcatgtttcccactcccttctcccaggggtattattttgtaaagtcttttttccccaataaacttgtcaaaccccatttttcgcaccgtgaatgttatttttattgaattctgaaccggtttgagtagattagactagaaaaaattgaaaattttgaaatcatgtttcccactcccttctcccaggggtattattttgtaaagtcttttttccccaataaacttgtcaaaccccatttttcgcaccgtgaatgttatttttattgaattctgagccgttttgagtagattagactagaaaaaattgaaaattttgaaatcatgtttcccactcccttctcccaggggtattattttgtaaagtcttttttccc

SEQ ID NO: 27825 - DNA, 1596 bp, Heterodera glycines
caaatggcgctgcgcaaatgtctcatcaagttgctatagtaggttcttatatatccatggaatctttaaactaaaataagcacctcgcctatttataaactaattaaaccaaataataaaagaaaaaataagataattaataaagaaaaaaaattcctgtttattaaaaaatggaatataacaaaagttactggctcaaactataaaataacaaaaaaatttttaaaacaaataatttaattaaagaaataaaaacaaaaatgttatggaacaatctttaaccaaatacgaataaattgaggtaaaataaataaaatatattgtaaagctttagcgctctaacatggaaaaatttgacaatataatttaattttatctcacaacactcagaatatatttaaacccatttatgtcaacaaaaagctttctgtggaaagttaaaaataattaaatattctatcgaaattaatgtgacatcatgaccaaagcagcatgtaccttatatactgtaatgctactcgaacgagatttcaatcaaccttaataataaaatagattaatattttaaaaataaaaaaaatatttcccaaagattttcaataaaaaatttcaaatgtttattaatcatttaattttctatagggatcggatttatttaatgattttaactgatattagtactgtgctattactctatttatggagacgcacattttcgctaaaacaatataaaaagtagattaagtttcttttataatttatgtttaaaaattcgtatttgaatttttatgttttttggtctttatcgaaaatgagaaaagaaatttttattcgatatttttgtatatgtatccctgtaaatctgtcaaggaataagtaaataatattaattaaatattaatattttgggataaagagataaaattataaagataaaaaaatttacaattaattctcttttaaattgaaaaaacttttatattcatattttaaacaaaagaatgttggaaataaatttacaacaataaatcttcacatgtattttaaaataagtgaatcaaaaaatctctaaacgcaacatcgcaatgttggaaaattttattatcaataatgttcgtctttgtagcatggataagttataaatatgtcagataaatgttatcttattatggacaaaatgaatcagaataaaataagtttaaaatctaaaaacatctctttataaggcaaactttaaaattatttgtaaaattgaaacaatccaaaacgtaaatagaaatattatttatatttaaaaatatacatttttgtgatcttatatcaaattaaacaaaaaataatttattttatttcgaaaaaaaattttaattcacatttctcaattttgcacatcaaaagtcgatttattgtaaagtcacacctttgccacagatggattgaactgctgatgaatcgcaagcctcgacaagaaaaattggagggatttaaaaaagttaatgagtgaaaataagtttaattagataataaatttacatgcaaaattttagatgaattagaaaaacaattttgtaaattgtttaaaacaataattaatag

SEQ ID NO: 27826 - DNA, 1742 bp, Heterodera glycines
  unsure (1)..(1742): unsure at all n locations
tttcatcttttttttcaaaatatccatctcaacgaggccattgaatcccgttaaatcctacacggcctgatgcaaatccccaaaatctcgatcccagatttttcaaaaagtacagtctctaatatcagtgtatgtgtgccgactgccgacgccctcaaaaattttgaaaaccggaattttgagcacaaaatgtcggaaatcggcattccgaatcggaatttccggtccctgacacataaataaaattctcaaaaaaaaaagcgtacgcacttattatttattattatattcattcattatttccacatgttttcaagttgatattccttatttctcccttaaaatttatatatatttttaatgctttagattatttaattgttttaatttggtctaaatgccggacggaaaggcgcctcatttcccccaacagcccgtggccaggcaaaatgacgacggctcgcttgagcttgaatgttttctggaggccaacccggtcccggaaatcaaatggttttatgaaaacgtgagttactctctcacaaatttcgtccatcaaatattaaattttttttattaaattcagaatgaactgaaaccaactgaacgattttcattccgactggacaacagagggtccgaggccttttcggccattctgcaaataaaagttcttgattacctttttttcattttttaaaatttttttcaaattttcaggatttggcggacagtgacgccggtgcctatcgctgtgccattgtgaatccgttcggcaagggcaatgccaacttcaatttgaaacttactggtaatttacaaaaaaaaaaaattttcttttaaaattcctaatttgcttttcctattttcagggttcagttcgccaacattcattgaaaaaccgcagatttcttcacgtgacgacggccgggtgatgatcatggagttcaaggtggagaaatgcattctataaacaaaaaattgtaaaaaaaatttttttaggctaaatccattctgaaaccgacttttgtgtggcaaaaaggggacgaaattgtggccgagtcggaccgttacaaaatcattctgaaggagacggggaaccacgaggtgaccaaaaagagggggaaggaattttggaaatttttttttgaaattttcttttaagtattacgcggcattggaaattgttgagccaaaaaaggaaaaggacgcgggacaatttgtgtgtacggctaaaaatgagtcgggaaaactgacagcaacattctcagtgaagttcgaaggtcattgaaaaaaaaattcaaaaataggggaaatttatgtaaaaaaatccacccctccctccccccttaaaattttgattatttctattggtccccgacctcaacttggtttaaaaatgtacggataagggcaccgggaaattgtgaggcgggggtcggattcttggcaaatcctatctcttgctctgattcccaatccctggtcccggatttttcaaaattccgggctgaatttttanaacttttttcccactttagttccacaaggtgcccccaccttcacacgcaagccacagatnttgcaaaaaacatcagactctggcgacccggccattgtngtcgacatcggatttcaggttaaccatttgtaagagatacaaaaaataactttgatcctaaaaactcngcccaacaaacgaacaattgtcaatttttatgatgaaatttcatggtgcgcta

SEQ ID NO: 27827 - DNA, 2192 bp, Heterodera glycines
  unsure (1)..(2192): unsure at all n locations
tttttcctctagctgatcactatccccgtgcccccgcccgtcgtggacggtgtgcaccatttgtgcacccaatggacaacgccatcggtgcgcacatttacttacgccggcggcacttcgccttcctcagcaacagtgtctgaagaggacggaatttatcgccttccacgacgcttgctccgtctgacccaaatcccgcgcgagttgggcttggacgcgcaagaattccgttgtgcggggtgccgtcgaaacattggcgcttcttttggtccattcaagtgggtaaaaaatgggcaaattttttgaaatttaaggtaattcccaaaaaaaaaagtcggtgcggtacggcactaccggacctttattttaaccatatttttggaaaatggaccccaaaatggcaaataggtagtcattttttggcgaataacggctacaaattcctgctttctccccggcgctgaacttccatttcttttttaaactcaaaagtggagggtgtacgtttttaattcgaattttataaatatttttgcagtgtctgcgctctgaacggtcattgttattgcgtcggccattgcatcaacgcgaccaatgcctccggggagaacggcgcgacgacactgatccccgcccgagtgctgctcaatggcgactttcggccacgaatgatcagcagggagtcgctgatgctgttacgctccgtcggggagaggccgttcatgcgcttggacatgctcaacccgcaaatttatgcacactgccaactgttgcgcaaagtcagggtaagtgagtgagtgggggatttattttaggtagaattttgaacatttattcggccataaccggggttcaattttggtatagttttcaatcggtctacgcatttttagaatttgaggcatgtgttctctctgcacgtgctgtacttgttttcctgcaaagactccgttgctgaggatgccaaacgtcgcatttggccccaaaaacattggcacgaggacatccatttgtactcaattgcggtcagtttacgaccacacaaagtgtgtcttccatgtttgttttttcgctgctgcaggactttgagagtgtggccaatgggacaatggaacgccggctgaacgcgctgatcatctttgcccaatgccatatccagggctgtcagatctgtcttcaaaagggctttttctgcgagttgtgcaacgcttccgaccagccaatttaccctttccaaacggacatcactttacgggtgtgacagtttgttgcttttctgttcagttacaaggcccattcaaaattggaccccgtaacgaaatagtgccacttttaacaacaaaatctttttcagtgtcncaattgtgcgtctgtgttccacaaagagtgtgccaaaaaggctggtctggacgattgcattgncggtctgagcagcgagcagcaacaacaacaaaataaatgtccaaaatgccttagacgcgcaaaatacgcctcgacaacgacggggagcaacagcaacaacgcattggcacagttgcaaaataacacaaacatcaaatagaaataactaactcatggtcctttcttttttaatataattttaatgccttttcattttgcaagtattttcctgtgataaattttttatgttcgatagggttgtacatacattaacaaatattatgcttttagtttttcatgattatttacttgacttaatataaaacatttggtaaaacacgaaaaattttatcaaaaaataaaaaaatataaatgagcaaaaaatgggtgggtggaatgttgttcaaaaaggtattgctgtttgattaaagtgccatctgcattttgatgggtggcaacgggtcgtacccctcgagcagtacactttcgggtgtaaagtcgtcgatgctcgtgattggattcccatccggccgtttgaaaacaattcgtgggaagggtttcggagttcggcccatctgtaaaaaaatatatagaacgaactaacactcatcatcacttgttccttgagtgattcgacatggtttaggtaaatgtgagcatcgccaagggtgtggacaaattcaccgccctaaaattagaaaaatgaggcattttcgttttcaatttcctcactttaagccccgtgacatgcgcaatcatttgggtcagcagagaatagctggcaatgttaa

SEQ ID NO: 27828 - DNA, 1421 bp, Heterodera glycines
cccagcagtatacaaacgtggatcatttcctggcatcatcctgctgatgatgataagacgaccatgctggtcaataccaacagcgtaattaatgtcgttaactaaacaaaaaattctttgaaaagacaccaaaatttaacttacgttctctcactgggttcactaaaaatatttaaagtttttatgaataaataatattcatattcaatagaaattttcaaattttataaagatcaattttcttaattattatgtatagtgaaaaccttgaagaatcaaaatttgtagtccattttcttcccctaaaattattgctttactattgggcaatataaaattattcaaaatcaaattttaaacacccacccaccattattatcaacgatatgagccccttcattaacttaaaaatctatttaattaatgtaaatattcattaatttaccttccggcccaacaataactaaaaaacattaattagaattttacattaattaaaataataatataaagagaaataaattatttttttacaaaaagacaatcgttgacgatcgggtggaaagtcctcggaagcaacttggccacggcaaactgggcaagtttcgtgaaaaatttgtacaagcctaaattagttaatttttaaatctcaattcaaatagcttaccatcggtcaacacaagctcgatgaaagcgatgctaacaaaaaattattgttttataaatataattttttttaataaaaaactcggcatgagcttaattgcttcatttcctcaattgccgtatttgttaatgattccaagcaaattggacaattttctgccgatgtcgcatcatcattgttttgagcacccgttgaagatgaactcggatcgtctgatgttgcagcatttgtttgtgtcccattattattattaataccattggcattattttgttgtattccatcattgtttatattattattattattatggccagattcattagaatttgatgacccttcatggttttcgtttggactgttcaagtttggtgctggttgttcttccactgggtctgttagaccaaattgttcaagatattctgaattatttacattttaaaataattttgacgagaattgtttattttatttcgtttttataaaatttacatatttaattaaaaagctttcttatccaattttaactgttttaccaataaaactatcgcttgaagatgaacttaaactgtttgttctctcttgttcaccactttcttgtattgaagaatccgcatcaagggatagttgttgtaacctagctaaaatattttttatttctaacttaaaatgagttttttcttaaaaaatatttttgaaaaacaggaattttcattgtttcaaaaaatagaaataacacagcgaagacgtccaa

SEQ ID NO: 27829 - DNA, 1502 bp, Heterodera glycines
  unsure (1)..(1502): unsure at all n locations
tttagaccagggtgacatcatcatgcttataactccaataacatcaaatgtggtcgatgttgtatttaatcatttttgcaaagtggagcagagcaaagctaaacacgtcaattttnacggtgccccatttgtataaaccgtcactgtcctgaacactgatggtctaccccgtcgacgaacgaccaaaggaagtgctccgaccagtctctcatcacaatcccacatcttcaaaattaacaacaacgacaactattgcctcttttatgctctggaattaatgcgcttctactctttgtataaacgcggaattatatccgaaaaacgatggagatggatgaacaataaccaaactactgttcttcgtcaaaaagtactacttttactccgcgatgccgggattccgacaactgaaccggaatacgatgccgaaatatacatccatcaagtgcagggattgtggagcacaaaatatcccggtgattattttactttttatattgatttttattaatgaaataaattacattatttgttacaggcgagtataaaatattcatctttaatgactaccaaacccgacccatcacaaggtctgacgtcaatgaataccaattctctattattctctaccaccacgacaaacatttcgacggcatcaaaaccctttccaaattcttcaataaaaattattattgcctctcttgtgaaagcgtatacgagcgcaaatctcaacattcaatgaattgctcttcactctgccatggatgtcgggaggtgggcgttgactacccatgcgagccacaacagggatacttcaaaaaatgtgatcaatgtaacaacaatttctacaacaagatctgctatgaacgtcacctacacaaggatctatgcaccaaatttcagcgatgcgaggactgtggggtaatttataatgtaaagtatcacggtaaaacaggtcaccaatgcggggaaaagttttgtcgactttgcaagcaattccatgtaaaagaggatgatgaggataatccgtgcagtagctgttttatccaacccctaaaaccccataaacttaaaccatacaggatcatcgcttatgattttgaagcgacacaggataaaaaagtaggtaataaattcgaacacgaggtaaactttgcagcggctaccatcatttgtaccgattgcatcaatggaaattggaaggactcacttaaaggatcctcttgcaaaatttgtggaccccaccgcacaatcaccttcgcaccattcgacttctcaaacacgatagtggaccaaaaagtcaccactatgcacccgctgcgcgactttgtccaatggcttcttttcgaccacaacaaaaagttccaacagttgcctttgcacattttgngggccgctacgacatgaccatggttatcaaggaagtcatttcgcaggtanaaatttattaatatntaattaatttttatncatcaaggtattcataancctgatattatcaa

SEQ ID NO: 27830 - DNA, 904 bp, Heterodera glycines
aactgaaaattctgttctcaataaggccttaatgacttatccactcgaagattagccaaaatgcattataactttggatgtgagaaattcgaaattgaatatccgactcttgtctgaattcaggatcgggattagatatgtcgaaatgaatttctctattcgtgataagcggcttcgaaaattccctggaacatatcttttgtcaaatggggggggggagaagacaccaatggtggggcactattttgctccaacacttttaacctgactgtaattgaaattttaatttctgattttctccccagcgaagaaattttgaacattaacttcaaaaggatattcgtgcatctctgttatcttctaatattctcaccattcccctaaatgttggcctgtgggatttttgtcgacttttttgcgcctaaatgtcggcgagcaactcgaattttgatttgttttggtcactctgatcagtgagtaaacaagccacaaaaatactaaaagatcacagatccgcataaaaatccattcgcttagatcacaagtactttttaaccttgtataatgcctttgtttgaaatacaaatatttaaaaattacaaaaatttttcacggctgcgcgtctatcggcaccgccggaccccttcttttccaaaagttttttggtgtgccgaaaaaagtgatgtgaaaaacaaaaaaaagtctaccggcgtgcggtggtaccccctctaagctttggaaatattttctttagtttttattagagtgcagcgggaccgggaatttttggcaaaaccgggaccgggacttgccgggacctgagaagccgggaccgggaaccgggaccaaccgggaattttaaaagattcaaaaaaatttttaaaaattcaaaattttttatttt

SEQ ID NO: 27831 - DNA, 1512 bp, Heterodera glycines
tcatcattattccgtagtatgaaatttggccatattccctcgattgaaaaagtacaaattattgttgaacattgatcaactgcatctgaattcccctacctccactgatcagtgtctcatgatcattccgtattttttttaacaatgttgatcaattccatgaaaaaagtacaaaacaatgctgatcaattcccaccgattacaaaaaaaaatgtctctcttctgtccgtggccttgatatgtagtaaagtttattgtatatatttgagacttggaataaacagataatttccctttgccaatcaaattatgcattgatcagagagagtctgtgcaactctcacccgatcactcacattctcatttaattgcacattttaattgctttttaattaaaacaataacaataattagcatagagctgcaatcacatgaacagttacttttacatatataaattgctttttttaccgttatataggaccggaatattattattatttgttttgtgttggtgttctgccgccgatcattacgccgccgccaaatattcgcgccgtaataagcgacaaaacggaattggctgctgctcaattgttgttgttttgatgctttcaccactgccaccacacattgcgcagtgtgttgtgcagctatataatgaatgaaatgccgtcattatggaaacgacgacaacaatggcatcatcatcaacactgatcaaacaacagtgccgggcacagcaagtggggacggcggcgcttggttccgaaaccgctgccgcccaacagcagcagcaacaccgttactaccaccatcatcatcagcctcatcgtcataatcatcagacgaatgccatgctgaacaaaaataatggggggtattatcatagtccggcattaatagaggataatgatcatcgtgatcatcctcatcataatcttccgaattaccatcagcagcataattttcggcatcaacaacagcagcagcagggcaacaaccaaaaaggacggcatcaccaccaccaaaatcagcagcaacaacattatcatcagccttcaattatcaacggctatggaggtggtgatgatggtggagggaggagggccaccgaagcgaatgggcggcagcgccggaggggcgggaggaggaacaggaggcttttcctcatcatcatcagccacaacaggaggtgcacagtcgtcgggggcgggggcggctgcgataattgtggtggatccaccgcgtccgccgttcatcccgaaaaagccggtcctcaatgaggctgggaatggggcggcggttgctgctgttgatgagcatcatcatccacgccctcaccaccaccaccaccgcgaccacaattgcatttatgcacaagccaattgtgacggcaataatggtggtggtggtggttgtgctgcagctgtgaattcatcgacaaattcgacgacggcggcggcggcggtgttcgatagcaacaaaacaaaagttcaaatgacgcttgta

SEQ ID NO: 27832 - DNA, 1303 bp, Heterodera glycines
atttcaactgcccgtgtaatcctcgcttgacgtcgacttccctttcgccgtaataatgcgaaaatctagggaacgaacgacggattagccgaaagtttgggggaaaacaacggatgagccaaccatttccagcagatggctgtttgtgctaatgactgatcagattggtctgatcagctgcccttccctccgccttctgattaatttttttccaaacatttgcgttgttttgagctgccctttcacttaagtcctctgctattttactggctaaatcaaatagtttaagtggtgagattaagccaaagcctattaaattagtggacagagaaatactacggccgataattacccaaattacctaattcattcttgaccatttctccatgccgtcattgctcaccctcccctttctccctttatgtttttctctccccttctagctctatccttttctctccttctgcctctatctctttcgagccctttatctcttccgcctctctctctctctctttctctcctctcactctttcactttgtttatgtctccttggccgtaattgtaaatgagaaagcaaccccaaaaaagttccacctatttttcccatttcgtcaacttttctcgtaaggtttctcatcatccgtccgtctttctctccgattccctcgggggataatccgcttatccctcccttccttccccccgtctccccgttatctttcattctattttctttgtgagtggtggcacttttaaatggcacttttttgccaaaacttttcaatcaaatttccaacattcaaaccgtatgaccttttttctaccaatgcttttttcgtcggctgttttaaatatccgtcacttttcaggttgtacttaaatgatgtgaacactaaattttcccatggcttttccttttaagtgaaaattcattcgttttctgtgagattttcggcattttcccacccatccggtgattttctggtttttgtgtcctctttggttggtttattttatcccattttcccttcccctccccaaccccttctttctttttgtcattttcattctttgtttgtttgcattgccaaattggtcaaattccccgtccatttactattttaatgccaaattccttcgtcatcccggtttcttttctacgttcctcagcaattggaatttatttccttcccttctcactcccacaagcttaaataatgaggggatgaattgaaatcttgcttctccccatttcccctctcccgcttattcccacttctttctctcccccctttaatt

SEQ ID NO: 27833 - DNA, 1606 bp, Heterodera glycines
  unsure (1)..(1606): unsure at all n locations
gaaggcggtcggcccggcaaattcggacttttccgtaaccaaagtggggaaatagggagggagcgggggctgttttgatggtggcacaactgagggacaaaaaaagggagagaaatgccgaatttagtcccatttagaagtaaagtcattctcacccgatccaacataattcccagcagcagctgaaggaaaatgctgaggaaatggtgatgaattttcgtaataatttgcgggaaaattcgtgtgccgttgttctcccagcgattggtacaaattgggaggaggcgccgccgattggacgtcggaggaattggctaaagtgccggccaaaagcggcgggggatttggaggggaataatgcgacacaaagtgagaggacggagacagaaactgtaaaaacggtaaagacttaagccttacgatgattgagcaacaaagcaattaatgggccaaaggaaagggaattggaataacaaaggaacgccgctaattaatgactcttgagtaattggcctcggctcgagaaaagtctcggcttttggagtctcagtctcgagtatcgagaaattttaagtctcaattccattcttcactgctataaaagggtgaaatgtccgtcgctattccattccttcgccgctcaccgggcgcactttggccgacggagggaatgcgccgatgagcaaaacgggcggcttcgtcgcctgtcctccatcagcgatcggatgcaccgccgcttccgctgccgtcgtcccatgcattccatcgcccgagttcggcgcgtaataggcaatcccgccgagatgggccggggacggcacagcgaatgcggcgccggcgggcgaccacaacggcgcgtattgcccggtgggtgagcggaaggacaattgcggggaggactgctttttgtgtgcggaaacaccgaaggaatcgtcgtcgggctgatggctcggcattcggggaagcatcggcggacgctgtgctgcaaatacaaattggcaaagtcggacacggacggtgccattctgttggcgtttgtcggatcaccgtcccaaaacttttgccacataatttttgctcacccggcggctcatagcggcctgaggcaaatgctcgaactccgtttggcattgtccattcactcatcaaacggttggcctcccgcccaaacggtcgttgctttgctaatggcggcgtgggcccatttctcgtcgatgggacagcggacgacggcaccgttttttccgtaattttcacccctaacattttatggcctttctctctgcttccgttctcctcgttttgtccaatgacttcctcttgccgatgggcggtttctttttgctgcttcctttcttccgtttcggtttgcccttttcctcccccctcggctgcgttctcctccgcctcctcctccgctttttcctgggcggcgcttccctcctgtcnctttggcgtttctcttctcggcgtcgcttgcggctgntgcgccggctcgtccgcggcccctgctcttctccgcttaaaaggtttgcttcggtncntgttggctctgnntcgcccgaaaaagggcattgcgtgaaaaatgggcccaaaatccgaccct

SEQ ID NO: 27834 - DNA, 1003 bp, Heterodera glycines
aatattcatagatttttttccattttcccccacttttttaaggtgttcaactccatcaaaatttcaaatattcatagttttcccgttttcccccactttttgaaggtgtccggccagcattttcttctccgccctctactccgagtcggtgtacactctgttcactcagctcggcctgctctttctctgctccgcacccgtctcccgccttaaccaactgatcgcttccttcattttcgcgttcgcttttctcacccgttccaatgggcttgtcaatgccggctttgttggcttccaattgctgcttgacgccattctttgcgcttcgccgtccgatggacagcccgagtttcgggaatggtctcgacacttggccaaacgagttcggttttaattcaaatttcaaaaccgtttatgtctccaaacttttatcattctattttaatgtagaaatgttactgaaatgttttgctgaccaaaccacccatcatttctatttccggaacgagtcgtttccgtcgaaaatttttcaaaaaaattcgaactaattttttaagaaaacattttttgaaagtttttttttgcgttttttcaaaattttatgatgagtttacgttttttcgaaaaaaattttttcttgaaacaacaattagaaaatttcaaaaaaaattctgaatcacattcactttgttcagctgttccgcaacttttgcttctttctgctctgtctgtgtgtgatggcgctgccggtgcgcgtgtttgaatttgttgtgcgtgacaaattttgcgcaatttctcacatttcgccaattgacgggacaacgacggcatggcattggacggacgaacgccttggcaattttgtgcacaacaattcaatttccatggcattggtgttgcccggagaattgggcaaaatgccgtggtgcaacgaaaggtgttgctgttgggatttgaacaaaaataaaattatgaaaatgatgagaatttcaaaattctaggg

SEQ ID NO: 27835 - DNA, 1911 bp, Heterodera glycines
  unsure (1)..(1911): unsure at all n locations
cattcggttatcgttcttcgttacgttgttgctcattttgnnnacaggtgtcgtttttggtgggtttctcttcttgacaaaggccaacactttgccaataattcgtttgaaaaggtcgcgcaatgtccttacaaagtaccagcaaaaggagctgaataaataaaaattaaaaatacaaaaaagagtttaattgcctcgtcggatatgggatacaaagaaacgaagaattggagcggataagacaaaatttgtccgattggatgacagagccagtaattcgttgtaccaatcgtaattgctcgcaaccaccgttcatcgtaaaaacaatagccaggatttgaatggcgaagccatgtcgcagtgattcgtctgctgtttttgtccaccgattgtgaagccattcccacttcgattatgcgctttaggtgaaacttgggtaattaaatatttaattatgcttttacccttaatccatgccaaacgaatagcaattgccacataaaatgaggacgaaacacccagataagtcaaataagtccacgaatactgtgaaagaactaaacccaaaaaacttttgtattggataataaatcaaattaaaaaatgatttaatatcttacaaatgtaaaaaggagtcaaaatgaaggacaacaaatgcaaaagcaaacgttggagcagaatgcatcttaaaataataaatgtgaatgtgattcaattgttattggcctaaattcaaattgatatgtaaattaaattaaatatttttttaggtgatcgaaatcgagttcgatgattagttgctcgaaaggttaggcgctcaccgaggtcttaaatccccggcactctcttctatggttattttcttcttcaccgaaaattgatcacaaaaaagatgcttattagtattagctgtgatgtaattttgccaaaaaattcacttttttgttattttgtgagagtaaagaatggggaggagcagtgcgtatgctctgtttgctgccaatgcaatgatatgcaaacgattgttgaccaaaccgaacatggtcatgttctgtcgtgcattttggctgatagcgataagacggatgaccaaaggattattcaaaattttggagaataggaagagaagatcagggaaaagctgaatggcatgaaaggcacttttaacttattcaaatgacaattatggcgctgccgtcctccggaggcttacgcactttgctgaccaaaatgtacaaagcggtgcgttctcggaccaatttgaacaacggataaacgcaaaagagcaggaacagaacgcagagcagccaaaaagtgatttgagtgaattggcgcaattttgggtcgatcaacgactgatcagttgcactgctgcaattcattggcgagaatgcagttttttcgtaccaaaataccaagtttaataaatgcgagtgaaatgaataaaatttaattggtatgcactgtcttaaatattatacggcgaacaaattccacccttcaattatttggataacactaattatgtatgaataatttatcttttagcccaaccaaaaaataagccattgccaattaataaaaaatgccaaattataattaaatcggacatgggccacccgtatttctaaaaactaaacaagtaattacgcccacaataaaggcatatcatttgaccacctgccggttttcgttttttattttttctctttacgtcgccagaacgttcaaagttttgtccaacgtctgcttccttcaccggatgcgattttttttcttggtgtacattgacgtatgaaaacggcgtgaattgtgagaaaaattttaaaaaaaccaaggtttttctgggtatggctgtgcccaattgggacgactaacggagaaatttttcaaaattaattaagaaaatag

SEQ ID NO: 27836 - DNA, 985 bp, Heterodera glycines
ctttagtaggaattttgtcagaatttttaggcctgcaaatattgagaattagaaataaaattttacgctaaacatatgaccacctaaaaatggaggtaaatgcatttcagctaatacccaaccagtaaccgcgggcacttttcttcaagtttggcatcattgaaaaggccactaaaaatgctacataattgcttttgatctttacccgatttgtgcctttcttaccgcttcagtgaaaatttaatttcaaaaaataaattatgctaaacatatgaccatgactgtagaaaaaaagttaaagcgtcacaaagtaaatattgtttttacaacagggctcccaagtgtcctgatttttcagatttgtcctgaattagagggtacccatctgaaaaatcaaaaatgtcctgaattttcagattgtcctgaattttgaggtctctgccaagggggtagccagacccttggcttcggagggggctgaagtcaaaaactcgatttttaggggtgtatttttcttttttcagtcgatttttaggggtgtatttttcttttttcagtcgatttttaggggtgtattttttgttttttgaaatcctgaattatgtgagtttcttcgtgaaaaaattactatttaaaaaggggcgatatgttgtaacaaaattcattaaaaattcaaaaattttcccggcggcgcctatcggcaccgccggccaccaaaaactcttatgttttcttaaaaaatgtgccaaaaaatcacaaattttggtcatttttgacaaaatattaacacaatcatttaaattttttcccggtggcgcttatcggcactcttttcctcaaaaaacaaccaacatttgtcatttttttgacaaaatatcttaacaaaattcattaaaaattcaaaaaattttcccggcggcgcctatcggcaccgctggaccccatgtttgacaaaagttttttggaaaaagcgcgccgcaaaaat

SEQ ID NO: 27837 - DNA, 753 bp, Heterodera glycines
ttcctcttatttttctcttcgcatggacgtcccattagaaaagaacgagcggtacgaaaacagcgagcagtcgctgcattagcaaaattggcagcctcaatcgcggccgtgaaaacttttgttgctgcaaatgcagcattaactgcttcagcagccataactttggcggcaatggagcagacatttacataacgattgaattactgaaatgtaaacataggatcattgaattaaaaagatcgagtgtgactctaataactcatattaagcctatgatcactatgaagaattacttgatgacttctttcctttgactttcattttggaggagtatgaattcattgtctccgccaaagattatacaccggatttttttttggaaaaatctcacaacattacggccgaaaaaccgatgaaatctgcattaatagtaagtttattttaaaataatttaaaaaattgatcatatttctttaataaagcaaaaacaaatggcgacacgaaaagtgaaaaattcaaaggcggagcgcaaatgtttggggcgcaaatgtaggggcgcaacaatcgggacgcaaatgttcggggcgcaaatgtaggggcacaaatgttcgaggcgcaaatgtaggggcgcaaatgttccgtcaccattgtttgctaattgatcccattgcattctctactggaattatttcctctaccgtcattcatcatccccaaatatcgggtagccgccattcaaatattataaagaac

SEQ ID NO: 27838 - DNA, 1036 bp, Heterodera glycines
ccccccccccccctcccctctgaattcttttcccctcttttttcgtccgtttgttcacttctcgtccttacgaatttgcacaattttcgccatttgccctctcgtttctcttcaaatgtctggtcacttttcctcatcgctttcgtccttatcttttcctctctctttttctccctatctctctttctctctcctctctctctgtctgttcttatcatgcaacactctttccttttccttctgctgatccatcattctttcacttctatcaaagttcgaatttctattcaagccttatccctctatgtttttttcgtcttccccatcgaacagttggcatcgctttgtctgatccgtgctgactattgacgacacaatttgtgcgtcgattctcgtttgtcccttctctcccacatcaatcatttcaattttactcttgctgatcaattcactgtttttacagtccttttcgatcataccacattcctaattttaattccatcctttttcatttctattataatcactttttgtatcatccgatcaccaatttcggtctgatcactccaaccatcccaacttcgttcatcactctcgtcttctcttcttcgtcctcctccactctgatcattcttttgttggtttactattaccattcatttttttctaatcattttttttctaaattggtcgctttgctcatcattccgtcttttccctcccgtggctttttctctctccgtacataaaatccaattgatcaattctctcgtctcgtcgtcactgatcacacgattcattccctcccccattaatcactgtccgtctttaaaactgtttcatcattactattcgatcacatttattttaataaattcacctctcgtctctatcggccgccaattggtgagggatggaaggcaaatgtattaattagttaataggccctgttatttaacacttttaatttattgaaacttaattaaatgattaaaattttatttttaaaaacttttgccgtttttatttgctcatt

SEQ ID NO: 27839 - DNA, 939 bp, Heterodera glycines
tccttatcatgctcgagagcattagtatgtgtataaaatttatcaaaaaaagagatagccatttttgtgggataacctctaaatataaaaatcctctgtgaaataaaatggcgattgtgcacagccctccgtctcatacgcaagcgcttttgtgaggtataaaatttctcaaaaaaagagatagccatttttctgggatagagtataaatttaaaaattccctcaaaaataaaaggtctattgcgcaccgccctccctatcatgctcgagagcatttgtatgtgtataaaatttatcaaaaaaagagatagccatttttctgggatagagtataaatataaaaatcctctgtgaaataaaatggcgattgtgcacagccctccgtctcatacgcaagcgcttttgtgaggtataaaatttctcaaaaaaagagatagccatttttctgggatagagtataaatttaaaaattccctcaaaaataaaaggtctattgcgcaccgccctccctatcatgctcgagagcatttgtatgtgtataaaatttatcaaaaaaagagatagccatttttctgggataacctctaaatataaaaatcctctgtgaaataaaatggcgattgtgcacagccctccgtctcatacgcaagcgcttttgtgaggtataaaatttctcaaaaaaagagatagccatttttctgggatagagtataaatttaaaaattccctcaaaaataaaaggtctattgcgcaccgccctccctatcatgctcgagagcatttgtatgtgtataaaatttatcaaaaaaagagatagccatttttctgggataacctctaaatataaaaatcctctgtgaaataaaatggcgattgtgcacagccctccgtctcatacagggggcgcttttgtgaggtataaaatttctcaaaaaaaga

SEQ ID NO: 27840 - DNA, 716 bp, Heterodera glycines
attaattgcattttatataaatttaaaatattttcggctttaccccattgcctattttaagtcaattttcgttcagaaacagcctgccaaatgtccacttccccgtccaccatcagcagtccgcgaatgcatcctttcaacgatggtaaatttaacaaatagacgggcatccttaattaattgaccttgactacttttataattttttaaagcgtgcctttcccgcttttgggtacgttcgctttgcccttggcataccgccagcaaacaaaatgtgaaagggccgcactttttgggtggcactggcggagctggtggcaaaattgcatcatctaatatattaataaaaagatatatttattaaattttgttacaaataatttaaatcacatttaagtattatacacatatttttataatcaaactaattaattaattgttttaattaatctttttacactcctccgcccttttttcatcatcttccatgaatgataatccattttggtgatcagtttgtcaggatcattcagcagaaccggtccaatttcacactgatcatacatagttaaaacgaagcaccactgtttgtggtgccatcgtgcccggctcattgctgcgctccaaaattagctgaagccatcgcatgtcattaaatgctaaaaatgaattaaaaataataaagatagtgaaaaagacactaatttagtcttatt

SEQ ID NO: 27841 - DNA, 1133 bp, Heterodera glycines
caaaagatcacgaaataggcacctaaaaaggcagaaaaaatcgcaaaataggcactaaataggcacaaaaatcctcaaataggcaaaaagtcatcgtagacaccctaaaccaagcggaaaatgcgtttttcgtgcttatctgtgcgtattaattgcgcagaaattttaggcatttgcctaaaaattgagttcctatttataaccattattatatgtcctataaagctgggaatttctactcacatttaagcaagaatagtgcctcaaattaatatacaattaaaaattaaaaaaaaaaaaaattctgaattatggtagctaacttcttggaaaaatttccttgacctttttattatgcttttagaatttattcgcaaaaaaatgcatattttgtttacacgtttaggaattgaaggtcgggatgttatttttcttaattaatcgacattttaatttcgtttatatatattatacatatatactatatataaattatatatgttgcatttatatatttaggcgtgtatgttttttttacctttgttcattcatagttaggctatctgatcagtagggcatccaattatatggaaatccatatttttttcctggactgtggaaggcctgaaacgcacgaaaaacatgtttttagcttggtttgaagcttctaggaaggatttctatatccatattttccatatttcgcgatttatgtccatatttccatatttttccatattttggcattttggttcatattttatgtccatatttccatatttttccatattttggcattttggttcatattttatgtccatatttcattttttcgccaaaatttctcgagaatattgaataaatttaaattttcttaaaaattactaaatcatgtcaaaataagcaaaaaagcgaaaatttcgcttttgttgttgattttgcgctaaaaaaattaataaattttagcttttatgttttttttcttttaaaatgattgcacgtaattgccgaaaaaattcgagaccaatttccgaatgttgaccgactaattgcaaaacgaaagccgtctttgtcaaagcgccttaccgagtcaaaaaatttggaaatgtatctcatatgcaattttcaccaat

SEQ ID NO: 27842 - DNA, 1919 bp, Heterodera glycines
gcgacagcggacaaatgccacccgattacgacaactctttcgccggaggcggtaccgtactaccagcttaacagtgccgaaaatgtcaatggtgaagcaaattgagggggagaaatggatgatggatggcactcctttgtctgctgctgattatcccaatcacacacatgcatatcacattaatcacttactgtacacatacatgcattgtgtagcaggtccaggcttttttttaaacccttagatccaaattccaaatctactataattagagccattaattatgtattccaaactacataatgcacaaagcagcgcatatcatcagcatcatataaatgagtttaactatgcgtaaaacatattatttccatgatggtacgtacaacaaatacaacaacggccggtggggattttgtctccaaaaaatggacgaaaaatgacgcgatgccatcccttcggccatacaataattataatatatatattaaaagaaaatatgtagataaataagggtgtcatgcatatgcgcactcggtgggaggacaacaaaagtaaaaacaataacgaaaaaataaatacataataccgaaaactaattagattttgcttaaaattacgtcgatggaacggaagggaatgatcgacaacaacaaatatcaacaggaaaaaactgattgataacgaagtgcggaccgacattcctcttattagtaacaatattagggtgaaaacaatttaatggtcaatcgcaattcataattagtgattgcgcatcgtcgttttttatcactgaaaactggggggggggggagggggaaacgaagctaaaaattgaatatttcagtgattcattcatctataatgtcccgccgaaaagcaaacccattttatggtctgctggagggaatacacattgtgtgtccgactgcactcccaaaaaatgggtggcctaagtaagcgtattgtagtgatgaaagcacacacacataccgtatgcatgtcgagttgaaaataaatacatactattataagcatatatgtatggtacggtaaaatcaaacaacaatgaattgacgaaaatacacaatacaataaaaatatatattggttgatcgggcgacgatacgatcatcgattgattgattattgaccacacaaaattgggtgggcagcgaacggcagaaaagcgaacggcgtggaatttaaaaaaaataacgaatggacagaaaaatgcgatgacgtcgtgaattacacataaacaattcccgttataaatacagaaaaaggtgggaggagggggtagaataataaaaattgataataaaaataataataatgaaacgatgataatggaacagaacaaaattggagagagagtaaatatgcaacaaaacaaagccatattaaataatataacaataataaaagggaacagcggtaaaatttataaaatccataaaaacagcaacaggcagagagaaagagaggagagtcgtacgagaatgatcaagataagcaaaattgagaaaagtgtgtaaggacgaaaatgacggatacaaaaagggagtccgggatgggttgagttttgttggttgtgtagtgaacggatggatgggcgcgacgacgttgggggaaacggctaactgaggacagccgattggattggcaggtgggcggaagtgaacagtgtcattgaggagaggaggaacatttgcatgcctaaagggaccgaaaattacagggacatgccgaaataaagttgatgaaacgaagtgccaacacgaagtgtggcatggataggtaccacacagatgccatcttgcatggcaaaaactgttttttgacccgagtagtttgacggcatttgggccaaaaataagttattgggaacatggtccttggattttggcttgcgt

SEQ ID NO: 27843 - DNA, 1107 bp, Heterodera glycines
  unsure (1)..(1107): unsure at all n locations
ggggggagtgccccagaaaacaaaaaaaaataaatttttttcaagtgttccgttggggttgctcaaacaaattttggggagccaaaaatccaacgcagatttaaaagtacaggctatagggaaagctattccggaaggattcggtctccccataaatctgggcgcatcggttcggggggactgccccgaaaacaaaaaaatcgattttttcaagtgtccgtttggggtactcaaacaattatggggagcaaaaatccatcgcagaattaaagtacaggctatagggaagctattcccgaaggattcggtctccccataaatctgggcgcatcggttcggggggactgccccgaaaacaaaaaaatcgattttttcaagtgtccgtttggggtactcaaacaattatggggagcaaaaatccaacgcagaattaaagtacaggctatagggaagctattcccgaaggattcggtctccccataaatctgggcgcatcggttcggggggactgccccgaaaacaaaaaaatcgattttttcaagtgtccgtttggggtactcaaacaattatggggagcaaaaatccaacgcagaattaaagtacaggctatagggaagctattccggaaggattcggtctccccataaatctgggcgcatcggttcggggggactgccccgaaaacaaaaaaatcgattttttcaagtgtccgtttggggtactcaaacaattatggggagcaaaaatccaacgcagaattaaagtacaggctatagggaagctattcccgaaggattcggtctccccataaatctgggcgcatcggttcggggggactgccccgaaaacaaaaaaatcgattttttcaagtgtccgtttggggtactcaaacaattatggggagcaaaaatccaacgcagaattaaagtacaggctatagggaagctattcccgaaggattcggtctccccataaatctgggcgcatcggttcggggggactgccccgaaaacaaaaaaatcgattttttcaagtgtccgtttggggtactcaaacaattataaggggcgaaaaatcccaacgcangaattaaagtacaggctatag

SEQ ID NO: 27844 - DNA, 1930 bp, Heterodera glycines
  unsure (1)..(1930): unsure at all n locations
ggttaaccacaacattgctctggtagctgacctctcatctgccatcggcactaaagtgaccaccgattgggaaacatatagcgactgtacttgttgaacagcacctgaaaaatgccatttcaatttgcactttttagggggtgaaaagcactgacaatgtccggcacccaaacacggtccaccggcacatgaacactatccaaaccgccgtagttggaagggttccaactggaaaaaaggcgaaacaattcgagcagtacgcacatagatccccataattaggcataattaattaattgttttaattggttgccattgcgcacgtcaatcggcagtcgttccatcgcaaagtcagccaaacatttgactgcatgatttgattcttctcatccacgctgatcaacagaatctgtgcatgtttttggatattatgcttcaattccaaaatatattcgttaatttgctgcttaaaatttgccgagtttggcacttgccatggccatgccaaagtccacgtgcacgacggatgagtttcggcacggcgaaggacgaatcagcggattgtacccgcggaacatgtcaatgccgagccgttcttcgtcctcatcggtggctaagagctgcggccgaactaaacaataaaaaaaaaaaaaaattaatattaattttagaaaaaaaaattcgcggtagatttaatgacttataagacaaacggatggacatttaaatgttttaagttctcggaatattttggcattttgttgtgtgaaattcggcacgttttcttcaaattttctttaaatggtcatttttacggaggttcagttttgaaaacatttaattttaatttaataaaagttaattttctcttcaatattaattaattcccattttcaaattcccaaatgccgtgccatttcaatccttcatatttcattattcatttttacttgttgttgttgaaatgctcgaatgtccgctgttcattctgtcgtcctttgaaccgctgaccaaaatcaaagccaaaaatgggggcaaaaggccaaacaatggcatttcaatttaactatttgccaagaagcacaaggaaatgttgttggacaactcaaaagtcgagtggcattttcagtggaaaagtgcctttttggcgtttcattttttgtaattgtttggccacaaatgtcagtcaaacgaaggcacaaaatgaaaaattggcatgaaagtcatggcacaatcggattaggagaggggggggggggagtgagagggacaatggcacggcatagtgagtgaatgtccccccgggggacggcattttgggaacgaaataaagggcaaatttggcaagaggaaatggtcgacgaattgaaacaatggaggcgaagagcgaaaacaaattgtgtcaatgattttttattctttgaaaagtttggccaaaataatgaacaaatatttccgcaaatgcaacatttttggaaaacattaagggatttaacaaaaataaattaacttttaattaaactattgtttaattttaaatttcgaaatttattcgccatttaaaataattaaacgaaaattaaaagaaatttatttaacaaatacaaaaaaaaaattatataaaaggttttaagttatgccaatccgacgacatacgatttgtttgttttaattatttttaaatttaatttttctctttttcaatttaattttacaaattcacttacctttgccgaccaaaaatgccaccggcagaacaattaattcagtgaaaataataaaagaaagcatttggcaaaatgaaaataaataatattttttgtaaaaggaaagtgaaaatggcataaaatgagaaaatatcaatagaaaagagattagaggaagacatgaggaaaaacgaggacttttttggcaccaattgnggcggaca

SEQ ID NO: 27845 - DNA, 2388 bp, Heterodera glycines
tgtcataattttttctgaacttttagaccagggtgacatcatactgcccattacaccaattacgtcaaacgtcgtggacgccgttttcaaccagtttgtaaaagtggagcagagcaaatcgaaacacgtcaacttatatggcgctccctttataattaccgtcactgtcctaaacaccaatggactaccgcgacaacggacaacaaagggaaaagggcgaccgcctgtctcctcacaatcgcacattttcaaagtcaacaacaacgacaactactgtcttttttacgcgctggaactgatgcgctactactcattatatatcaggggagtaatttcaaggaaacaatttagatggctcaaagataaccaaacaacggttttacgacaaaaggtgctgcaactactccgcgatgcggggatcctcacaacagagacggagtacgacgcggaagtttatatacatcaagtgcaagggttatggaacgtcaaatatcccggtgagtacaaaattttcatatttaacgattaccagatacgaccaatcaccaaatctgatgtcaccgactaccaattccctattcttctctaccacaacaacaaccactttgacggcatcaaaactctttcaaaatttttcaacaaaaagaactactgtctctcctgcgagtcgccgtactacaagaaaatcgagcactcattaaaatgctcttcactctgccacgggtgccgtgaggtgggagttgactatccctgcgatccccaacaaggatacagcaaaaaatgtgaccactgtaacaacaccttttacaacaacagctgttatgagcgccacctccacaaggatttgtgcaccaaatttcaacgctgtgaagattgtggggtaatttataacataaaggttcatgggagtgttgggcataaatgtggggaacagttttgtaaactttgcaagcaatttcatataaaagaagacgacgacgacgggatgaacccctgtacgaaatgtttcatccagcccctaaagcaacaacgaattaagtcatacaggatcatcgcatacgactttgaggcgacacaggacaagaaggtggagaaccggttcgagcatgaagttaactttgcagcggctaccatcatctgcaccgactgcattatcaacggcgactggaacaaatcacttcagggaaaaaagtgccaaatttgcggtcctcaccgctcaatcaccttttcaccttttgactacacggagacaacagtcgaccaaaaagtcgtcactcaacaaccgctgtgcgaattcgtccagtggcttcttttcgaccacaacaaaaagtttccaacagtcgcgtttgcacactttggggggcgctacgacatgacgatgatcatcaaggaggttttagcgcaaggaattcacaacccggacatcatcaaacaaggaaatcgcctctacgagctgaaatcaggaaaacgagcatggccccctcaccatctttcgcgacagctacaacctaatgcccattaaattatctggcctcatcaaatcttttgggcttcatataaaagataaacagcactttccccatatgttcaacaaatcatcaaactacaataaggtcctccagcaccttcctccacgtgaagactattgccctaaccaaaagaagaaggccgatctgcagaaatttgacgactggtacaatagtaattacaaccaaccttttaaccttaaggaaaaactccctgaatattgttgcaacgacgtacaaatactcacccatgccctcgtcgaattacgccgggaattcaaacaactgacacaacggaacggaaaacacggaggaattgacatcctgtggcaagccatgaccatcgccagcgcctgcgtcaagaactttgcactcaatcatctgaagcctaactcgcttgccttcgtattgtaaaaaggtatacatcaccacagattgaatagtgcactgggcatctaatacctccaatggtattcgcatattagcacagtcagcatacacacagctcacttatgttatgttgtatatgtgtgtaagcgtgaaggtcagatatgccaattggacgtttacatcacaggcgcaaatgggaagcgggaaaaaataatggaggtgaatggctgtctgtggcgcggttgtgaggagtgttttgatgagatggcattaaaatatgtaaattaagttcggaaagtctgtgagggagagtaggaaaagggaagagaagaaacatgaaatttttatgtgttaatgtagatttgtaggttatttgggaactcgaaataaatgagaacatgaaaaaggacacaccaatgaggcagttttgtgtcaactggaaggacaatgagacaataaaaatcagagacgc

SEQ ID NO: 27846 - DNA, 795 bp, Heterodera glycines
ttacaatgctaatgccatagaattttattttaaaatatttacatcactgacgcattttctactgacgcattttccactgacgcattttccactgaccgattttccggtcacgttttaacctattgtagtaaatattttttctttaaattttggaatttgatcagcgcgaatatttcccagcgtgctgattgaattggtttaatttgatcagcacccaaaagttatgggtgtttgaattacaaaagatcaaaattatataaagcttcgtactggttaaaaaaatttaaaaatttacccaaatctctaaaaataaaatatactgcaaaatgaatttttgtgagcttgtttacataccaatgcccgctttaaaatttcaggtaataatactttcaacgccatttttgtcattatcagacatgggcatcgatgtcgaccttgtattgttgtttgttgttgctttcccctactcactaatctccaaatccaaatgccatgccacacatcgccggccggaggtgatgcgatcggcggaccggcaattagtaggggaaggaggacaacacagcgatggagcgatggcgctgcaatttgtgtgtgtgtgttgctcgcctcccccgcagtcgtcaccgccccgcggtggcgcggaattgatttatttggtaatggcaaggacagagcgggggggggggggagctatcttttcatatctatatgcaaagattgtttaaccatatttttacctgaataattaatttgaccaaaagtgattaactttccaaatatttaatgaatgaa

SEQ ID NO: 27847 - DNA, 1498 bp, Heterodera glycines
  unsure (1)..(1498): unsure at all n locations
tcctattttggcaactcataaattgtgggccgattgatcggcagagtttgctgatcaatcaatcgttattaaaaagtgagtgagtgagtgcccttttcttacccaaaagctccttttggttgatccaactctgtgtgatcacattgtcccatttgaattggatttggccttcgattccctcggttaacttccaaatgaacaaaatgtttgggaatttgtccattgtgccggccaatgcttcgacgaattgcgcattgctgggcccggtaaaagcatcgtttgtgccaaaactgaccaaaacaacgccctcttttgtgcccaaactccgactgatcagtgaatttgtctgtcggattaggtttttgttggattagaatttaatctcactgctgaatgaaagaagctgacaggcgattaaaaggcacaagcaaatgtaatcgaagccaattttcaaagacactaattagtctcgagacggaaagtgttcgaaaattgaagaattattgagtcaagaacagaatgaatctcattaagcatggatctcatgacttttaatccattatttttatttaaattattttttttattttacattttccattgctttttcgtcaatttccgacggatggccaaaatttaagccgccaatgaatttgacccgttgatcgctcttcaaaattttggactgagcaaaatcaatttcgggcagcgaattgatgaagaaaaagcggctcttggcgaacagtgcgtcccaacccgggaaattcaaatggaatttttcctccgccaatttttggtactcagtgtccttaatttatgtatatttaatatttaatattatgattgttttccaccatatttatgtgttctttgattttggccaatgtttgctctacgcaattcctccaaacttcgtcccttctccacttcaattcctcggccatttgttcttttgtgcccatgtttagcagcttcatacgttccgcaccaaacatatttaatgtagaaattccgataaattctaaaatattcaaaagtgagacgaaaaataaaaatgtcccattaaaatttctcttttggtttgcataattttttgtgatttccccggggttttcggggcccctgatcacgaagctctctctctaactatttctcctctccccccccccccctctcactcctctctccatctttctcttttttctttctccgctctctctctctctctcactctctcctctatatatcattcgttttagctttttggcactttttacccgtcggcgttccctccgactttttcattttgctcaaatggcccatcaaatgcagctgaaacggcgacattggctgactttgngtggcgattgtgaccgcaatttgcaggaaatggaaaagtgccaatgaatactccgtcaagcagtatgcctctgccattcccacgtcgaacttttcggcacgtaatccgtccatcagttcaaagtcctcggcaatttct

SEQ ID NO: 27848 - DNA, 1594 bp, Heterodera glycines
  unsure (1)..(1594): unsure at all n locations
ttgtgtcccatgcgggatgacagtctttggagagcatttctacggagtgccaatcgtttgtgtgccgttcatcggggaccaattttacaacgcggaattgatggcatttcggcacattgggctggcagttgacagggaaaatgaccagcaaacagtgcaaaatgatctgatcggtgcattgtcagaggcattgggacggcagcagcggaaaaagtgaaaaaatttaaaataaaaaatgtgatttttaaaaacaattagcaatgactcggccgcgcactttgatttggccaaatttaaagctgtaagcgcggcatttcgccaaaagaatgtggcaaaaacaatcgctgacgcaatgaaagaaattgaaaaagaaattggccagcaggaaaaataagccattgaatttgaaaaatgtatagaatttaaattatgcagaattatattattctctgcccggcttagttacgctagtcaatccgaattgtcattttttgattcaaagataaattaaatcgccaaatttgaaaatagtttaaaaatgtaaaaaattaagagatataaaatttacgaaattctctaaattgaataattcccttataaatttttaccatttttagggtttaaaaagttcaattcagctgaggtggtctttctaatagagaagatctttgaaaattaatttttgaaataaataaacttttaaacttaaatgtcattacatacatttttttctcctcctttccatatgattttaaaaaatcgataaattccagacagtttatcgtaacgtgagagtcattagtgcgtgtgacacttttattataattaccaccaaaatttaaagcttttttggttgctttttattttgtgcgaaaaattgagacatttaaatgagtcagcgaattgctacttgctaatttgaaaatgtgttcattttaattcaaaaaattttagtcaaattaaattaaatttctttatctggaaagatttttgatttaattttttaaataattaaaaaacattttcaatttttgtccatcactgcacatgcataattcatatcaaaattattattttttttaatgaatctgtctgtagctttttttaattataagctttttcaagaaaaccctaattttgtacaaaataattattgcaattactcaaattatgccgtgaaaatgatgaattaaatcaaaaggatatcaagcccatcattaaatttaagcgcccattaccatgccattgactttaactagcggaaacggcacagaaaaaaagtaattaaaaatataaaacacctgctgtgaagattactttaacacttatctcgttaatgttaattgtattaatttaaaattcaatttaagctcacgnaaattgcagcaattatttggcgtanaagaaatcatttaatttttttatcgctttattaaattccgaaaatcgcaaatgaaatgggcaacaaattgaaggactaaatgaaaattatttcctatatcangtaaagtttaattgggntctttcatttacgtagccaatgctttttcagctgtgggtcaatacaangactctgggcattccccatgctcat

SEQ ID NO: 27849 - DNA, 1558 bp, Heterodera glycines
  unsure (1)..(1558): unsure at all n locations
ctgaggcccgtggagcatatgcaactcagagtacngagcagtacttctggacacnccgaaggaacgtcgtttggaggtgttttttattgacaaataaattcaattcaanaggggtgatatgattaatatttttataaattaaagcatttcgatgctctgaaaactccgcaggaatgctttcacattattttttcgttcagggcgattggtcacccgtcgggtcgacttgtactttatgtgctcctccgtcagctccacaaaacctacggctgtcatcagaattcgacattgctgtggggagcggggaaagcagttcaaaggcaacgacagcattccacgaagacggccaatggcactccgttggcatttgttgggaagccccggcgcaaatgaatggtgccattgtcggtggatactcaattcgtatccaaaggtacacagagcaaaacaaactgttgtcatttattctcattgtcaggttcgatctgtcctcttctgctggtgttacgaaatcggcggatgcaaataatgagaaagcatcggatgagcaaatgcatcacatttctggcactgagtgccgcttcaatatgcagcatcttcgtccagctcagctgtaccgcttggcagttacggcacagagtgacgccggcccatcgccaaaatcggatattttggagtaccgaagtccgccgggagtacccgagaagcccagaaatgtgcacatcgaagtgattcttaaatctgaattttaacaaaaaatgaattttcttattaaggcaataagtacgacggaattgcggctcagttggatggagccgtccacagccaatggctctccgattgtctcttaccacgtgaactgcttcagattgtactcaaattctcgtcatcaactgcaaaacaacttagcagtagcaacagcattttcgagcagcaaacggcaactcgttagccaacaagtggaccatactttgttataaaattcattttatgtgctttttaacacagattgcccccggctctcaacggttgttgatcatacaatcgctggaagccgaaacggaatacgaattgaccattgaggcagaaaattctgtcggaaaaggcgaccgagtaatcattcgggtaaaaattggtaaatcggccgtgttaattataaatattcttcagcaaaaaactctcgtcgaaccgccagaaccaccacaaattttccttgcccaagcaactgcgaattcgttgaaattgaaatggagtgacggtggaggtacggacatttgaattggtaattactgtaaaactgcatcgttccattttcagaaaacaacagttccatcggtgcaaacggtcacggcaattattattactatttggagagggaaaatgagaacggcacttattcgcccgtttatgaagtgattattttttacttaattacttgctaccctttggtgttttattttcttttcggattccaaattttttgcgtttattattttgtctatatttttgcaaataaaccaaatttagggtgaactccgcactgcgcgactgaggggac

SEQ ID NO: 27850 - DNA, 685 bp, Heterodera glycines
  unsure (1)..(685): unsure at all n locations
tgattgggcacttcgacactttgtccatccgacgacccctcaggggataatataattggaaggagggaactcatcagtgaatgtccccacgtccactcaaatgtccgcagcccttcccattagcatttgtccgcctaagatgagaacctcccacaaccaatcgattctctccccctggcgagtgtttgcgcccaccggcgactccctcaaaccgcggcctcccctcggccacccctccgtccaccccaactcatccgacgcaaacgaacgaacgatggagggttttcagatgcgaagacccccctgccccgcaccaatttctcgtcatcttcgacttcatccgcaatttggtccctcaatcgctgcgatgttcagtgccctcccctcccctccccctttccccgcgttcccttcggcgccgctctttcctcccttttcaattgcagtgtttctgctgctgatgatgagctgatgatgaatggatgggtggtgctgctgctgttggtggtcgtcgttgtcgtccacccgacaaaatcaacagcagaagcaaagcagcagcacccattctccaaatcccccgccgtccgtcttcatcgattttctgtgctgaagatggtcgtcctcccctccactcatgctgctgctctcatcgtcgggtccggtctgcnccaccttggtcctcccc

SEQ ID NO: 27851 - DNA, 849 bp, Heterodera glycines
ctacgtgatattttttagttcaaataattagttcaaactttctgagaattaatctcttgtttttgttcgtatgtatctgttttattttttttaaataaaattgaattcataataattatttgatataataatgataattttaatatattaccaaataattttcggtttattcaaaaaattgtgcaattttttaaataattaattaaattttaatttttgtcaatgttaattcaatgttgtaaaatttttaatatattttatcatgagatcatacagttgcagttgcacacgagagcatcagcggagttaaagcgattttgttatttattctttttgttttttataatttcgttttcatttatcatatttttgctttgtttaataaatttttaatttttaggtatttttaacattttttaatataatttagattgatatattaattaattaattattttgaaaaaaaactttttttttaattgtgattttttccatctcgccatttttatttaattaaaagtccatttacggattttatgccaaaaaatttgcgaaagtattaaatgatgccgaaagaagaggaaataccatcgggctggacaatccgacagtaaaacacacaaaaatttattaaaatgccatcgccgcatgggacagattgtgctgcaaccatcctttacgaaatgccaaacccaaactaattttcagcgaaacaatgttttagactgcattcttacttttttatttgcttattttccttttttgttgataaggcacaattggtcccctgcggcgatggcattttattatattttgtgtattttactgtcggattgtctactgtccgat

SEQ ID NO: 27852 - DNA, 1206 bp, Heterodera glycines
aattcaaaaatgtaattaaaaatcagaatttagtttgaacattttttattttatgaaaacgaatgatatgtagtcaaattgggacaatcggcccatggggggagggggcgaatattacgaaaaaagatgtaatcgctcgctccccgcggtgaccaaaagccgacaaaggaaagtgagttttttcccctccctttttttggggggggggggcgccaaatttggtaaggaatggcgcgtggcttatgtgttttgtgtgaggattggataccattcgcccattctgttcaatgccaaaggcatcaaagaaaaaacatttgtacgaaaatgaaaagcgatgcctttctttgtccattccccgcggggtttttaaaaaacgaaaaaagaaaattaccgaaaagaagacaaatttgaagaaaggcgcaaatataacgccaaaggaaaaatgggaaaaaattaaacaaattgaatttttattggattgatttaatgtctttgcgatgccaaaaggcgaacgaaaggcaattctttgcttcatctgaagtggcgtggagtggttgggttggctgggattggccggccttctcatccatccgatgctcccattttcagatacatttccatagctaatccctcctccccccccactccggtgatgtaatcccccgggctaatccaattgccattgcgtggacaaacacttggtgagattgaagaaattgggaactggaacgggaaaaaatcttctgttttccattgctctctctctctctccaccatcttttttatggtctctctttttcctctctatctctctctcttctctttttcttttctcgtctcttttcctccctgttcggtcactctctttctcttactctctcatcttttcccatttgttcattctttgtccccacatttaaaatgcccgccaaaattgactggcaatgccaatgctaatgccaacctttttttccctcccttttcctctctctctttttcattccttttgatgaccgttctcgtcttgtctccagagcaaccatccggaagtgaatgaattgacgggagtgaccgtaaaaatgggggcataaatgaatgagaccaatgggacgaacggggatgatagatcgaatggaaaaggggcgaggggggcgggagaggcataaagggaccaccaaagggttaatggatgatgaggaggaaaga

SEQ ID NO: 27853 - DNA, 1486 bp, Heterodera glycines
  unsure (1)..(1486): unsure at all n locations
ctagtgggagaattggcactgatcagngaaagtgatcaatggaaggactgaatgatcagattgaggactgatcagggagaggactgatcaacgggggactgattactcgagggacagatcagtgggggaaaactcaggtggtaagagtgatcaggcagagacactttgcagatggctccgaagtgcctgcggtgcntccgtcgggaatgattcgtcgcggctttcgcgacttttccatcgactacaccattctgatcatcattgtgatcgcacttctctttctgctcgtcgtcacgtgcgtcgtttaccaaaagttcaaagaccgcaacaatcgcgtggtgaacgtggacatgaaccaacgattggtgcagcagcaacagcaacaacagcagaaggagagcgatcgaggagttggaggagggcgaaatttaatgggcggaaaggtaaaaacggagggggtgggataaaaacggcataatgccattggaacaaaagcaattagccaggaaggggaagatagacggggcgaaaccaatcataggcattggttaatttggctaattaatcacgacagactccgcccatgagagtgacgtcatccgccgcgcacaaagggacggtggccactgcggcattggccaaagagagggcattggcatatgcgcggaacgcggcgagcgcacagccgccgccgttggagtcgcaggaaagcgcactttcatttccaatgcaacagctgcaaatggcagcgatggaactgaacgtaaatgcggaacaaaaacaaaaaatgtgaaaaagagcgacggatggcaccgaaaaagcgtcaaatttttattactttggtcacatttatgccaaatttatatcagcaaaaaataatttcaagatttcattaaaagccaaacgaaaacattcaatggcaaaaggaaccgacggacagtcgccaatggcacgcgccgaacgaagaacagccgacggaagcgaacaaaaggcagtcaccacgcattcgactgagtccgaatcagccgcaagaaggggaggaggaggaacaagaagggaagagagacaatggagatgaggagggggaagagagacgcaatttgggatacgagccaaaactcggaagaggaggaggaggagacggaagcggaccaggagcaggggcaggacgagaagcagcggatggcgaggaggagcatggcggacattgaagcggcattgggcaacggaacggacgaagaaattggaaggcattgggacggaaaagagcatcaagtgattggaagggagaggggaaaagaggagggtaccaagggggccgatggatgggggggagggaagtgaaagtttgacacattgtatggaacgagttaagaatgtcgaaaacgaaaacgaaggcgtaggcgcagagcgcgagtcgttgtccgaatcattgggcgaattccgctggggtggcgccggttgcctggtngtgcctttccgtccg

SEQ ID NO: 27854 - DNA, 1145 bp, Heterodera glycines
acgttgagacaatctcgacaagcgttaacagttcttcacaaccggcactgttcacaaatgacggcgcttcttctccgacgatgtctttcccaacgttcttcaaatagttcgtagtatgtgcacaacccgctcaccgatcttctgttcccgcttaaccatttttgggggcaaaaatgattctctcctcgtcgtctgggaaaatgtttgtccttaggcgtataatgttgtctctgttcgcgtggagagtcaccaacaggtaaccgtacggcagagcacatgcctgtcggtaggcatccatcaggaatccctgctcgcgagggaacatctggttggccaaattacgaatgctaagcatgtcgttgggagcccgcatcaggaagatgtactgggcgttggaccttggcacccgcattgatttatcgaacaggttttgcgtgaggaaaatcacggaaaaattgttatggtgtgactttttggtgtacagatcggccaatttcttggcctcaatgtcacccatcaagtcatcgtaaacaatcagacaaggctttggcagctttttcagcatctcgtcagacggggcacctgcgtgggggacaactccctgccgctccagatcgggaatctgcgtcgagtactcaccgtatgcccatactaaatagcaacagcccactgcacagaaaccccctttgcacatacctattgccttgggcggcgggtcaaacatcacgttggcatgccgtaacaggcgaaggaccagctgggtcttgcccgaagaggacggcccactgacaataatccccgaagggatgggaaaagcgagttcactttcatttattcttgggtagtccatcagaatatcaacaatagaaaaatggacaagtgtttatgccatctgagtcatttccttttgttcttttacgccttcttccaagcttgggccggtggcgtgcacctccgggtgtcgcagcggcagcgtgaacaccttgttccgggccctaatgcggaatttcgcacgatcggcaaagtccacttaagaaaagagtcaaactctgacatacacctgcagcttaccaattgcatcaaacggcacaaagttctcgccgtcaaaaatagccgattcgaaaagatggtcaccccctcgggct

SEQ ID NO: 27855 - DNA, 1994 bp, Heterodera glycines
tgccgtcgtcgtggtggcgacggcgttcggcaacagcagcacggcggtcttgtcaccgcgcccgctgctactgcgcatgatggatgattgagctacttcttcagctcataagcggtgaacacaccggtgccacagatggcctcgctgctgtcgtcggagacggtcacatcatggatgtcatcatggtcgtcgtctttgtgtcaaaaatggccggatttctccattggatcagatcgattccgggtctcgaggcttcaggtgttttatgaaaagttatttttttttatgagtggaataatgcaagtctctgtcacgtatcagctaggaaacgttcacaaaaaagaccaaggtcaaatatttctgccaaaaattcgttggaaaactttttgcgcttatcttagtgtagaacaaaatatttggttaagtatagtcttaattatctttaaattgttgggaaagggctcccaaagaacttttgatgattggtgaaactaaaactttagtatatttgtttacggaattttgacgtttttgggtaagctcggccgatagttagttgtacgtctttgggttattcaattgtgatttcgcaacttttgagtgatcggagcactgacaaagactgaaaataatgactgatcatttcgcgttttttcttgcaattgaattcacattcttagcactggcatgacaaatgcaaaaagtgtgaaaaccccccaaaatcagaggtcagccggggatggatgcgtggagcgcatttatcatttccatcattttggacaggttatttggtgggccaagaatttgcatgggcaaattcgaaattggcgacacggggcagcccccgggggggggggggggggagtggtgtcaattagggtaatcggttaagaccaaaaaccacactcatcaacatatcaccatcatcatcattaacagttaattggtatgaactttccaaaaataacggtcaattataaataaattaagaaataatgactaattaatttttaaaaatacggagattttgacgaacattaaatttaaaaaacataagttaaatttattataacaatgctttcaaagcttggccatcagagttcgatttggtttgtctttcttttgctgacaaatgtttgaattttgtaaagtcggctcttttttagcaaagctttaccttaaacaaattcaattttaatatacttaaaaattattaaaataatttgtgttcgcatttatatttctatcgataaattaattattcatatttaaattaacaaaacacaacgatttgtcgggtaatttccatttttatgaatcattccattggaaaaagcacagcaaaatcatattgtcttcttctccattagatatttaaaaaattatattaataaaagtgcttttgacaaaataaatattttaagtaattaaattatttagtttttcccaaaattaccaataattcttttttttttccctttttttcgaatgtcgtccgattttctcagcgtttttcgcattaatttttacatttttctgcttttgataagtggtaaattgccctttaaatttactttaatgttctccctttccaagtcggaaatggccatgccaatggcaacggatggcatgcgccgaaggaatggaccgactcaaatgtttacggtatgccaaagtcggagcattagccaaatatttaaaatccttccgcaaatgctcattggcattttcattagttttgttttgtctctttcttttggcatttccatcgttcgctttgcttttgcgcagattccctccgttgtgggcttttcctcaaagtcgaaacggatgaaaagcaattgcaaaatgccaaacgtttctttccgacgggcggcgaagagttttccttcagaataatggggggagagaatgttgaggagggcatttcgccatggacggcggcaatctttcgtcaaaagaaagacaaagggaggcaatggggaatgaatttc

SEQ ID NO: 27856 - DNA, 952 bp, Heterodera glycines
cggccacttaaaaaaattattttttttgttttcggggcagtccccctgaaccgatgcgcccagatttatggggagaccgaatccttcgggaatagcttccctatagcctgtactttaattctgcgttggatttttgctccccataattgtttgagtaccccaaacggacacttgaaaaaatcgatttatttttgttttcggggcagtccccccgaaccgatgcgcccagatttatggggagaccgaatccttcgggaatagcttccctatagcctgtactttaattctgcgttggatttttgctccccataattgtttgagtaccccaaacggacacttgaaaaaatcgatttttttgttttcggggcagtccccccgaaccgatgcgcccagatttatggggagaccgaatccttcgggaatagcttccctatagcctgtactttaattctgcgttggatttttgctccccataattgtttgagtaccccaaacggacacttgaaaaaatcgatttttttgttttcggggcagtccccccgaaccgatgcgcccagatttatggggagaccgaatccttccggaatagcttccctatagcctgtactttaattctgcgttggatttttgctccccataaatgtttgagtaccccaaacggacacttgaaaaaatcgatttttttgtttcataaatatttttttcagaaagtgctctaaagcgcaccaaattttatttacaacttaattttagcactctgatgctttagtatcaaaaaggaagatggagaaaaaatttttccttatattttggttatatcgttttgcttttggtggggtgcttggaacagtggaatcatgcgcacccgtccgatctggcaagttaagcaacgattgctgactagccaaaaaattcggtgccgtgatgaaacgaaccagcactgcttaccccg

SEQ ID NO: 27857 - DNA, 1316 bp, Heterodera glycines
ttccgctgtttgtcttcatattcggtcattagacgaaatgtctcaaattcaatttttttgtttttatctgaaaatgcaaaaattataaaaaaaaaatattattgagaatgtcttctgaaagtttttgtccttgtgccgatttgcgtgtgccatgccatgttttttcggggtgtttctcttctcaacaggtgcttagcttgggctgtaccttttgctgccagtcgcttcgtccgccaaccgacctactcatcccccgcccgcggcgcctttcccttcgcccctttctccccattttcctcataaatctcttccattctcttcgtctgttcattggatgagaagagaggggcgaagaaaaagagataattgccgaggaccgacccgaaattgggaggaagcgaaggacggactcttcctaagagcgcatccggcccaagaaggtttggccacaaaagatgctcggttggaaggaaggggagaaagaatggaaggggagggtgaagggaagggaatgaatggaggcggaagatgccgcgggatggccaaggccatcaatcatcgcggttggacgcatccgaatgggcggcaggggcggcaatttgttgccgaggtgaagaagatgagggagaggaagccgagttgaggcggaaggggcgggcgtaagggtgggggggggggtgtggagagaaaattgaaacgcacaactcaggaaaatcccaattcggaaccaaaaccaaaatttcctttttgcaatgccataacttgtgatcgctctctccgttgattaccaaagtcaaatccctctcttcaatctccatccatcccttttgcgtccccatttttctgctgtatttctcatcactttattttttctctgcgggaatattctcgacaaacatttgcctgggggaaggatcggatgaaaaaagagaagagaccgaagaaaagatggagaaaaaggaaacggagaagagaaaggggaagggcaagtgatgatgtgccgcaggtggaaaggcagaggctgggagcagaggaggaataatataattggccttggtcctttgggccaattagatgggacggatcggaattcactctctccaatatggcgggcggacaaaccccaaaggtgcgcccgagggcaaacaacggccgacggagaataccctcgggggaagggatgaaaatgatgagcaaaagggggggagggtgtccattaacggatggacggaaggaagaatggaagaacgaatttgaagatgcgaataagaagggcaagtcaattaattcgtcacaatttggggtgaccctaacgg

SEQ ID NO: 27858 - DNA, 1711 bp, Heterodera glycines
  unsure (1)..(1711): unsure at all n locations
catggctttagcatgaggatggtgttgtgcatgtgcacaatggccacgactgtgnggaggtcgccttggaagtggcttttttccgacccnggcgaaattgaggcaaaaaaatgccattaattttttcaaatttgccaatgttaataatggtgtaaaacttatacagataaatctgtcgggtgaccatctgttcattttctgccaccatgaagaacggggcgacgaacacgggtgggtgaagagggaaatgcaccggagctaccgagtgccggaggacgtggacacgggcacaatccgatcgcattactcctggaacggcattttgcagctgaaggcgctgaagaagaacgcgacgtcaaggtcgatcagggagattatggagaatttaaaagataaaaacagaaaacatatctaaaaacttagtttgccttttttgtattcgaaaaactaaaattggcattttttgggttttacattaataatttatgtcattttaatttttcatacctttgatcagtttttttgtccattcaaattctaatcccagtcaaatttattggatgatttttaaagacgttcaagcatcgacgtggaagtggtcgcggaggaaaagccgaaaaagaaaaaagtggcacagaaaatgaaatacggcgcagcggccattgaaaagccgggcaaaaatgtgttggtggaagtggaaaatgccaaaaatggaggtaggaaaagcgatagagcaacccaaatttttttttttggccctatagaaaggcaacgaaaccgaagacacagcattttcgccacagccgaacacttttgcgcgcctcagcaaatgccattgggccctttcggatggtcggcaaaaaattttattcgcttttaaaatttcataattattcttcccaattttaggagctggtataacgttgccttaaatgctgccaaaagctgctgatgaacaccaaaagtgaacacattttgagatgggagtgactgacaatgatgaaatttgatgagaaataatattaattgcaattagtcggtattttgacatgcaaattgtcgtacttaatgtatttattgaaataaagattgaagattctctaaccgagtgattttctctctcggtcaaatgactctcgggtctctttcgggctcgattcccggaaaattcgacactcgactagctcaatggcaaattagcataccattaaagtatcaaattaaatcacaccgcataaacacaaggaaaaaaattacaattaaaggggaattaaattcggattgccggggggggggggggaattgctcatttcgctcttgtcattaaaatgtttatttagaaagggggaaaactcgctttgttcacacctttgttattgtacataaatgcgcattgcataagtgctgcatgtgcatcaggggtgtgacttgtctcagaaaagacgagagcgagagtttggcgagaggcgagagtccccaaaaagacgagagcgagagtttggcgagaggcgagagtccccaaaaagacgagagcgagagtttggcgagaggcgagagtccccaaaaagacgagagcgagagtttggcgagaggcgagagtccccaaaaacacgagagttggcgagaggcgagaggacgagaggcgagagtttttcaattttttctgtagccttatttttaatttaaaaaacttcaaaatcgtatattaaat

SEQ ID NO: 27859 - DNA, 1026 bp, Heterodera glycines
  unsure (1)..(1026): unsure at all n locations
ttctcacgccggtgggacgtactccgacttctgagccttcgtgttgttgctgttgttcgtcctccttcgtcttcttgtgttgcggtgtctgtggcgtttgctgttcggcttccctcgcctccttttagcgttcgttgttccttcctgcgctctgctcggtcctttaaacttggtgtaaagtttaacgaaaattgatgggatggacttaatgccaagtgccattgcccttcaaatatggggtgcacttcatttccgccccgtatcattccccccgcaaggggggagggtcaaggtcgaacgtaagaccccttcactgacgcatcccttgcacatgtagtatattttatgcgcatatttgtttgtcattttagtgcatacaacttcaaacccttttggtgcaaaattagttaaaaatttcattttaaaaacggaataaatttaaatttggacaaatacagttttaaaagattaatgccgcaggaatctataaacatttgttggtattattgtactaacagtattcctttatttttataagaaaaaagagtttcatcatttttgtcataatttaaagtctaaaaatatttctttcattcttaaatcaattttttttcattttacagctgtttcaaatagggttaattcagtccggggtcgggtggcaatgtccggcttagttggatctcggcaccagacccaaattagcccattgaaaaggataaatttggaccatagctaaacaggcattgagctttcaaataataatgaatgtatgttgaagcattgttagtaaaaaattattccttcaaaagatcgaatttgaatttggggccaaagttggccttgactttgtccatgcgccaatgcaaagtgacggtggggtaaaggtcggtggttttgtcaacgaacatgtccgttgtgtctgaaaggcatttcaattgntgtcctccgtttacgcttttcctaatgccccacccatcgctgtcncgtgagcgtgtaaatcatttgccgcgttgccattttaac

SEQ ID NO: 27860 - DNA, 1125 bp, Heterodera glycines
caatttcgtccttataaatcataaatattaaatagaaaaaaaggaattctacccatcaattgatacagtattcagtttgaaaacaccgtattgcataaatacagtaatccaacacagaaaattgccgaattttcagaggctcatcagtcccctcatcaccttaatggacggatgggaagtgagtgtggcgcctctggccacattgtgggccaccagcgcaagcggtgagccacaaattgcgcccaccaccgcattcgcttcctgatgcttgcgcaacacatcgccaacccgggggtcctggaaaaaatttaaaacatttttttttaaataaaacagtcaaattttttaatgagtttgtgttgttaaatcttaacgagattgtgttgtcaatgttctgtacttgaaattcaaagaacgtgcttggatttcggctttcatattagaataagtgttgaaatttaagagactaattgtctttaaaaaacacgaacaaaggaaatttattcgaaaacggtaggtttgttagtgtactgtaggaatacaggtgctgctgcacatgcatacagtaatccaccagcaaaaaaaaatcgaaaaattacattgcaagctgtaaaacttggttctattctttgttgaagaaactgttactatattaaataagtgctttcaaagcggtaccgtaacatgatgaaccgtataaaccaagtgctttcaaatcagtaccgtaacagtaagacgtaaaggaaaaacggttcttgtcacatttgagatgggagcacccttttgttaatgtgtcgccacccccgccaataagacagtattacaggaaaaataataccgtaaccccattgattcttattcagcggtattaccgtaacctatgagacagtttttctttcactcacttccgccaatttgttcgagccgggactgcctccgggcatcaccacagcgtcgtacttcttgtcaaggacgtccttgaacatttggtcaacgtgcaaatgcgtcttgcatgtcagctcaatctcgggcttgtcctgcacaaaaaaaagaaaaatgccgaatgattcgtcattttttcatattatgatttttaattggtcttaaatagcaatcgctcggatt

SEQ ID NO: 27861 - DNA, 1323 bp, Heterodera glycines
tacactttttgaggagatccgggaaaactatagagaaaaattcagtgcggacgactgagtcccgggaagtgatttctcattttttcgtgcatttgggggcccgtaactttttttctaaaacccgaatcaaaaagtttccgctggtagggacctaagttgaagtgttttctaaaaaacaaaaaaaattccaagcctctatctgcaataggaaaggctgtaggttcgtgaactttttcagtaccaactttgtccagttcagtcccggttgaataactcattagggtttgatctgagcggggggtcgccagcggtactattgtagagcttgaaaagcttgatttttccaaatttaaaaatttcaaaaattttcaaaatttttcgagctaggcctaaaaaactgttttcgggtttttgaattttaggattttttaacgatttttcccagagaaacggagaccacttccaaaacatagtttttcgagctctatcgattggtggatttttgaaaaaatttcgatttttttccggaaatagaaaaaatttttgacctgagcgggacatttgagtcccgggtccataactcgttaggagttggttttagccaaaaatggccttagagcaaaattgtagagctttcgaaactctatcgaatcatgtgcaacatgttcggaaattttcaaaaattttcgagctaggccccctagaaattttcgaaattttttttgtgggccaaaatgggggtgaaaatttttttttctggggtattttgaggtgctgagcacgaatatgatgtttgttttccgtttcggaaattttagaattttttaaaaattctttattttttggcaattttttggccctcgggattttggcctaatatttgaaaattcataacaaatcgaagggttgatcaattttacaggaataaagcctaaaaaatagagaaaaatcaggagaattttatgggatttatttgggttttctaacttcaatatgaaaaaaagttattccagaaattctggaaatttaagatttttcagaaaaaaattcagaactcgcttctgaaaagtcattctgtaaaagtaaaatactacaaaaatccgcaattttttgctctattatataaattttattttaaatttttatccctttttaaaaaaaagttataaaaataaaatgattttaggattcgggaccaaaggggggtgaccaggatttttgagtgaaaaaattttttcaccgaaaatattccaaaaacatgtctttaggggtagtttatgacgctgatcacgaatacgtgatcacatttttcttttgacatcg

SEQ ID NO: 27862 - DNA, 1849 bp, Heterodera glycines
  unsure (1)..(1849): unsure at all n locations
aaaatatacataaaaattttaaatcattatttaaatgttttgtcaatttttcatttttatttatctcttttattgtgtttttgaaagacaaattttttaattgctttttttttgctgtgattattttttttgtaacttttagaattttttaatatatttcattctattttcacacattttgtttcgaacccatcaacgagtaatttttagagtttaaacttttgaattttgctttacatctaattttatcttgcaaaatctctcctgttttctttattttttatttttacattaaatttttactattttgtctttaattatattactcttctactgtttttctcatgcccatgcatttgcttgctttctgataacattttcatttttcgctaatatttattgagtgcgtttctcttaagaaaaatgattagatttttatattcttctatagatttattacttgctgtagcatgatttaaattttattttttccactttaatataaagaaattacgttcaaaattgaacaactggcttgttctcggaactacaattttctcgatgtcttgctgtgccttatgcatgttttaaatttgcatggtgctaaattttgatcggaatattattagttatgagtacatttttttgccctaaaattgccccaaccccgcacaccccaccatgaacccgcgaatcatcgagagaaaatccccacagggctggtgaaaaaagcggtgaaaaaaggtgaaaaaacatggtgaaaagaggtgaaaaaacgcagggataaaggtgaaatttaagggtgaaaaccttataggggaggggggttattgacagccatacgtgcaagggtataagggtgccccgcttcataccaccacctaaacccatatcctggttcacccctttttcatgtaattgattataaataaaaatttgctaatcttttcgttatttgtgaaaataattaaacaacttttaatcaattctttggtcccccgttttccaattttccattttttgttgcccgctcccctctccttctgccccccccccctccttccgccgcccgctcaatatctccgattttgatctaaaaatttattttaaatttcgtatttattcttcgcaaccaaagcgttcccatggcgtagtagttatgcgctcggttcgctctctcagcgttggtgttcgagttaagcccctgagggatggcgtgtttggggttcacgccttcgaacgtcccccatgcgcaccttcgctgagagggacgagcccagctcggacatggtggtaatgcataatgaacccagttgaggaccagtccaagacaagggggttccactatttttctatttttctctattatttcattttgtataagatttttgttaaagttaaagaaattaatagtagtatagagaaacgcaaactatttgtgtgaacaaaagtgagtgataaggcataaatctaatattttattaacaaaaaaataaattccaaaatatacgcataaaattattaaaaccaacaaacgacaaccaattatccaaattagcagtttataatatcacaaagtaaatactcagtctcgaaagatcccttgataaataaattggtcaatataactcagttttataataagtatatacccgatacgccttggcattcgctcttacacgtattatatgtagattatccatgttgaggatttcgattttgtttagcttaaagataaatacattttttgtttaagatactatagtcactatttcccgttcatcctcaaagttaaattcttgggtaggcantagcactgaaaganngtttcctcataantattttcaaa

SEQ ID NO: 27863 - DNA, 1031 bp, Heterodera glycines
caaatgaattttattatagcaaaattaaactgaacatattaatacatatagaaagggtgataaataaaataaaaaagttgcaaattcatttaaagttttacaaattcacaatggtattggtggacatattaggcaatgctaaagttttcacagtacacacttaaattttcctatttgtcttttttttaattcgtctacagcctactgtaccacgcaaaaaacaccttattccaagccagtgcccattcagcaaggcatgagccaattaatgttgcatgtagtaattggtcaatgccttgcagtatggacattgacttgggttaggtgagttttgcagatggtacaacaggcaacttcggcaaaggccaacatgcccacaacttccaaaaaatgaggcctcatcaattgaacaaagacacataccaaatttgttcgaatagaacaattttgatgggattttgcatccatcctccggatcaccccagcggaacagcgaacgggaatcaccgcctggctgaacagccgcctcaaatggagttgtggcaaacacattttgcgcagtctgcttgcggttcaatgggccgaattccaacgatagtcggccatgcggctttccgattcgtgccaggtcatggttttatttcttaataattagggaaacgcaatgagacccccccccccgccccctcccgattgggtcgagagcatttttaaattgaaaaattttaaaatgatttggctttaatagcggagaaacaaaggcgcttgttttggcgcaatttgggcggggcttaacacaaagataatgagttcacccgtcgttttacgacaatcatttgcaattttttttaaatggttttggtcagcaaatattgcgcgccaattttttgattgttctcctaaaacacttcacgatcgtctaaaccatcctgaagatcgggaacgcgcacctgaaagaattgacccggaaaaaaattcaaacaaccctaaaagaccgaaatggcatgcgcaaaatttcttttttgatggga

SEQ ID NO: 27864 - DNA, 2058 bp, Heterodera glycines
ctatttatattaatggggatttataaaattatttatatttatactcataattatttttatgctgttttttataatagatgtaattgcaagttttcttcttaaatcatctatgtagatcaaaggcaattcttcaattgttttaaactatctggtttttttgattttccaataattaaagttggattattatattaattctagtccacttacactacgtcacactcaatgttgttaagtgaatttttatgctttaatataaaaaaaaactttgcgattccagaactgaatcaatgattgttctgtttcttcctgaagaaatttattttagatgatataaaatttttttatattaattaattatttgccttaattatttttacattatttatataattgtttatacccaaaatagcacaattttaattagtttactttaaacaataaaatataataaataattaaaactaataaatattagttttttttaaatttaatagattcttatttttgctaccattaaataatttaaatagttgctatttcggataaaagatatttaattttttacgcctttaatgtgacgagccgatttgggcggaaatggctgggtccaaattttaaagaaattaaagcgccgtttcaaaaattttgttctccaccaaaatacatgaactctcatatttttatattaattgtttttaagtaaatccatgtgacccatccagtatttcaggttcagaatttattttaatatttaatattaagctcttattgctgcaatttatataatttctttttgatgaagtttttggtacattaatttatggtcatctttaatatatttataaaattatattttgaaaaatgaatgatgttcattatcacttagttataagtttaaaaatttatcaataaagtaatagagactttaaaatttttataaataaattaaataacctcgcgcggcttgagtccggtttgtttcgatggagaaatcctttctccgaattaatattactattttcttttatattttaattcacttgaattttatagtgcttgggttttttcattgcttttttagttaacaagtcattaaacaacaataaatctgaatcacctaataaaatttatccagatgaattacttacaaagacgataatttgttatatttggcattataaaaattttgccatttttactaaaatcagtgtttattatatttaaaaatttatatattttttcactaagatatataattaaaaatctcgttttatatattttatatttattattttcttgaaatacatccctttaggtatagctttcgcaacttatgcctcgaattcatttatttacatcttcacaaaaatagattaagttttatttttaataattatttttttcaaaacattcattagtttattactcgtctagaaattaataaatttgtgccaatgagctaacatttcctttataaaattctcttagcaaatatttaactttttaaatcaaaaattttgtcaagaaaaaaaatttgagggaataatttttgagaaaatttttcatttcataggaatgtattttttaaaaaattttcggtcgattcttatgggtgtatttttctgaaatttttggggtcaattcttataggtgttttttcattaacccaagcaatctacaattataaagttaaaatttttagtaaataattttttagaacgatggttgaatgtacagcaattagtacttaatttttccattttttgaaaacgattattatcatattgatgataaaaaatatcaactttttaaattttttagtgtattttatcactaattacttttttaagaagatttttatatttaaccaagtaatgtatataggaaaatattagtacggcggttaattttcatacggatttttatacattttttaacgattccgttaccttaaatttattcttccaaatttaaaaatattcaatttttgtaattttacattgttataaacaaccgtaaattgttaaatatatttaaaattttttcgtacaattt

SEQ ID NO: 27865 - DNA, 811 bp, Heterodera glycines
tttctttcctccccctctccatccattctcttcactttttatctcttttcttttcctcttttccccctcttcttttattttcacttcctctcttccctcctcttcttgttcctcctcttctcttcccttcctctcttctcctcccatcccctctcttcccgtcacttctcttttcttccctccccctctccatccattctcttcactttttatctcttttcttttcttcttttccccctcttcttttattttcacttcctctcttccctcctcttcttgttcctcctcttctcttcccttcctctcttctcctcccatcccctctcttcccgtcacttctcttttcttccctccccctctccatccattctcttcactttttatctcttttcttttcttcttttccccctcttcttttattttcacttcctctcttccctcctcttcttgttcctcctcttctcttcccttcctctcttctcctcccatcccctctcttcccgtcacttctcttttcttccctccccctctccatccattctcttcactttttatctcttttcttttcttcttttccccctcttcttttattttcacttcctctcttccctcctcttcttgttcctcctcttctcttcccttcctctcttctcctcccatcccctctcttcccgtcacttctcttttcttccctccccctctccatccattctcttcactttttatctcttttcttttcttcttttccccctcttcttttattttcacttcctctcttccctcctcttcttgatcctcctactctcttccc

SEQ ID NO: 27866 - DNA, 992 bp, Heterodera glycines
  unsure (1)..(992): unsure at all n locations
tgcccaaagaattnntaattttttataaaaatgggctttttttactttcgtatgcaaataccgatttccaattacaatattggaataaacacagttaaaattttccaagcatgaaagccgaaatcaaagcacgtactttggcatccaaatacgagtccaatgccaagattaattaatttgataattggattatagccaaactgtgcacttctgcttttcctctgtttgtctttgtgtcccattttcttgagcattttcccattctctctctcttttcacccactctctcccactttctcttccactctgtctatctctctccctctttctctttcattctgtctatctctctctcccacactctccttgtgccctttgcctttatatggctgcatccatcggctttagccctgctgcttttctttggcggcaccacagatgcagcagtgccaatgcgtcaatgccattttggtggtcaaacgactacggcattggcttaacatcatttaagtgtatgcaaacattgcgcttgcggtgcgtgggttaaatacgtataaaaagcggcttccaatgggtcagagactcttctctctttctctcttctgactatgcgtgagtaaaaaaaaaggagaaaagagtaagcgcagatgccgtctcgtctctttctggtttgcctggggcacggcattttctgcttttcctccgcctgcactcacttctttcggcatttcctttggtttcttctcctgcttcttccaatgcttttccttttcctatttcagtttctttttatgcttcttctttttcttctgctctctctgccctcccaatttgttcgcctttttttcgtccgtgccgtgccaaaaagtccatgccgtctctatcgccgtgccgtctcacaatatacaacacacactcatagacacatatacacacatagacaaatatatgcaaaaatattagcagccctttttgtcttctcacgtattgat

SEQ ID NO: 27867 - DNA, 1286 bp, Heterodera glycines
aaattacgattttttaatccatttaggagctcgaagacttggatccggaaaacagtggatggaaatattgggagaaatgggaggagcgaagacagcagcaaatgttgcgccatgacgaactaaagtatttgggtggaacgagcaaacaaaccccattttacttctcccgtctgttttttttcagatacaaatatttttggcttcaaaattcgcctgccgttcagacgcacatgcgcttcaccactgaaaaatacaaaacacacaaggtgattttacgaattcacatttgtcagctgttgttgtggttggttagtcggggtggccaactcagtcccaatcaaagtttgggcgtcataactttttgcttttttcgttcaaatccaaatgcttgccgataaaaatccgaccctagttcttaacttattttcttatcatttgccaatttcccggcgtgccaagcggaaccgctggacgacttaattttagaaatttttaataaaagggtattttatcgaaaaacttgctaaaaagttatcatttctcccgcagtacacttaattttggaaaatcatactgttctcttcctcctttcacagttcctcactattcccgtgacgacgccgggcgtttatttgaagcatacgcgtcgactgcgtctcaaacagcgggtgtggaagtcgttggaagagtcggagcaaatgatgaaggaaaatgatggttggggaattggcggcacttggaggaattgatggtccagcaaaattttttagttgtctttgtcattgatgattttttttttgaaaaatttaataaaagttgaaaaagggtgatttctgcaaatcaatggcttcttttcctgattgaatttttttttgacattttttcctacatttatgtatttcatttccatttattgtatcatttttgcaaggtgccaatccctcccctcccaaaaagaatgatttctttaaacgaggcaagtggattgcgtggccgtcttaaagtctgtgatggcaatttgtcgttgttacgcgagaagttggcgactgatccggacagttatgcagaggaatttaacgaacagtttgaacatttcaaacggctgctcaaattgctcgaacttcaaccggtgctccacaggtgagaaaaccgaaataaaagctgttgttttaattggaattttcgggtaataatttgccgacggatggaccattcaaaaaaaaaaagttaacgaggttttcaaggtcggagggtccggttcttaaattcatttctactcatatcta

SEQ ID NO: 27868 - DNA, 1111 bp, Heterodera glycines
  unsure (1)..(1111): unsure at all n locations
gaaaaagcacgccgaaagnaatgtgatgtgaaaagcaaatatnaatttaaaataatattcgatcattnagtccaaaaaatgattaattgtttgaaataattaaagaaatttgtttgaaattttcattaatttaatttagctttaacttttggattttattaaataaaaaacaaaatgaaaatttaattttcagttgaaaaaaaaaaaattaaaatttgaatttttttttaatttttgaatttttttgaatttttaaaaattcccggttggtcccggttcccggtcccgaaaaaaatcgaagtcccggtcccggcttctcaggtcccggcaagtcccggtcccggtttttgcaaaaattcccggtcccgtggcactctagttctgattcctaatttttaccgacttttgcacaaagcctcgggacaaaagttcagcaaatagttcgggttcagcattggacagatgaacaaccggagcagaagtagcggccatgtttgcaactgattgtgagcctgatgggtcactggacgccaaaaccattgaactgtcgctgagcagaaggcacttccgaccagcctaattgattcttgttatatttacaatgatcaaatactgtacaaatggaagagagatgaagcacgaaaagtgcaagtgatcaaattaaaagcaaaattattataaaaaattaaaagcaattatttttttttatttgattagcgaatattttaaaaaaattaaattatttttaaataaacataaaataattattttgctttaaatttggtcacttgaaacttttcgtagttcgtctcacattcagccacattttgaacaattaaactgactttgtccgtacattcgtgccacccgccttggtgttgttgtagggcccgttgaaatttttgttgaaaaaaattggctcggagttgtacctgtaaatgaagactatatgaacaaaagcacagaaatattgagagcacaacacatcattgtgtacacacacaaaccccaatctgcacaagtgggnnacgagtgtcaacaacagccatgaatttatggactganncaagtcaatctgnnngcgtgggcgcatcatcatccatcgagtcaa

SEQ ID NO: 27869 - DNA, 1188 bp, Heterodera glycines
aaaaagttcaacagaatcgttaaataaacccattgtccgttcaatggaactgaggggggtgatcgattgacaaaatgagagataatcaaaagtatatgtttaaaattaatggggtgaacaccgttaagaactaaaactgatcagcgtcagggagggcaagtgaccaatacgaaaacaatttggacaaatccaaccgaaggaaaatcaagcgatagactaaaacaaaacctttctctaattttcttaaaaatttggccaaaatcgcaaatgatcacttttttatcaaaatccgttaatgagttacgctcatatcactgactatcaatataaatttattagttaataataaatatatagaaaaaattaggaaagtgtcatttttcggacggaggtcatttggttattgtcatcatcagcataatcattgttttgttgtgttcggtcggcccatttgaggtgcaacggattatcgaagaactgctggtcgtagctggcgctgtcctcagcgggcgtggtgaccacgtgcgaacgacggggactgaagcgaccgtcgagcagagaacgcgcggagggcacgggaaactctgaatgtttggccgagacatctaaaacgggaataaaattttcatataaaatgaatatgatggacataaagaaaattagtgaaggtaagctgatgcaaggcgatctgttacaattggagaatttattttatcttagaagcccaaaccaagtggaaattttttttcttacttctctacacgtagtgaaaatttgcgagaaaatcgcccttttaatacatataaaagtcagttcaggattttataccaaggaaaattttttcgtgttttacttccatgctttggttaaccgagagcttaatattttttatatggcataccaaacaattaaattaacaaacaaaaactaaaaatagttctatctttctcccaaaaattgcccatatttgctgttctaaaaccattgatccaaaattaaaacgagcaattaaatacatctatgtttatcaatggaaactaaacttcttaaaaataaaagaattctttcggtgttgattgcataagttgatcagattgctgtttaaaggtaatgtccaactcggaaaaatcagaaaaaaaactaatttggtcactccaatttttataaatttatttttttgactctaga

SEQ ID NO: 27870 - DNA, 945 bp, Heterodera glycines
  unsure (1)..(945): unsure at all n locations
atttcgggaataaatggagtaatgtacgaaataaaccgcttctccaaaaattttcataagtgaaaaggaaaattatgacgaccaaaacgagttcagaatgagtataaatgttataagaagtgaaaaaaatgaaaaaatgaacaatttatgaaaaataaaaaataatgagaaaaaagcaacttttaggactaaacgagaacatgaacaaaaaaggcagattaaacgagtccaaagaaaagaacgggaaaatttatgaaagccattcatttttcaagatggaattgctgtcaaaagaggaggaagaatctctgaagaggttgaagagaaagctcgaacatcaactctgagggtccagcaaagtctgaccgaaagcgaaaaatggaaatccggaacgtcggatgatgatccagtgggaccacaggagtgggaagaaaatgaggaagaaacgatgaaaaagggcgaagaaatgaagaaaaaagaggaggaggagaagaaaggaagagagggaaaagaaaaagagacggaaaagaagaaggaagagatgaagcagaaggacgagacggaaaccaaacgaagcctcagcgtcggaacaacgaaagacgatgaaatctcgattgtggattctgaagaaagagaaagagatgccttcgaaaacccgccgaagccgacaaacgagcgaatggcattnttgggagtcgactttgaacaatgaggcaaaaaaggattcgcgagaggacaaagagaaagccttaaaaaatacagngccaaggtattgtcgtaagctccagaaaacgaacaataaacgaagtcgacccgccaactctgtcaaatgaagccgccacgaaattcggcgaaanatgcggcaagcattgaacaggatcagaagacgaggagggcgcgaacggtgctctccatgctcctccaatcagagaagagcactgattt

SEQ ID NO: 27871 - DNA, 914 bp, Heterodera glycines
  unsure (1)..(914): unsure at all n locations
atccaagtagggacagcaaaagccncgtttcttcggcaatctcttcccttgtctcacttttaatttctttagttcgctcgtttgactaaatgtcccaataaaattgtgaggcgaatctctctgaacttcaaacatcgtccgtcgccttggcctcgcattttgccggggatgcgactgatcggccgaacgcaaacttttcaagtggacgaagaagcggaggaaggggaggacgaggctaaggaaagcgtggaaatgagctacagactgaacggattcactaattcgaccaaattcgaagtgcgcgtggagtgcgagccggggaaagtgaacgaggaaatggtgggcaaaaggagcgaccgaaatttccaatggcacggaccaaaagggagtgccaaaacaaaaaaggatgccattggcatggactaataatgtctctctcatttagtactcatttgaactaatccgggaggaggaacgttaacattgcgaaatatcaaagaatgaaatttagggcattcaaaatgatatttttatgttgtttataaaagaatattgagcgagaaaatgttaattgatttgaatgataaatttttatttcatctaattggattgatcactttcacgccctaaattagcaaacaaataaattaattaaaggataattggcaaaattataacggtaattggccaatatgatgccattttaattgacgattgacttccgcacatccgccactgttccaattcggtcaatgtcgaacaaacaaagtgcacgccggtcgagtcgccggaggggatgaacctgttcggcgcatcttcgccaaaggcggaagagtcgttgggagagagcaaagagaggggggggggggggcggcgagataggggtgttacaagggaattgggggagggggggg

SEQ ID NO: 27872 - DNA, 1387 bp, Heterodera glycines
aagcttggccagtccgttgagcccgagcagttcgagtgcgtcacggtgttcttctcggacattgtccaattcgctgcactgtccaaccaaatgcgaccactgcacgtggtcaatctgatgaacgaactgtacaccacttttgatgcaattgttgatgagcacgatgtgtacaaagtggagtcgatcggtgagtaattgaagggcattccttcgtttgtccccctctaattggccaattagtgaacggttcatctctgcgaaaatcaattatgaacttcaattttgatggttttaaagattgggtttttgccttacagtaacccatgcaaacttagcttactgtaaacatttaattggccttttaaaaattaataaaatattattccttaaggtgatggttatctctgtgtttctgggcttccaaatcgaaatggaaatttgcatgccaaacaatgcgctgacatgtaattttaaaaataaaatttctttaaattattatttatttcaaaataaataaataaattgtcatttaaattagggctttgaaatttctgaattcgttgcaatccttccgaatttctgagcactccgatcagcgaattcggcttagaattgggctgcacagtgggccatgtgtggcgggagttgtcggtcggtaaattcatgggaaatttcaaattatttttgatcaaatttcctattttccttattgctatcctctcctagtcctccctcatccacacacacataaaattagcaatttttttgaaaacctgtttaaaatgataaaaatttacaattttatgtcccggcgggcggtgcaacctgtgggtgctctatcaactcacaaaatttggttccgaaatcccacggacacctggccaccagggatgggccaaattgaaaaataaaaagcgaaatttgcgaaactgaaaaatgcgaaatgaaaaaaaagcgaaatgcgaaaagctaaaatatgcgaaaggcgaaatgcgaaatgcgaaattttttctacaactttttaatagttaaaagcataaagcaaaaatcattttttaaaattttattccaaatttaaaaatcaatagaactctttctgaggcgcgctttttccaaaaaaactttttgggaagagggggcaggcggcgccggcaggtgccgccaggaaaatttttgaaaatttgattaaaatttgttgacagattttcactaaaaaatgatcaaattttgtgatttttatcatttttctaatgagtaataagagttttggggcgccgctgagaacagtttttcatcaaattaattagccaatttataggtcaaatttttaaaaattttatgggaatttaatccaattcttagggctgtaaaagtcgcgtttcgcgcc

SEQ ID NO: 27873 - DNA, 1302 bp, Heterodera glycines
tggatgaattgaatttttgctgcggctgctgcctcttcctttgactgtgcgcgttgagtgttgccgccgctcaacggctgaagaaggaaaggaggggcagcacaacactttctttcctctcccattttgcctcattcattcccttttgaggagcattttgaatatgcgtcaaaacaaacggaacaaaaattgtaaagcattttcttgtttttattttattttattttccaactcatcccaaaagtgcgtgtggcgttagctttgttcaaaaaacaaagctgcttttcttttacatttctttttgtgtccacattatccaatttgcgacgagcgcaaccgaaccattcattcgtttgttcattcattcatcatctgctcaccgaattgggctaagatgggctataaaagcagtgaactattttcccactgttcagttcacaatggaaatcttctcagaatccactgattgactttttaacttttagggtcattttggcaaaaaaaaattttttcgagaaattccctttcgcttcccatcgatgcatttttggtttttcctccaaatttccctacctttctgatcattatttcttgtttttaggccaaggacaccttggacattgcgtcctgttcgtcttctcgttgctcatctccgccagcgagtgctgctgatttggtaaagccaacgacggtggaggaattcgggggcacccaaatggaaccaatggaggaaccgcacaaagtttcgtcggcgaaagatttgaagaacggcaatgatttgtgtcaagcgacgatgatgtacgttttgcaattcattgaaacagtaaaaacaaatgtattgcttttcgttgctccaaaagtgttacttttaaaattgggcatcatccatcaacttaacagacacatgccgtttttagcaatgtcgtccatgtgccatccgacacttccgagcatcaggtcacttccacttcgtctccgctgctcaaaccgatggctccgcctcggtcgacttcaaagaaaacgacagcgaagtccgcaacactttctgaaagtgtttcctcttcccaatgcgtcgttccgttcggtagcgatatgaacagaaaaatgcccactgctgtcgaatcaatgccaaattcggtgcctccgattggctccaactgttcggatgtttccgctcgtgaaatgcctttgcccaacacttcccttcctcggcccacttcttttaacacagtgaattatttcggcattccccaaaatgtgcctttgcgctttagccctttcaaattgacacttccaacattc

SEQ ID NO: 27874 - DNA, 1047 bp, Heterodera glycines
ttcagaaaggtgcttgagatcacccaaaattttgtagcggttgtcgtatttgtgacaatttgaagcgcaagtgcccgcacgtgtgcacgatcttcggcactttttgggaacaaagggttgggttcggggaatttttctgaatttttattttttgaaaaaccatagaggggggggggggcagaaatttaccgtccaaatattcaatgattgccatactttcggacagcactaaattgtcatggacaaacactgggactttggcgaacggaagtttggacaaaaattcatctttgttctgtggaaaagtggcaaaaattagtttttgtcggtcaaatgttagaaagcaaaaaaaacggcaaaaatttttttgaaaattcaaagaaatttttaacccagcagcggcgcacctaacggcactacagccggtcggtccccttttcccttattttaccatttttttttgttgtaaatttgtccctaaaatcgcaaaattagtcaattttcgggcaaaaaacggctacaaattcctgctttttttggcattacagtttttggggccaattctttttttccatgaacaaccggcaacacccagccctaaaaatcggacatggaccacaaaaaccggtcaaatgccttgttttccaagtaagattgatagcacacgtgtatgttaaggcactgatcggtcaatgtaatggtggattatttaaacatagaaattttggtactagtaaagttcgtatccccattttgggtcaaattttttcaaaattttttttttcttttttattgtcgcaattgctttaaataacaaataaaaggagatttatgtgcttattgggtacaattccgcgatttgggtccacaaattataaaaaatgtccggtcctccaaattgcttacgccacaaaagccattcttcgaattctttgtctggtagagccaatactttgaataaatcggcaagagtgaaatttttaagcttttccattaatctaaaaagcaattgcgacaataaaaaagaaaaaaaaatttgacccaaaa

SEQ ID NO: 27875 - DNA, 1756 bp, Heterodera glycines
  unsure (1)..(1756): unsure at all n locations
aatacgccataggacatgtaagtgaaagatttgaaatgaaaaaatttttccactcaaaaatcatgttctcccccctttggtcccaaattgcgaaatcacaattaattatataagatttttagtaaaagtgataaaaatatgatatgaaatttataaaatagagaaaaaaatcgcggatttcttccgtacagtgacacctcaaccgcctcacaacgcgtgttgcggctacggcactcggtgcgctcccaggcgccaatcactttgcagaaacggttcagtcgctgcccgtcggcttcgccggcatcggcttcgtcatcgctcggcgcaacgttggcactttcggcggcacttccactgctgctgctgctgcccaaatttgacaccgccggatctctgctgtcgcgcatcggcggcgctccgctgacgtgctgctgatggtcggagccattggtgctgctgctgtcgtgatcagactgatcggtgaacgagggccgacctcgcccaatttgacgccaggcattacactataaatgcaaaaagccatttttgcgcatgtccctatttcaccattttgtgaaagcccttccaatgaaatggcaccatttctctcccccaaagccctagcgcttctcattttctgtaagcaaccccccccnccccctaatcacatcaaaacacatacacacacacacaaggaaaaatgaataaatttactgaattttgaaatataaaaatgaatgttttattaaaaatggcagaaaaaatatataaaaattggcaacaacataaaaatatgataaaaagaatggaatgaatgagaaatgttgaacaaaaaagcaaaaatgcgaaatgaagaaaaaattaaaatgttttttattttttaattaattattttgagcggtcaatggcgtcctccaccggaaatttgaccctaacgagtcattcttttcccacttataaaatgggctgaacaaatggggcacactcgccgcaatttcgcctcacgctcaaaacagcaggcgtggaggaaatgtccacatgacgggcgcaccacccgttggccgccgccgatgatccattcgtgacatatgcaacacatcagatttctgcgccccgcttcgtcgtgctcgacaatgcccttgaccgatgagggcagcgtgctcatctcaaatgcggtcccgatcatccagacgcggtcggcggcagccagcgggtggttgcccatcatcaccacttcgttggctgccccctcgacgagcccttgcgcaatttgatcttcaatcgtcagcatctcgtcgtcgtaaaaatgctggtcttcgtccgcaagcggctgctgttgcgccacgcccagcgcctcttcttccgcatccgactcatcaatggtgatgacgttgtggggcgggcgcggtgacaacgtgttgcgcccgcgtgaagagcggggcgtcgagagtcggcgaccctggcgcggctgagcattgagttgacgaagacgacgacgctcacgcgaacggcgctcgtcccgggcaacagcagcatcatttgtgttcatttgacggacaattgccgccatggaacgttgtgcggtgattgaacaagcacggatgggaggcggcgaagagcgaggctgctgctgctgctgctgagtgttgtggcgtgcgcgggcataagttgatgatgacgatggaccaggaggtggagtgggcgggcgcgttgaagaaagccatggctaaaaaagttggaaccatttttttaaatt

SEQ ID NO: 27876 - DNA, 1510 bp, Heterodera glycines
cactgataagcaaatcagttcaatgattggctgatattgactgatccagtgataagcaaacagtctaacgattggcgctgataactgactgaacactgatcagcaaatcagtccaatgattgggtgatcacagactgaccactgataaacaatcagtccaatgattggctgatattgactgatcactgataagcaaatcagtccaatgattgggtgatcacagactgatcactgataaacaatcagtccaatgattggctgatattgactgatcactgataagcaaatcagtccaatgattgggtgatcacagactgatcactgataagcaaacagtctaacgattggcgctgataactgactgaacactgatcagcaaatcagtccaatgattgggtgatcacagactgatcactgataaacaatcagtccaatgattggctgatattgactgatcactgataagcaaatcagtccaatgattggctgatattgactgatccagtgataagcaaacagtctaacgattggcgctgataactgactgaacactgatcagcaaatcagtccaatgattgggtgatcacagactgaccactgataaacaatcagtccaatgattggctgatacttacttaacactgatcagcaaatcagtccaatgattggctgatattgactgatcaccgataagcaaattagtccaatgattggctgatattgactgatccagtgataagcaaacagtctaacgattggcgctgataactgactgaacactgatcagcaaattagtccaatgattgggtgatcacagactgatcactgataaacaatcagtccaatgattggctgatattgactgatccagtgataagcaaatcagtccttgtttctgatgtactaacggtaaaaatttaccataacaaaccggggtcaatttacccacccaccaagtttcatcccgaaactccacattcacttgggggcctctcctttgttagggctaccgaatggtaccaacaatattggatttgaaactgagctaaaccgatccacattcatcattgtttgttttcagaggaggcaaaacacacatgtgttgtacaatattgtttggttgaaaagtttatgcctagcgtttgtaacggtgagcttacgctcaggcatatcaaaaatgaaacgaaaattgatgggaattggcactgcaaatgcgcacacagcaaaaccaaccagggcagagacattggtaaatgggaaaaaattgttgaaaatttgtttaatttcttagaacggcacttttttataatttttcatgaatttttctagcgccaaaatttccaattttccctcggctgcgcccattggcatcgcgggcgccccaaaattcgtttttaatttttaaattgattcaaatacaagcaataagaattaaaatttttgggaatttcaaaatacattttccggacccttcctgcttcctatatataatttgaacaaaaagcacgcg

SEQ ID NO: 27877 - DNA, 971 bp, Heterodera glycines
cattaagcaaatgattaaaataattttaaatataaaaaacactagaaagaaaagttactacgagttagctaatacattcctaaacaaaaacaagttaaaaatgttttgagaataaatgcacaatgtattaataaataaggtttatgcattaaacattaagaaaatatagaattaatatcataaataatacaatataaagaggcagagatgaaatttaattcacatttgttttttaactgtaaaattaaaatattctctgctgataaaattgataaatttttgaaaattatgaaaagctaaatttcgcaaacttttaaaaaatttaaaatatgaactttattctcgagaagttttataaaaaaattagggtcaaaaaggccaatttaattgatttgtccggccgttcgaaacgattagggctattgcttgtctcgtcttctcgtctcatctggtgtctcgtattctcgtgtttttagggcgttaatccatgattttgcgggatttatgcctgcgtgatcccgtcccgcaaaatcaaaaagataaatatggagagatatattttgaatgaagttgttccataatttcaataattttgtttactattttttgttgttgttcttttacagtaatgagatcttttttcacagcaaattgtgagtaaaaacaggtccaatctttacaataaacagagtttaaaatggtaaaatagataaaaaatcaaatattttttcgtatctctgttctataattattagggtgaggattttgtcgtataggtataattgtatatttgtaaatccaaggtatggaaaaataaatttctggcaccaattttgtacattaaatttgatattattgaataaatttaatgctatcaactagagttgagcggtaatcggtaattgtaaaaaaaccggtaccggtactgaccggtactgcaaaaaccgggaccggtaccggtaccaactttt

SEQ ID NO: 27878 - DNA, 1560 bp, Heterodera glycines
aaaaaaagctcgaaatactggtttttgagttccttctagctataacttttttgaaacttgacaaaaatttttgaaatttatcaaattaataataaacacacagaactatcgaacaacaccaacaatgcttaatttggttgacaatgaacaaagttatgctccaaaaattcgtccgacgacgtttcggccgacgttttggggtgcaccgtcacggaaggggggggggggaacgagctgttcccctcgccgctggcaaaaacacttattagtaagggatatgatttttaggcaaaagcctattttttcataaactttgatgcgttgtccccccctcccatgtttttcggtttgtccgtttccgttttcgtccatcccccaccggcgctttccacgttgcagtccagaaacaggtccaagcgcttgtccagcacgtagtactggtggacgaacagatccgcgacaattgtcaacggcagtccccgcaaatggacggtttcctccaagtggtgggcgtacactgtgctgtcctcgtgctgctctttggtgaagtcgaccaatttgtccatgtgcagtgccacgcgtccgttgagtgtgtagcccaaccgatgggtggcgaagggcaaagggtacggcgaagggacaacgccgccggggtggtcgtggaacagcaaaacgctgaccaactcgtcgctgctcaacacaccgcagggcactgcaaaaaattaaaaaatttttaaggaaaaatgtgcaaaatatgacccaaaaagtgccattaccctaaacctaaatagcattaaataagtgccagaaaatgataatttctaataagtgataattagtaatttttgaaagaatcattaattgttcaaacagcagagaattaatgctcttaataactagaagatttgcttaattttaatgctgtttaggccttgatggtttggaaaaaataagtttgaatccgattttggacataggcgcaaatgtttgggcacgctcttttctggataaaaaaaatactgacaatttttcaaaatttttaccattaaatttctttaaagaaaattctatgatttttcttatctgtcgtccggcggtgcctataggcgccgccgggggaaaggtttaaaaattttaacaaaattatttttaaaaaagttggtcctgccctctattattggtttattagtgttttttagttggcataaataaatcgcttgagttggaactgtccattaccaatgtgttcggtgaagtcctccttcgaaatgcgtggaaaacgaattttgaaaagtgccgggccgagcattttgcgccgattctctgccgaacattcgaggcccttttggcggcactgtccgtccgcccaatggagtgccaaaaaattaacaaattaattaattaggcccaattaaaacaattgacccaattatttggtttgaattggcattaccatccgccaaatcgtaagttcttaatgaattgccagcttttctcggtccaaaacttcggacatcagaagttggtcgatttccaaaaaggcgtccgattggtgcaaag

SEQ ID NO: 27879 - DNA, 1208 bp, Heterodera glycines
ttttccttaaggttgaaggcattagaattggacagatctttgcccatttgacgaatgccaaagcttacatggtcaagccaattatcatcatctacatcttccgccagaagtgccaaaatacgctctttcacttctgccattaatgactagaaaccgaaaatttcaaacttgcatacccaccgagacattggaatacaaaattttgcgagatatgtcacgcgggattacttccgattaaaatttgcgggattccgtttgttttcgggatttttggaatttcaataaattagatttaaatataaaaaagaaaaaatgactaattttgtctagttaaaggaaaaccaaggattaggcaaaaaagatttctcttttttttgaatagagaacgagggctaaatagtgagaaggggcgtggaattccaacccgattttttttgcggacaccaattcgagtcatgacatgagtgtcccataaaggttatcggtctcaagccttaccccggatatactaaaacctgataatgtttgattagggctttcgcctgagatatgacccgaattgaaaaaaccaggaaataaattttggacgagaatgttggaaaatggtcttaagtatgagaaatattattaaatatttgtttatgacatttgaaattttcgaaaaatacagtgcggatcctacagtatccctcgaaaaattaaatttgcggatccctctgcgagatcgtaaacaaaatcagcgggaaaggatcccgcgggataatcccaaaaatccgcaatttccaaaaaatgcgggattgttgcagactgtgaccccgcaaaatcccacgccagactattagtgacaccgaatttgtggatgacgacgccgaaggtgcatttgccgaggccgtaaaagcgcggccagcgaccgctgctggcgtctgtaattgtcgccattgcggtcgttgctggggttggagttggccatgtccccatgctgctgcagtcgtggcattggcatttgacagtgcgttttccaacgtactgcccgaggacgacgcaaccgccgccatttgccgttggtgaagcgaggaaattaatgcctatggcccaaatggagaaaaataaaaatatttctgttttccaatctcagttttggttttgaaagattaatttgtagcaaaaacggctagccggggtaatatttttccattagtagctaaaat

SEQ ID NO: 27880 - DNA, 1511 bp, Heterodera glycines
  unsure (1)..(1511): unsure at all n locations
aaaggaaaagaaaaattacaatccaatcatttttcataattttaatgcattctgctgatggttcaatttcctaattctcattntaagatccgaataaaatccgatgtcgccttcgtccatttctattcttttgggggcccagtggggcgacgaaggcaaaggcaaagtgttggattttctcatcggacatcacaaggtcggttacggtgggcttctggaaatccttcgttattgatgttccgaaggggaaaaaaattctgggctttctgcatttgctttgttgttttgtttgttaaaccctctcactttctcagattgacattgtcgcgcgatgccaaggcggtaacaatgcgggccataccgttctggcaaatggccgcgagtatcatttccaccttttgccttccggattggcctcagaaaaggtgacccaaaaaacaaaacaaaaactaatgttgctgttgcaggtgttgaacattgtcgggaacggagtcgtcgtcaatttggacgcccttttcgaggaattggagagcaacaaaattgaggattcggcagaccgactgttcgtcagtgacagtgcccatttggtgttgcctgtgcacatcgcaacggatatcatgcgggaaaatgcgttgggacaaaactcgtaacaaacggaagattaaacatcgatcaaattatttacatttttcagaaaactcggcaccaccaaacgtggcattggtcccgcctattcgagcaaatgcttccgcaatggcatacgactgggcgaactgctcaaccaaccagagaaatttgaacaaaagttagtcgattaataaaattagttgaccttttgtcgttgtttagctatcgttcgctggtcgcccacttcaaaactcttttccctgacattgaattggacacggaaagtgacgtcaaacagttgaaggtagtttcttttttaaatttcattttgcatttgtcctttttttgttaggcccatgccgcacgtcttctccaaatgggcattgtctgcaacacgaccgttttcctgcacaaaaagcgtttggagggcaaatcgattttggtggaaggagccaacggcactctgttggacatcgactttggtcctatccaataatgttccaatttcttttaccatcgattgtcttttcaggtacctatccgttcgtcacttcgtccaattccaccgtcggcggttgcatcaccggccttggcattccgccgacagccgtccgtcgcgtcatcggcgtggtcaaagcctaccaaacgcgtgtcggctccggtccattcccgactgaactgcttgacgccgatgtttgtattcacacaaaaataaagttattgcatataatttttgtctttcatagggacatcccagcgaagagggcaaacgtttgcaagaagttggtgttgagattggcgtgaccactcgcagaaaacggcgctgtggttggcttgacttggtgatgttgcgttattctgcaatgatcaacggattcacttcg

SEQ ID NO: 27881 - DNA, 383 bp, Heterodera glycines
accctaaaatcttattttttggcctttattcttattttcatttttggtcaatagaaaccctggatttagataaaaacacccataaaaattgccttttctggcataatttataatccttaaatttggtcatttttagacaatatctatgcaattataccaaaaacgaattgaatcgaggcgatacatcgaataaaggaatgtggagccaaacacatcattcaaaaaaaattttttgtgagattttttggagctaattaaaaacaaacccccgcccccgtccccggggcgagaaatttctcacccccgcccccgcgactctgacccccgcaatcccccgcccccgcgaaaagccacccccgcccacggggtccgaaccctaatta

SEQ ID NO: 27882 - DNA, 1554 bp, Heterodera glycines
  unsure (1)..(1554): unsure at all n locations
aacttttgttattttcgcaccgtaaaatgtttttgaaaaattcaatttccgactttttgttcgaattcgcgtccgaaattggtcgaaatggatgtcagattcgtgatcagcgacccaattttccccggcggcgcctatcggcatgtgggagccctgttaatgtatgacataattgcaaaaaaatttgagattttaatatcacagtacgaattggctttttaccattcatttcattgccattgttcgtcccaaaatcgattaatcgtttaaccgttggccatcccttccattcattgcctattttttcttcagaatttgnacatcttcgcccccccccacccctccccctttttctctaattgttttgtcattttgattttcccctttctcttttccatcaaatgcaaattcgtcctccccttcgctccaaattttgacatttgccaacaaataaaaatcataccaatcaattgtaatgcttttgttactttcaatttttacaatccactgacaaatgaagcacatatgtataaaaattttctgtctcccgtttcaatgctgcaacttagtgcgaaagctctaaattttcatgctaaacctccttgagccatttaaaattaagaataattttttgtagcctttagccagaatttagttaaacaaaaactcggctctgttctagtttacgcgtccattgagtaaccaccaccaccctcatttttttagatcataacttttttcttacttagtcaatccaaacattcttggtatcattcgaatgcgtagagtttagttatgacctaagtaacgtagagtggtcattgatgggacgcctaaattgtgatagagccatatcgtcaacctttttgttaagagcatcaaattaggcctaaaaatttttgtgaaaaatcaattactgaaatggccgccaaacccctctcttctgtggatcgcatgaaattgttgctgagttcgggggatggggcggacgttcactttttggtgggccaaagggacccaaaagaggcgagtgccgtggaaattcaaagcattacaaaattgttttggcttttagcttttgtcggctcacaaactcattctgatggccgcttccgacgtgttcgaggcaatgttccgttttgactccgcaaatgccacgacttccacttcaaaacgtaataaaactgttggcttaaaaacattccctcaagatttgggggaaaagtaaaatttagagattttttggtattttacagttaattttcaaggacatttttttgttttttcgaaatacatagagaaattagtgcaccccctaagaatgtcctaaaaattgaaatttcccgattttcagcgccttcggatttggccagcagcagcaaccctgtggtggtcagcgacgtcgacgccgatgtgttcagggcgatgttgggctttatttatgcggacgatttgagtgggatgaacggcgacaatttgttcgacgtgctttacgctgggtaaactttaaaattcattattttcttcgtttattttaatcacttttagccaaaa

SEQ ID NO: 27883 - DNA, 1109 bp, Heterodera glycines
  unsure (1)..(1109): unsure at all n locations
attgaccatcctaggattatccaaatctacttttttcttaatgtaatttttatattaaaacatagaaataataatgctgattttaaataataaattaccagtgcgataatccgacaaagattaaatgaggtaaaagcgacatggaaaaagaatgacgaagcagatgattttcaaaaagaatttttgatttttcaataagaatccacatgtggtgctttcggttcctctaaaaaaattcattgttttcgcgaaattcaatgggttttctggcttttcctaatttcttttattgttccttttaaattaaaccatttttattttccttaaatttttttagagttaaactataaattatttattttttgtagagtgccacgggactgggaatttttggcaaaatcgggaccaggacttgccgggacctgagaagccgggaccgggacggggacctcgattttcgtccgggaccgggaaccgggaccaacagggaatttttaaaaaaattcaaaaaaattttaaaaaattcaaattttaatttatttcaagtgaaaataatacaaatttgttaacagattttcaacaaaaaaggctggattttgggattactaggctcaatttgtacggattttcatttaaaaaatgataaaatatgtttaacctcaaaatttgttttttttcatcttttaattattatatttaattaattaatgccgtgagacaccaaataattttttacttccattgttttctttcaaaaattccttaacaaaaaggccataaatcacggcacttcttgaacaggtacttttggataaagattaattctgtacggtttcttcataaatgccttaacaatgtgaaaaggttttcaattccaaagggatgtctcgtttcgtaaatccgccaaggggtgagtataaaaacaaaaaatgtgacacataaaaactcacaacatggctaatatctcatggtatattcaatagcntccgtggatgttctttattagaatattaatttcaatttttttacaaagtataaaaaagatatggtcataaaatttcaaaaatatttaagtcaaaattttttgccataaccttcttttgaactca

SEQ ID NO: 27884 - DNA, 1390 bp, Heterodera glycines
  unsure (1)..(1390): unsure at all n locations
ttcacattgtcgcgttgcgctacttggaactgttgcagcaggatcttcaggtggcgtgggtgtcgaattgtgccatgccatgcccctgcatgatacaattgaattcttgtatagacttagatagatatcggcacgggacagggtctcaagctggatttacataatctgctataatcccgcatttttttttggaaatttgagattaatccctaggaatctcaacctataacaatttttgtatttaattcccgcagcgggatccttggagtagagagactggaaatgaggggaataagcccccccccgcccgaaaatagaaatgaattttaacgaaaacggaaatatttaaaaaaaaaatatttttcaaaaatagtccatagtcccccggggtgaggactccctcccggaaggaacaaggcatggatggcggcgctacatgcttaccaataagtgcaattataaaaataattagactaatatagtggcgaggtatacgaaatcataacatcacaacccaaaaatcataataataaataaataaataaattagagttagtgaaacattgtcagaaatacaattatggcagaaaaaaaccgagaattcattttccgacaacaactcattacgaaaaaaacggaagcccaataattcagctccaaattggctgggaggagcgcggtgccaagccgtcgtcgtccgccgccggcgccgtcccgccaatgcttcactttctcgtccattttcccgaaaatgatcttacgaataacaccaacagcaaaagcaatgaggacgacggcatggagcaggaactgcaacacaaccatccacagcagcagcggtgccgcacagtgcgcgagttggccatgcatttgttggccacgctgaagcattacttcccggacattcagcgcaggcactgtgccccctccctcactttgggctaataggcattaattggttatccattcattttcggtccctaggcatcaaattttttgaaaaattaattcgaaaataaaattattgtgcccaactcacaaattaaaaaaagcgaattgcataactttgctcacttttcagcttggccaaacattttttgaccatcagtccgtcactgattgccgacttttcggcactgccctcctccacccctgaacttccgtgccacaatttccgacggtcctacgtggtctgccgactttttttagaatgccattagataatttagatttttgaatattaatttaaactattactaatctccccaattttttagtctaatttaggaaatgaatttattacctaaaatcgccaaaatacaattagatttgggtatcaaaactgccattaaaaancaaatatacggnacctaaaaatttattgattcat

SEQ ID NO: 27885 - DNA, 930 bp, Heterodera glycines
  unsure (1)..(930): unsure at all n locations
ctagcccagcccgtccctgccagcggcattagttgcccaccctgtgagcaggagggacaccgtccgagtgcttgtcagcgttacaccaccgtcactcaacgccggcgacgacttgaagaacaggggcgctgtctgcgctgcctccgccaagaccatgttactcgcgactgttctcgtcaagaccgatgctcaaaatgccaggctaccgaccatcatttcctcctctgtccgtcaattgaccctccagggcgaaccaacaatcgacaagagaatcgggagcggagtggaaatgcgtctcgcaacgtcagtcgtgccacgggggccaacgccgaaccagtccgaccaagagcgacccccaccacaaccgcactgctcgtgtgcgacgagggcgaaagcattcccgaggcgttatgcgccgccgcctttgaccccctccccgtcgacagcggcagttttctcgtccccaaatcgacgagagtggctcatttgatgactcagacccttaaggcgtcatgccaaggaggcccacccgacggaattcccgcctttgtcttccacgaccctggcagtcagtccggctacataagccgggcaatgacagagaagctccgacccccccgactctccgagcacctcctccgaattcacaccttcggagactcccgccccaagaccgtccgatcagcaaaattcgccattcaactgcagcgcctggacggaggctgggagaccctcgagctcaacgtaatcgacgagatcacgaccaaaatcaaggcccttcaatgggacacaaccgttggactcctcccacctaacgccgtcctcaaggtcgtcgagaaagcgccggacatcctcattggcattcgggagtttttgggaattctttcacggctnngtcacgctccattccgggctccacctcatccagac

SEQ ID NO: 27886 - DNA, 1142 bp, Heterodera glycines
gtttttttattattttatttttctatttcttttgtttgcatttgttcgccaatttgtcctttttttctcgctctgccttatgccatttccacccatttttgcctcaattgcgcactcccctctcgtcctcactctatttcatctctttctctctctctctttctctccccgccccaccgatcgcaattcattcgctgaccaatttctgcggaagccaaagcagagggccaattcagagcaccataagaagagtcgaaacaatgacggacaatgccagacgcatttgtaatttttacgccgaaataattcactaaaaagtggaatagctacaaaactgagaggaaaatgaaaaagaagaggggtttgaaatgaataccaccagaagatatttttgcaaatgaccaacacttttggatgccgaattatcatcttttcacatctaactttttctgctacccgaccacaacaacgctggagcgatcggtcgtcggttggggcagggggctgcatctctttgtctcaaaatcatttcatttttttttcctccattttctctctctttaacgtcatttttctttctttttttctctctgctttttccccttttccatatcgctttgttatttttgccgcgagagcgcggcaatgtcgtcggtggggaatgtgatgaaagatggtcattggccggggttcccctttggcttgggcttggagttcctccaccttcctttgtgtcagcccctctcatcactttttgtcccctcaattgaccaactgccccacccttttttgccaccctcaattcccctggccgttcgttcattcattctgataattgttcaactttgtttcgcttggcttggtttttccactcaccaaggaagtcttcacgtcgaagcggcggtggtgctggtattggttgtggaggtgttcctggtggtggtggcggtggtggaggcggtggtggtggcggtggtggggacccatcaatggctcaggggaccagccagcaagttgtacaaaacagattttaaacaaataattaaaaaataaaaacaattagctgacgcgacgacccaccccatttccaaacattctgcgtggcaatggtactaggaatggtggacgttccggaggaggag

SEQ ID NO: 27887 - DNA, 912 bp, Heterodera glycines
ctcccgttgacaaccgaagggtacattgggggcaatggatgttgggctaccgtatcagttattaaaatttttgtttttcaaaaaggatactaaaactgggataaccccattcagagacaagtcaaaaaaaataataataggcttggactaccatactaattagaaattttagaatgtgtctgttaaatgcaaaactgttgtgaaaaattgttataactcctttcagagaagagatagaaaaaaaataaaaatagggttagagagcccgtgaacagctgcatcggatgcaagtgccgccgttgctgtacgcctaacagttggtgagcaatgacggaaaattgcttaaaaaagaaaccaaacaaactcatcaattgttagctcccgttgacaaaccgaagggtacattggggcaatggatgttgggctaccgtatcagttattaaaatttttgtttttcaaaaaggatactaaaactgggataaccccattcagagactagtcaaaaaaaataataataggcttggactactatactaattagaaattttagaatgtgtctgttaaatgcaaaactgttgtgaaaaattgttataactcctttcagagaagagatagaaaaaaaataaaaatagggttagagagcccgtgaacagctgcatcggatgcaagtgccgccgttgctgtacgcctaacagttggtgagcaatgacggaaaattgcttaaaaaagaaaccaaacaaactcatcaattgttagctcccgttgacaaaccgaagggtacattggggcaatggatgttgggctaccgtatcagttattaaaatttttgtttttcaaaaaggatactaaaactgggataaccccattcagagactagtcaaaaaaaataataataggcttggactaccatac

SEQ ID NO: 27888 - DNA, 1148 bp, Heterodera glycines
  unsure (1)..(1148): unsure at all n locations
gggggaattgctgctgtggggtacaatagaaaggcaatggtgtccttttcacttgatgaagcgaaaaggacctcttcgacaaaaatagaaaaatgttgcttttggactgttggagggggggggggggatgtctgctattnatacgtgcttattttgataggcgggtgaagcgaagaatgggcgggagagatgccagacgaagcgtagggaaaataaaaagtgaagcactttctgcacacctttttcagtgggcaaataggctagctaattgcttaacaacagctgaacaatattggaggatcacaagcagatggaagggggatgaagggcggggggggggggaaaatgtgacggaagggacagttgcacaaatacggaccagcgatttgcggctttcaaaccgcttttttgttggtgtgccctttcaaatggacggatggaggtactgtcatttggttatctcattttgaagaagaacgagaaaattgggagtttgaaattaaatttgaaaatatgatgtgattactaattggtcgttgccaattccttcctaacaataaaatatgtccgatagactgaacattttaatgaaagagtgattagcgcgtgatgaaccgacattaaacattaataaatggaaaaggaatgtttccaaagaaaagtgtcatacaaatgtgaccaatttggaaaataaaaggaagagatggccagcagcagcagaggatgatggcaaaggtttgtgttgggatgacactaatggcgcaatgagtgacccccgtccccgtcccctccccagccccctccgccgtctgatttatgtttacgcatgtgttttcagcttataaaagtgcgttaaaatccgtctccgcccgtatgtccacaggcatttgtgttgctgacagtggttgagtgggctttttcattgtgtgggcagtctgccacccaaagcgaattggcgcgttggcgttttgccaattgtgtccatccgtcatgagaaaagaagcgaactaaagaaggggaagagtgaaagagtgagacattccctctccttcccggtggtttcgttcaaaaatgacattgtgaaaatcggagaatggaagagataaaaatggagagagaagttagtaatatgtaaaggtagttaataa

SEQ ID NO: 27889 - DNA, 1701 bp, Heterodera glycines
  unsure (1)..(1701): unsure at all n locations
cgcaccacgcctaacgtcaccgccgggacctcctattgtcaatagttcttctgaaaaagcgtgctgcaaaaaaaagtgcaaatgcggtgaaatgaggaaaatgatcgatggaagcaaaaaaatattggaaaaaattcattccggagaaaatttgataaaaattaatctttttcattgcatatggtaatatttttacgcttccttaggtttcaggaatttcccgttatgtctctggaaattatttgtatgcccgtctttggaaaccgggtttttccaatggcaactctgattaatgatgaatcacccaacatccatgctgatttgtgaggaggggcatccccccccccccctcccctttcatctcccttcaaaatgtccaatattttcgttgtggattgattctttgaaaaaaatataaaaatatattcatacattctcccctccctctgctggtttattttcttcattcattatttaccccccccccccccacctttcgttgtttttgcctcattctttcgcttttgtcccctccctttccatcaatccacacatcttttgccccttctctctcttaaattcatccccatttaacattctcctcatcagcagcggttctcacctccctcttccacccacccggcccttctgctgctgcttctgatttggtttggcttggcttgaaaatcaatcatttttttgaattttctgtgttcctcgacgtaaccacaaatcgaaagcactaacaaaaaagatgcaaaattgtacaaattaattaatcattttacaaagcaccaatgaatgtaaatctgctgccgaccgtttaattctttgaccattttgctttgcattccgttgttttggtacgcatttccatcatgtccattcttccgcccttctcatctcactttatttccccttccattgtgtttttttggtctcttcacttttcctaaacaattctgcggccgcccttttgagcacaaatccatttggtggtgtgcactttcaaaattactccattggtctctgctgggctaacccatccattctttaatctgaatcgataatttggctactcatttacccatttcctttttccatccatccaccattttcgttgtttttggatttgaatttgaaaaatcattttcttggattgattactaattatttgtttagctgggaataactttttaaaaagctatcatcactttccgctgtaatttgatgagtctgaccgctttcataaacttttgcttctcggaagctcacatttctctcctgggagtcactatttttaccacacattagtcgtccacggttttttcatcttacactttatttccctccgcttaatctgccacttaattgatccaaaaaacatttatgtatgtcccggaaaaatgcttttttaaacttaactttaattccttgtcgatttgttgcgtatgtaccagctacactcattttatccgattctgatttttttttttttgcatcatttcaccgtttagggcctgaatcaaagagatccatttaatttttaaaatctaaactcattagttaggttatttgtaggctttttcgtcaagaatcaagaaaagaatattttctggtcttatacctgaanaataannctgatgaaaccaaaagccttcatacttcgtataaatttcagtgaaaattttcaaaataaaa

SEQ ID NO: 27890 - DNA, 1178 bp, Heterodera glycines
ttcgcggcggttttttaaatttagttggggccagacggccgcttcacgcccgttttccaaatttgtttggcccagacgggcgcttcgcgcccgttttttaaatttagttggggccagacgggcgcttcacgcccgtttttcaaattttgttgggcttggcgggcgcttcgcgcccgttttttaaatttgtttgggccaggcgggcgcttcgcgcccgttttttaaatttgtttgggccagacgggcgcttcgcgcccgttttttaaatttagttggggccagacgggcgcttcacgcccgtttttcaaattttgttgggcttgggcgggcgcttcgcgaccgttttttaaatttagttggggccagacgggcgcttcacgcccgtttttcaaatttgtttgggccagacggacgcttcgcgcccgttttttaaatttagttggagccagacggcgcttcacgcccgtttttcaaattttgttggggccagacgggcgcttcgcgcccgtttttaaattttgttgggctagacgtgcgcttcgcgcccgttttttaatttggtgatttttaggccgctcgcggcctcgtacgggcgcttcgcgcccgtttttcaaatttagttggggccagacgggcgcttcgcgcccgtttgatcgttttttaaatttgtttgggccagacgggcgcttcgcgcccgttttttaggggtacaacagtgattagaagaggtgcaacagtgattcattaaattaaaatgaaaatattttttaacaaatttaattaaaaaaatacatgaaattctatcaattaaaaaaataattaatttaaacttataaaattaaatataattttttatttattaactcaacaaaatattttaaattaattaaaatcattgaaaataacgtaaaaatgcacagaaaaataatgttacaccgtccggatccgaacctgccccctcccccctcaaaatgatgcctcagaatccccaatcacacagggattctgaggtcttgacgatgtcaaaagtaaaatctgatcacgtattcgtgatcagcgtcataaaatagccctaatgacatgtttttggaagatttttggtgaaaaaaatttttcaatcaaaaatcctgtcacccccctttggtcccgaaaccaaaaatcacttttatttttataac

SEQ ID NO: 27891 - DNA, 1683 bp, Heterodera glycines
taaacacaccgtttcaaaaaacgagagatgaaccaataaagagagagcgcagagaaaaaaacatctctctttttggcgtactatttctttatctctgttaatagagaaaaacggaatttacatttctatgtttagtttttttgtcctatgttaaatgcgcttcaaattttgcataaagatagagaaaaaaattctgcatcgaatgttctataagattttacgatttttctatcccatttttgcatgagaccgttatgaaaatttgaaactctcactactcttttctgagatgtcaaattgcttagcatttgcttagaaaaagcttctcctcatcaagggctttcgaatgataccaagatggaccaatttggttggcaaaaagcttcaaaaataattcccaaaattcgtcattttttaatattttggacaaaaataaataaaaatattcatgttgcacaacggactcgaaccaccaccctttgtccctttactatcttacaaaaaccactgagccacacatgcaaatctttttggaactgggaggccaaaattgaaacggtgtgtaaagcgattctttttttgtttttaaattttagtccctcaagaacttattcgtaattcgatgcttttaagttttctttaatttatttgcgtttctttttccattttttttaaatttcaggctaaagttttcatttgacttccccacataaatactgacaaaaacaaaacgcccccgcattctttgtctaaccgactcaacgttgagacatggcctctgttgatgagaatgagcagcttgtgcaggaaattgtcgggaatgttctgtcggaatcagcaaaaggtacagacagacaatcgagcaaaatgagatgtgtaaattctttccatcttttcagaccaccagcaagaggagggaacggtaggttttctgagcaattacagggaattggataactgaggaacaccatgaaaaactaagcatcttatactggtttaacataaaacgcagaatatgaggttatcgttagtactggttcaaataagaggaaatttggcaccccattctccatgatgacaaattcaggaacaccaattgatggacgaagtcgtcaagatggacagcaccgatgccgaggcggaggaccatggagggattggacatgaagtggcaatttcggtcagtgacgtcaagcaggaagggtacgcagtggaaagtccggtgggagaggaagaggagaaagaaacggagggacaaaacgacggcgcaatgcgacagattgccgacaaagttggggtaggcgaatggaacggttcggacaaatcgaacacttgggggaaaacacggagtgttttctagggactttcactggacgaagacaaaacagcgaacaccgacgccgtcgtggaaccgccgatggccacggaagagaaggcggcggacgttggcaacgacaaaccgtcgggagagaatttgaatgaggaaaacaacgaaagcaaagtgggcacaaatggggttcatttaaccctaaaaccattttttgtgtagggctatcaatcgccagtgtcggaggaggagcaccccattcagcacgtcgacgcaaaacaaccgactgttgacgaaggacagacccatgctgctgctgctgactctctgccgccgtctgaaccgaccaccgattc

SEQ ID NO: 27892 - DNA, 1460 bp, Heterodera glycines
cccagggaaaatcggcggaaaatgtgcacgcaaaatttgtggacgattcggagggaagtcgcgaaacggaggcattggaaaaatttaaaattcgaaaaaatacaaaaattgaaaataaatataatttgaaaatgccatgtttgcttgtgccagtgtgcgttggatcagctcggcttctcccccgcggagaagggatgggtgcgcgagttggccacggcgtgcgttctcatcggcgaggcgcaatttggcgaacggcacggcatggacatttcctttgtggaggaaatggcaggtgcattcattgccagatgagaaaatatttgtccccaaaaagccgcgaacgctttacagaagttgaagcggtggctgaactgctcggcatccgtgccaatgctttggtggacgcactcactcaggcaaagccaaccaatttgaaatctccagacatttacgattctcgactcattaatcacgtccgttcagccatccatccgcgtcggtgacgcgctcatccgccgctcgcagccattgcggaaaacgctttgtgccgcccagtctttggccaaatgcgtgtacgaacgactgttctcgtgggtgctgtccaaatgcaattcggccatacggcggggccgaacagggagtggccaaagcgatgaaacggacggcggaagagaggccaacggaatggtcggagtgttggacatggccggcttcgaaataatgccgtgcaattctttcgagcagctttggtttggctgtgcatcttcgaatccaaaagtggcgcccattaagcattaattacaccaatgagcgacttcagcagtttttcaacgaatttatgttcattagggagcaggaggagtacttgcgagagggaatcagctgggaatttgtgaaggtaaggcgaaacgggggatgactcatttgaaatggggcgatgactcatcaaacaaacgaaggacttcggcagagacttgcagccgaccatcgatctgatcgaaaaggttgtcgactacgtccatttgggcatttgtcatttggcaatttcagccactcggcattctgtcgctgctgcaagaggagtgcattgtgccgaatggctctgatcagtcgcttctcgacaagttcgtccttcggctgtcttccgcctcccccggggccacatttttcaaggccaaacaatccaatcggtaatcagcagctgttcttccccatgtgtactgaacagatatcccctcatcaaacagagtgccaaccccccatcacttcacaatcgcccattatgccggccccgtcagttattccgtggacggatggctggagaagaacagagacgcggtgggttttggcactgacaaataggcaatactccaaaagggtgcacaggtggacggtgcactgcttgaactgctggccacctcctcccattcgctcgtctcccaacttttttcccggaggga

SEQ ID NO: 27893 - DNA, 1204 bp, Heterodera glycines
aattgattttttctttcttcgtgttagtattgtaacggtggtgaaatgtttgactacattgtgaagaaggagagacttactgagcccgaagcgcgacatttcttccgccaacttgtccaagcgatcgcttacattcattcaatgggttggaaacgagtttttagcttttaaattgtctctgtgaatattttgaggttttgctcacagagaccttaagccggagaacctcctcctcaccaacgaacaacagctgaaggtgatcgacttcggtctctgtgctaggcctttgaagggactcgacgctgttcttgaaacctgttgcgggtcgcccgcttacgccgcgcccgaattgctccaagtgcgtttattgcacctttgcagtgtcccatctgtttagaacagctattatttcgggaatgaggctgacatttggtcgatgggtgttttgctgtacactctcctctgcggctgtttgccctttgatgacgccagttacccacgactctaccagaaaatcagggtgttttttacgatactttggccaattaaattacactcatttgcagaggggcgtctatttggaacccgattatctgacctcggaaacgaaagagtgagaagccatctcactaacaataagcaaatcaccgcttttgtctatccaggtttttgcgttgtatgctcaccgtcgacccaaaacaacgagcgaatatcagacaaatattgacccatccctggctcaacaaatcatacagacagcaaataaaatggcaaagcatttacaatgtattatttcgttgtttttcattttttgctccatttaattgctcctttttgtgtgtatcagcgggacattgttgatgcagatgtttgtcaagaactcgcttatttttacggcagtgaaaaggaggaagtaattgcacaggttaagcaggtcttttgccgattcttcacggttttatttaatctttcgtccattcagtggaaatatgacagtaaaactgctaattatttgatacttctgcagaaaagtaaacttagcaacagattttccgatttatttgtgtatttttcaagaggagcggaaacagaacattgcgttgctctcccacaaaagagttcagtctcatttaaccttttggtgttaatcgttctctttttgaagtcatttcagttggttaagaggccctcgtcactgacaatc

SEQ ID NO: 27894 - DNA, 826 bp, Heterodera glycines
gccggacccctttggtcccaaaaatttttttgaaaaaaactcgccgaaaaagtgttgagaaaaatgatcagcagaaataaaaaaaaatattggaaaaaatctgccggcgcaaaatacaaaccattagaataaaattaaccattttcatttcatatgataaaatttttacgcgtccttggatttgaagaaattttcccgttatgtccctagaaatcattatactcgtccttgggaagcgagtttttccaatgggaaactctgtataaaatgcttagataatacggtttttggcaagaatattttttgtaaacagaaaaggttgccaaaaacaaacacattttgcctaaatttgcatgttgctggacaaaaaacaaactgttaacaaaaaaagctcttcataatttgctgggcacctgttttgcgtgaagaagaagcatacaaaagcaaattgatggtttgtcaaaaatttgattgttgaaatgaagaaatgcgatgactgagtgatcaatatgatcatgtgtctgaaacagtgatgccaactcgaacccgaaccccgaggtttttctcaacccgaaacccgaacccgaagttttttgagtgcccgacccgaaacccgaaaatttttctcaacccgcggcatcactggtctgaaacgcgggggaagtttgggcactaaattaaggatttaaaaaatgaaaatatttttaattgtctataattgcagccatctaatttaaaagcaaagaaattttagtcaagttaggaaccgaacatttttccacgaatatacgctcaattaaccattcttattttgctaaacttatta

SEQ ID NO: 27895 - DNA, 961 bp, Heterodera glycines
acttgcttttataactttatttatgtttactgcttacttccctagttaaatttccctgcatttccaatgcttttcctttcgtctctctgtgctaaattttgcttagtttatccactaatttctgtcttcgctttgctattgctttgccttctcttccttttactgaattttttccctgcaatgcctctgctgttaatcatatttatagcactatcagtgtcattcagtaattactctgtccattcattcatttgttaggtcaatgagcagggaactgaagcgaccgccgccacgggcattcgattggtgccattaataaatgccaaaaatagcccggctcgtttcattgcggatcgtcctttcttcgccgttgtcgttaacagtgatgcccttgccctttttggcacaattttccatggataattttgtcaagatcactacaatattttaataaagcatggaggaatgttaagtcgtatgtttttgcatttaaatcttctttatcgtcttttattaataattttcttttttgttcactttcattcaaatttcgcgagatattctatatttaccccccacaccccaaataagtcatttatcattctaaatttgaaaaaaaattaaaaagtgtcttgaattaaagccggtgattgacccactatccctcttgtgtattagacaataccatattattttatctgattaatcccttaattctgtgaagggttgtcccaattttatagatttgccaaaaaactcatcagaattttgcataaaaacaaccaacttaaatctttgtaatatagcagcagctcttggattgctttactagcagaaaaatttcagaatttattctgttttcaaaacaatgaaaaacaaaatgacattagcgagtgttttttgttaggccaatcactttcattttatttggcccaaatttggcacttaaacaaaacactgt

SEQ ID NO: 27896 - DNA, 1311 bp, Heterodera glycines
cattgttaaaacttaacaaagggatgaaaaatcgccaattccgcgcatttttgtgccgaattatttggcgatgccttttccaaaatgttccaaaaatgggaataatcctaaaagatttcaatgcttctgctgctgatcagcaaaagtgatctccccccccccccccaattgcccactttgtccagcaactgaagcagcagcgtgcaacagtttctgctggagaaaaaaggcggttgccattgcgacacaattttggccaccgatggcgtcactttcgccgtttgtttcgccactttcgttgttcgtagtttggtcagcttcacggtttaattgttcggcactttcgcggttcgtttcggcacttggcatccttttggctgtgccgtttcccgttttgctttccccgtcattgctttcgtccgaattgcccctgaatttgtcgtccattaataaaattattgtattggtgcgatattttttccttcgaaaatttgtctaacttcgtttgcttttgttttgtggtcgccagcagaagacggttgatactgtgctttgctgatcgactactgtaggcatttgaggcgggcgaagaaaacggaggagagagcgaatttggcatttgcttggacagtttctgagaaaagggcacaatttatggggggaaactattgaaaaacgaaataaatggaaaaattaaaattaaatagaaatatgaaatagtaaggataccataaaaaagtgttgtgaattggttttgctttgcttcaatattttgttaactttttgctgctacgacttggctcgagaattccgactttgttggccaaatgccgcaatcgaatggacttttgccccgtcccttccaatggctgccgccgactccgccccaaaggtggcgccgattggctgctgccctcgccagcggcggccgcgatgagcacgataatatcacggcatgccgaaatccttccccgcggcgggcacacatttcgccaaaggccacgcccactgtgaaggaatttggcacatttaccaagcattttacggaattatgctgctaaaagctttcatttttcgaatactgtgccgaaaaaagatgaaaaataatggcaaaggcaattaaaatcattgcaaaaataattttaaaaaatgtaaaatttgaatggaacgacagcgaaaagtcttccggcgccgaatttggccattgtcattgtgggcggacatcgccgcctcccccgaggcgaccgtctcaaatttcatgccttccccccccccccccccgcggcggcacaaaaatttgtttatccattc

SEQ ID NO: 27897 - DNA, 1376 bp, Heterodera glycines
  unsure (1)..(1376): unsure at all n locations
cccataaatattaaatcaatatacggtaatacccatcgagagtaccaatcttttgaaaaatgtttattttcaaaaatcatgaaaatatatttccaagggttttcagggccgctgatcacgaatatggcgtctatttcaccatttcctatctaggaacccgaattcgaacaaaaagtcgaagttcaaatgttttgaatttcgcatttttatataaaaataatttaaatgtttttttattgaagtgttttaaacaaattaaaaaatcaagaatccaagcctggatccaacctttgatgacaagcgaggatttttcatggacctggatttttgtcagaaaacggttctaggttcaacatgaaacccggtcaagggctgcttttaaaaacatataccaattctaataaaaataaaaccgcataactctggtttataaataaatttgtttttccttctacttttttgaatgattttgtgcttttttctagaaaaatgaggactgtcacttcactcaaacattcgtcaaagaaaagcgcactttgcaatatttggctgatgcaagggcattgtctccgggcggagacgtgtctgtacgcacatggaattaatgaacttcgactgtcgctgatcgaattagaaaacttcagcagcagcagcagtaacaaaaacaaagacaagtgagtctcgcatttttaaatagattcatcgcttttttcagtggatccaattgtcgctttttccagcggggtgaatgtttgagaggagacgaatgcaaatttgtgcatgaggtacaactggacgaaaaaagggagcaaagcggcgggtggggggcgaaggagggtgagggtgaaatgccgcatttgtcagacgccgtcttcgtcggagattgggaatggacaaagaccattttttggagatgaacatcggaagcaacacaaaaatgtgcgaaaatggaggggagctttgtcgagaagcagcagcaaccacgaggaggatgaggaggactcgctttcgaattggatggaaaaaattcgagtcggaggaggggcgagggaggcggacgagggacgaattgtccgactgatggtgttgaccttggacgtaaggccctaaagaacgtgacactaaaagagatttatttttagaaatcttccggcctcttttttaaaatcgctagaagcaaaccattgggtatgcttcgtctcaaaattgcagaacgtcttaatatcgaggtaatttaattggggtggtaaaatgttagcattanatatgcaataaaaatttaatattgttatattctcgagtacagcagaacgaaattggccttttgttcatgccaagatggtgacggacaatcaaacggccgacgaattggagct

SEQ ID NO: 27898 - DNA, 1233 bp, Heterodera glycines
gggagtagtgtagagtgtagagaaactacactggatacgctacgctagtgcatttgctacgctagctttcgaaaagggagtagtgtagagtgtagagaaactacactggatactctacgctagtgcagttgctacgctagctttcgacaaaaatgggagcggactgacggtttcgctgcccttttatagacttttctgtgggagtagtgtagagaaactacactggatactctacgctagtgcatttgctacgctagctttcgaaaagggagtagtgtagagtgtagagaaactacactggatactctacgctagtgcagttgctacgctagctttcgacaaaaatgggagcggactgacggtttcgctgcccttttatagacttttctgtgggagtagtgtagagaaactacactggatactctacgctagtgcagttgctacgctagctttcgaaaaaagtgggagcggattcacacagaaaatgtgtctctttatataggctcttagctgatgctagtgtagcatctctgaatttaaaacaaaattaaatttaatgtaaataattaatttatttcatattagttaaacaaaaacatttaaatgaattaaaagcatagaaaataatgataaaatgcaaagaaaaataatgtacaccgcccggcttcgaacttgccccccccccaaaaaatgatgcctcagaatccccaatcacacggggattctgaggccttaacgatgtcataactaaaatctgatttcatattcgttatcagcgacctaaaatagccctaaagacatgtttttagattatttttggtgaaaaaaattttcaacacaaaaatcatgtgcacccccctttggtcccgaatcccaaaatcacttttatttttgtatctttttaaaaaaaagtgataaaaataccaaataaaatttattttatagagaaaaaaattgcggatttaagtaatattttacttttcacgagtgacttttcagaaacgagttctgaatttttttctgaaaattcgaatttttccagaaattctggaatatcttttttatttttagagatgaaaataccaaataaatcccataaaattctcctgatttttctctatttttaaagctttaattcacttaaattgacaaatccttcaccgagttatgaattttcaaactttaacccaaaatcctgagggccaaaaatttcccaaaaaataaagaattttt

SEQ ID NO: 27899 - DNA, 1649 bp, Heterodera glycines
  unsure (1)..(1649): unsure at all n locations
ggcctggcaggtcaccaaatggtaaagtggccaattttataatgggcattccgtcctctcgtcgtgtcgtcggtcaactaattgaaccacgaattatatactatgtaaactgaataattaactatttgcttcgactcattatcagccaactaatttatgaattgttttataattataataattaacaattattcatttactttaatcaaaattcctttttttaaccatatattttatttttatcattattttaatataacatttctcttaattattcaatttgcatatttcttcattccttaattactctttatttttaattatgtctcataataattgattttttaaggtaaaatcttcgcaaatattttttgtttacagtaaagacattaacaaatgtataaacttttttttttctgttttcaaagaaaagtgattctcgagacaggtgcaaattttgtcatggcatgcccttttagggaccttaatttagtctctttgagaactaattaaatttccaattgattaccacttcctatttttatcgtttttaatgcaaataatttatctttctttatataattatttaaattacaaaaacaatctgtgcttaattaattctgaaaattcaaacggttttcatgactccagtcatctctctctatataaattcatcaaattaaatgaacattaaataatganaatttgtttgttctaacattttattaattcaaattcatttcaacaaacttttctcttgatatattttccactttttcttanattgaatttagtactttttaatatcaattttctttttgcctatttaatttaattaaataanatttttttttcgaatattttttctttttgatttttataattcataattatttccacatttgcgctgctctgctgcgtttgctcatcagcagcagcagcaacagaataaaatcattctgctgcgctcatcaatcattgtccgtgtgatcaaatttatttttcgccgctcatttcgccgaattgtaatttttgcgacattttttcgcatcgtttttccctgaaaaatcattcttcagagaaacgagtccttagaatgtgcgcacgagtgcaaaccaaacacaaagattaagcatcatgggaatatttcgccaaaaaaatgtcaaagaataaatgcaaatgccatttttagacacagtttttcattttttgaatccaacaccttaagacggcatattagcttaataaattaaacgaactcgaattccgttaaacatcagagccaccagggaacatttttcaaagaaaaaatttcgaacgaaaataaaaatgtaaaatgcccttttatcaccgacctctgttcctgcgcccgccgctattcaaaactcattttagtaagaaaaaaaattatgacgcaaaatatcgcggagggttcacgccaaacccaaagattaaacatcatcggcactaactgtgcacattcccgacaaccaaaaaagtgcaaatgccattttggcacttttgttgatcccttcaaatgccaaatccctgcccgcctgtgtatgtgttgttaaaccatgatacaaaataaaaatgtttgttaatcctcaccccccccccgccattctggctctaggaaaatccgacac

SEQ ID NO: 27900 - DNA, 1018 bp, Heterodera glycines
catgcataattttttatggattttaaattccttaaaatgtctattcagtcataatgaatttatatttgatagtcatcagaattctctattaaacattaaaatttaaaaaaaattcattgattttcaaaaaagttatggccaaaaattctgactcaagattttttgaaattttctgaccataactttttgatctttcaaagcctttcacgagtgataaacaccccaacctccaatccagtcgacaataattattatggaaaatgaattttaagctatataattcatgatcgatttgagtttttgagtgcgaacattctttataaaacaaaattttttgcatacaaatatttatattatttcaattatatatcttatgattcaaaacaataatgcattttattttcctcaattcgcatatatagttaatattatttgtatattttaattgaggtttataattgttatgagccttgatttatattcttgatatctaattcttataattgaatatattttgttttgtgaaagtcttcatttggttgtaaagtaataaattgtagaaaaaaaaaaaatttatttgaaatttaataaatcatttcaattactatttatcataataattgcatataaataggtatacttttttttctttatgacttgcgattattaaatgttttatttgaaattatatctcttaacatatcgattcttcctgatttattagcaaaaaaaaaccaaaaaaaattttaaaaaattatgtttgttaactgtggtaaaaatatataaagttttttcatttttaaattattgataaaataaaatatttgtgtattaattttttatttcctaattgtttaaaacaggcgtttatttttaaaataaatttagttaattattttcatttgaattgtaatttagctaacatttatttcatgacagcggatcatttttataaatcatgggtactcctaatatgtgccttacatttcttactttctttacaagtgattctattttt

SEQ ID NO: 27901 - DNA, 1242 bp, Heterodera glycines
  unsure (1)..(1242): unsure at all n locations
cagcttgctggctggcaggtcaagaaanattttcgattttacacccctaaattcgaaactttttctcacctattttcccatttttagcacctattttggggtttttttataacttaaaacctacctattttggcagtttttagcacctaaaaatcgcatccctagtgctaacatattttatgtgacaaaacgccaaaatatgtgtttttatgtttttataagtcgctctaaatcaaaaattgttcggagataatgctatttttgggcttctctcgccataactaagccgcaaaaaaaatatgtaaaaacataaaaatccgggccctattcattaattatcacattttccacacatatcaaccaaagtaccttatgctctgtaaaaaattataactccaacgatttttcttcatttcgactacttcccttgggcgaatctagctgaaatttttatcatgcatacatacctcgtaaatattaagaatcacatacataaaaaattggaaagtttacaagaaaaacatttggcgcaagtccagtttatgcgtccattcaattataaaatctaattaattgaattgcattgacagtgtttttttaatatatgagataatttagccttatctgctccaaagtatgttgaatatttttgtttttctatggtatctctgaaaagtgtgtatttaatgaaacaaatatatatgcagcatttcctcaatatgtactctgacgtggttttaccgcaaaataataacaaatttctatttctgtacgggtttttaagtacagactttctttttggcgttcacttagctgatattaatttattggacgcataaaatctgatctgatcggcgcataaaaattgatgggacgcacaaaagtcgattggacgcataaacttgacttgagccaaatataggaatttaaatttaaattttcgaattttgagttttgggtcgaactagatctaaatacattaaaatgaacttaaaagtcatcagtgcttcaataaaagatcgtttggtaatactttgctttgtaccacttagggaaggaacccgactttttgggattttaataaaacaaaaaattttaaaaattcacccaaaatcagacaaatttacgtctgctttagccacagttttaactatgtttccggactcatcgcaaggaggtagcagaattttgagcccatactaataaccacaacacaatagacaaatcacaatacatttttta

SEQ ID NO: 27902 - DNA, 1396 bp, Heterodera glycines
  unsure (1)..(1396): unsure at all n locations
taattggtctaattatgggcaattaaggaattgatggacncaagcaaaggcttttacaacagagaagaggaaaaattgacattggccattgatgtcacagtgaaagatgaaaaaatggacaaattcattttggaacaaagcaattccaatgggacaatttggatggacattgaaaaagtgtcggaatttgcacaagaagtcacttggagtgaacgtaaaagtgaagcggtgcacatcaacggattttcattgcgaatattagcacaaataagtccgaaaaatggaagcactggcaatgagaaattgttgggaatttaccttttgtgtgcttctccaacagaaggtgtaattaaaggctaattaatattaattaactaattaatttacattgagcagaaaattggagctttaagtgttcggcaatcattcgaattgtttcacaaaagtgcgttgtggcggatttaatgaccaaagttaatctacatattcgaaacaatgaacataatggccggggattacgcaatttcattacttttgcggtgagtgacaattgaacatattttccttaattgacgtaattatgggcaattaagcaattgttggacccgagaaaaggcttttacaacagagaagaggacaaagtgacattggccattgatgttactgtgaaagaagcaaaaaaggaagtagtagtgatgagagcatttttttagggcaaaaatgtacttactcatcactactagcggataaatcatagacaattttgcaatttactcattgaatctctcatttgtctaatattgctgttattcatattaaaaaaaatttttggttagactaattgtcctgttttttattctataggcaaacaattttttttaaattaaaaatattgactgagttgtgagtagttaacagcccgtgaccgtcgtagctaaacactaattagaaatgacaggtggcgggggaggggtgtcaattagtgactaattgactgaccggaaggggcactaattggtcagcggccaaaggagcgctaattaaattgtgggcctatgcaaaatttcaagaaaattaaacaataggaaaatttttttacagggacaaagtttttcctttaagtcggtttcaattcttaattttttcaatccctgatagccgaaatagcattaaaattaaaaaacatagtctgatagtttaatagagcattaattctgttgtttgaataattgctgattttttcaaaaactaactgatgatcaaattatcggtcataaatcatttaatatcatttagttaatgctatttagactaccagggatagaaaaactcaaatttgaacccgactttagacataggcgcaaatgtccgaggcgcaaatgcctggaaacgcttt

SEQ ID NO: 27903 - DNA, 713 bp, Heterodera glycines
ccagcccaagtttttgggttataactttttttcttgttaaccaaatccagcaatcttggtatcaatcgaaagcttaacatgtttagaagatatttctaagctattgcttcgcgattagacaattaccaaaaaagttataacatgaaattccaaaaaagtcgaaatttttgagtttttttcttaataacttttttagaagctaaaatttttgtttgttttttgtaaggctaatagagcttgtgaagggctttcgaatgataccaagattgttagatttggtcaacaagaaaaaaagttataataaaaaaactgaggctggcgccaaaacgtcggcgccaaaacgacccagtccccacttagggctatcgaatgataccaagaaaatttgatttggttgacaaagaaaaaagttagttcaaaaattcgccccacgcgaaaacgaacccgacccgaaatttacatacctactacattaaaccgctgcccgtcatttcgtcccgcgtcgtttcgtcccgcgtcgtttcgtcccgcgtcgtttcgtcccgcgtcgtttcgtcccgcgtcgtttcgtcccgcgtcgtttcgtcccctaagccaaaatgagtcgtttcgtccccaaattaaattcttttttaaaaggttagtgcttattttggcattttttagagcctaaaaatccgatccctagttaatgaattaataaaatactttat

SEQ ID NO: 27904 - DNA, 582 bp, Heterodera glycines
tccgccggggcccgtagaataagaaggtggttaaatgaccgggtcaaacgaccatggttatttgacctggtcaaatgaccacgaagttggtggtaaacccgtagaataagaaaatgaccacgaagtgccgtttttaccaccaacctccgtcaaacgaccatgaactatgatcttattctaccgggttatttgaccacgtgcacttttgggacaatttgtttacacattttttatggaaaaataacttttgttttttaggtctatcgcataacacatcattcctattgatcaatttttatgtttacccaaaatgttacatgtatttttgcaccgccaatatattatttatttgtgagttaaagacgaatgatcaactcataaaataataatattttataattaaatctaagatcacaaataaatttagaatgtcaatttttaccaaggaaatgtcaagcgctttagcgcaaaaagttcgcgacaattacgaagaattgtttccgcaaagcaaggaggcagcgttttcgcgccgttcgtaaaatgcttgggccaatttaacttcagaaattaatgccgaattcg

SEQ ID NO: 27905 - DNA, 975 bp, Heterodera glycines
tcgggggggggggggagtagggtgcggggtgcggggagacggggacggggaagcgtggacggggaggcgggggacggaaaagcggtgaatggaaatacgggggacagggaggcggatgcggaaagaaatttatactaattttatatatgtattttttaagtttgagtgttttcctgggggggggctgccgccccataaaatttctcaaaataagagatagtcattttcttggatataagataaatttaaaaattctctgagaaattaaatggcgattgcgcaccgccctccctctcacgctcgagcgcttttgtaacgtataaaatttctcaaaataagagatagtcatttttcttggatataagataaatttaaaaattctctgagaaattaaatggcgattgcgcaccgcccttcctatcaagctcgagagcatttgtaacgtataaaatttctcaaaataagagatagtcaatttcttggatataagataaatttaaaaattctctgagaaattaaatggcgattgcgcaccgccctccctctcacgctcgagcgcttttgtaacgtataaaatttctcaaaataagagatagtcatttttcttggatataagataaatttaaaaattctctgagaaattaaatggcgattgcgcaccgcccttcctatcaagctcgagagcatttgtaacgtataaaatttctcaaaataagagatagtcaatttcttggatataagataaatttaaaaattctctgagaaattaaatggcgattgcgcaccgccctccctctcacgctcgagcgcttttgtaacgtataaaatttctcaaaataagagatagtcatttttcttggatataagataaatttaaaaattctctgagaaattaaatggcgattgcgcaccgccctccctctcacgctcgagcgcttttgtaacgtataaaatttctcaaaataaagagatagt

SEQ ID NO: 27906 - DNA, 1848 bp, Heterodera glycines
  unsure (1)..(1848): unsure at all n locations
gcggtgcagataggcgccgccgggggaaaattaagaattttgaccatatttttagcagattttcattgaaaaaacattcttaattttgtgaattttcggaaaaaatggttattttctggttttggtacttttgcagtttccagcaggacagttttaaaacagattttcaaatgcctataaatgtattttagaaattaatgaaaataagttttaattggtctttgaggtcgctgatcacgaatacagcatcctttttgccaatttcgaacccctgacccgaacaaagataaaattagaaactttcgtatgtatgatatcctcattggcatcttgctcatgagggtactcttggtattggaagcctatcaattccttgtccctgtacagctcatgtagtgaacggtagcgctgacctgggcacggattcatgatcagcgaccctaaaaaccccttaaaacttattttctttaattttaaaaacacatttatgtataggcatttgaaaatctatgttaaaactgtccggtaaactgcaaaagtagcctggtttttatgaaaaatttaacaaaattttttggaaaagttggaagaaattttcgttttgacgctcttttaaaaacccaaattattaaaatgattgtcaaacattatgacaatttatcaaaattcataaaatttaacagattctgacgattttccctaaaggcctcaaaaatcctcaaaatttctcaaaaatccctcattttgaaaatttatcttcactgaatattaaaaaacaacaaaatgaggctaaagcctcagacctgggaaccctgattaataacaagctaattatgagcaactttctgtgattaaacattagggcttccattttttctaagaaactgctaatttttttttttgaatttggacctaattaaatttgttttacaataacaaacggacattctaaagacaattttttaaaatgaaatgatattgtttgacctcataaataattctttttaatttctaagattatgcactagttagttttttaatttcatttaatcgccatctctcagtttgatatatttctttaataaattagttgacattcttcctttaaaattaaagaagaatcggcacaaataataacccaatttgatatttaaatcaattagttgatcattaattaatcttctatatattattaataaaagtattaagctatttttcatcctcaacaaataattataaaactatggaaatttttgacgagtttaccatttccgatgaaaattcaatttcgttttttaccgactcaaaatttttaatggagtcttctttcgctgcaatgtaaaatttataaaaaaaatattatcctaattgtagaaaatacctaaaaaatattaaaatattttagcgaggccctgctcgacagtttttggctgaaattcaaagatgtgggaaacgttcttgaacaaaatgtgccattagcacaaatcattttatgggcgtgggacgacaacggggcacaagtcatcaaagaagtgattaccgaccaaaatgctgtttcacaaaattcttaatttagtcagtgatcctgaaaagcggcggaatggtttctttaccggtagatgcaatttcatcgccttcaattgtcgtccgttttctcaaaaaacgcgaagactcagaaaagtgaaaaatttacttcatttgtattttgggtttcccctaattttttcatttttctccagtccttgccctccgctgagttcgccaaccgatgatttgactgtgcatattggagaccggcagctaagaaagctgctaattgctctcttttatataagccaactnttataa

SEQ ID NO: 27907 - DNA, 922 bp, Heterodera glycines
  unsure (1)..(922): unsure at all n locations
aaatttactatttatgtatttanttcgtaaaaataaaaaagtcatcagaagggtgagaaccacttactctgacgactattcagtaaatgtgtcgtagagtaagttacaaaatatatggatgatcacaggaattaaaaaaagacaaaaatgtgaaaataattaaattaaaaattgaggtcagagtcaaatgaggtcgaaatataaaaataccaaatcacttacgacaattttaactcgaaaagtcctattacttaaaaagtcctttatccacaaaccgtcgagtgtaaaagaattttgttttttgtagtgtttttggaatagtcaatgtgaaaaattgcgctaaatgatcagaggaaaaaacaccaccttcaatagtacattgctttacaatttgatcattcgctgataaaactaagtctaaccacgaattttccctggtgggtccattcgtggcattgaaaaaggaaagtttactaaaaaagtggcaaaaattttcaccaaatttactcatagaaatgggctgccctccttccataccaggtctttacttgggaaattaaaatcacccaatacaacacaattattgctatagaatgtttctaaaaatttaaaaagttccttggtttgtctatatgttgtcttgggtggtcggtaaacaagcacaaatctgattgattttagtttttgtaattgaaaaaccaaaatttcgcaattatattttgtttcagaaaatttaataaaaaactcaatttctttcttaattaaaacaccgaaaccgcccccacgcgttaattttttgtgatttcctatgacaaaaataaaggttatagttttcgcttatcatggataaagaagggattgggttttcctccttgcccatgtttcagtaacagaaaaatttctatgttttatttaccaaatt

SEQ ID NO: 27908 - DNA, 1143 bp, Heterodera glycines
  unsure (1)..(1143): unsure at all n locations
ggtttggaccagttttgaccgggaaattcccggcgtttttcccggttttcccagccaaaaaatcccnggtttttgtcaaaattcctggtcccgctcaactctactttaaatacatattattaaatttcagtattttctaacaattactttctgattcgtagaccgattagtttgttttggaaagaatatcttttatcccccccccccgttttttgtgattttttcttataaataactcttctttcgacgaagagtgtcaattgcatttgtcttcttaatctgtgaaaatgtattggcaaatgaaaagagaaaatccaaaaatgagtgatgaaaaaattgcggaattttgcaaattagcagggatgcaaaaaacatgcaaatgcatattttttttcctggcttctccatgctctaaatagtaggaaaaacactttcttttttgtgtttgcgtataaaaatcgggacttttatttgcatatttttgcatatttcgaggtttttgtgcatatttatgcatatttcgccattttttggaaaatttgttaacaaaaatgcaataaaaacggaaaatatacccctaagaatcgaccgaaaatttttaaaaacacaccactaagaattggaaattttctcaaaaattcttcccccaaatttttttttcatgagaaaatgtttgatttaaaaaatgccaatatttgctaaagagaatttttttaaaagaaatgtagttggcaagtgcactagtaaaaaaaaaattttttttttttttgaatttgcacccctaattttcaatttttttagtgcatattttacgatttttgtgcatatttggtgcatattttgtgatttttgtgcatatttggtgcatattttgtgatttttgtgcatatttggtgaatattttgtgattattgtgcatatttggtgcatattttgtgatttttgtgcatatttggtgaatattttgtgatttttgtgcatattgaaaaaatattttgtgatttttgtgcatatttggtgcatattttgtgatttttgtgcatatttggagcgtttttaaaggnnnncccccnnnnnnnnnnnanacnnngcgaatctttgatgtatgtggtgcatattttgtgattttaatgcatatttggt

SEQ ID NO: 27909 - DNA, 1649 bp, Heterodera glycines
  unsure (1)..(1649): unsure at all n locations
gaaagaataggtaaatgataaaataaataataaataaaattatttntaagaacatggggactgtgtataatctccatttatttcaatttcttcacattgtgccgcaaaactagtaagttagactatgagacaatggaagattgaaaatatgggaatgggaaaaggcgaaggcaatctaattaaatttaatgataattaatgaaaatttattcaaattaactaaatacactaaaaaaaaacctgattttaggcttttagttttttttgtgccatacttaaaatttattgacaaaaaaaggcatcacagaagaggatgtaaccaatgcaaattgaaaaattaaagtttttaatatgaattgaaatttatttacataaaatcattgtgtgtttagcgcataagaacacaaaatatttgcaactaattattttttttaattaaattgtaaatttttcctctcacaacactcattaaagcaatttgtttcggtaatctccatattattatgttttctctattaaaaattaaatgtcatatttttatttccaatatcaaaaattcgtattttattttgaatttttataaataaaatctctttaaaaatattttttattgcatatgtttttcaaaataataaccatttggtgcgctttattatttttatcaccttatcagtgtcaatcaccgttttcgctttgttattttcgtgaaaaatggatgaaccgagaaaaggattgataataaaactccataaaattgtcgtgttatcagtgatagtaattttctaatcacaagtcattcaaaattgcttttcaccaccattttgaacggaataaattgtcattgccttgcattaatttgctcatttattcgtatttgggtgtcaatcttgggaaattttcatgtttattttaactttaaatctctgtgaagccatattattttttttttggaaatttaatcaaaatttgcaagttaattaaattgcaaacattatttgtcgttaattataaaaaaataataataaatttaaagatttttttaataactttaaaaatcaggcataatcaaacaaatatatttccgatttggcatattttttattttgaaaaagatagaattttcattaagaaaaactaaattttatttggcttttaaaaggcttgagaatgaaatttaagaatttaattcaaccaataaaatttaaaaataattcaaactatcattagcaagaacattatggtaaacaagtttttaccgctgatcattttcgtttttctgctgattgacaccgccatatgtcgccatcaccatcggcactcccatcatcaccatcaacaaaatgagcagccggagatgatcaggcaaatttctttgtttccataatttaattaattgaatatgtgtgtggtctttgaaaatttaaataaaatttttaatgacaacaatttaattgaaatcttagtgtaacattttgcattttgcttctacgaaagaatataatgacagtaaaatagttgagctaccgtacccaccttaaacatctgctgatctttcgggatttttcaagctaatcatagggtttatgttttgttaagagangtaaaaataattttatgtctataattagcnaaaaaaaattaatttcgga

SEQ ID NO: 27910 - DNA, 956 bp, Heterodera glycines
ccccgaaatttccgtaaatcgaaatccgatgccaatcattttccataaattgttaattggaatccgaggccccgaaatttccgtaaatcgaaatccgatgccaaaaattttccataaattgatcattggaatccgaggcccccaaatttccgtatcctgtgccaaaaattttccataaattgatcattggaatccgaggccccgaaatttccgtaaatcgaaatccgatgccaaaaattttccataaattgttaattggaatccgaagtccccaaaatttccgtaaatcgaaatccgatgccaaaaattttccataaattgatcattggaatccgaggccccgaaattttcgtaaatcgaaatccgatgccaaaaattttccataaattgttaattggaatccgaagtccccaaatttccgtaaatcgaaatccgatgccaaaaattttccataaattgatcattggaatccgaggccccgaaatttccgtaaatcgaaatccgatgccaaaaattttccataaattgttaattggaatccgaagtccccaaaatttccgtaaatcgaaatccgatgccaaaaattttccataaattgatcattggaatccgaggcccccaaatttccgtatcctgtgccaaaaattttccataaattgatcattggaatccgaagtccccaaaatttccgtaaatcgaaatccgatgccaaaaattttccataaattgatcattggaatccgaggccccgaaattgccgtaaatcgaaatccggtgccaaaaagtttccaaaattgatcattggaatccgaggccccaaaatttccgtaaatcgaaatccgatgccaaaaattttccataaattgatcattggaatccgaggcccccaaatttccgtatcctgtgacacaattttccatatattgatcattgtgatccgaggacccgaaatttcc

SEQ ID NO: 27911 - DNA, 1249 bp, Heterodera glycines
tcacaaatgcaatgaacgctgggtgtgaaaattgtcacattttccacgaatttgagcggggatgttttattcgcccattggagccgaacaagaagaaagaaacaaatgggtggcgccttgtcatcttcgacgttgaaacaatgcagcatgagcctgcggacccgcatttccctaaacgaaagaagcatcaagtgaattttgtcactgcaaaagtggcatgcccggattgcatttcgaccggaaaatggaaagaaagccttattggaaaattctgcaaaatttgcggctatcatccgacaataacattcagtcaaatgccgttccgtgagacaacggtcgacagacaaacaattgaccgccaccctcttgttgcattcgttaaatggcttctctacaaacttccaaatcaatacgaaacaattgcctattcccatttcggcggacgtttcgacatggtcttggtctttcgggaacttttcatggagggactgaacccctcaatgatcagaaagggaaaccgtctgttcgagatgagggtataattgtccatgcgttttttatttaataattttcccatctcaggtgaaaagcagaaagaacttaaacccgaatgtgacatttcgtgattcttggaatttgattccgggactgctcgcctcaatggtgcccatgttcggcttggacgtgcaggacaagcccttctttccacacatggccaacaaacctgacaattatgggtgcaaaattttaccggcgaaagcagattacctggccgacggaatgatcccagagaaacggaaacaatttgatcaatggtaccagcaaaacaaaaatattccgtttctgctggatgaagcattggcaaggtgaatatgaataaatcaattttgacaaaataataaaaaattaagctattgtaaaaatgatgtcgacattttaatggctggactcatcgcttttcgaggcgaatttttggagatgacaaaacgaccggcaggtctcgatggaaaagcagacagagcggcgtacaaaacagcgcataacggcattgaccctgttcgacattgcgtcacaattgcgtcagcctgcatgcgccattttcgaactaatcacctaaaacctggacatttggcacttgtgccagagaagggttacgacagctgtggagataatcagagtgaactggctctcaattttatgcagtggtaaggggaaaagcacagcgttcgaattcaaaatgcattctcgg

SEQ ID NO: 27912 - DNA, 1106 bp, Heterodera glycines
  unsure (1)..(1106): unsure at all n locations
gagtcgcgganaacgagaagggtacnggatgggcagacgcgcgcggaattcggcacggacgtaaaccgcgncnntaaaggcacaataaaaggggtggatgatcgaacaaggtttgaatccaaaacgcgcctctccgtccaaactgcctactcgcgcgggttgcaatccgtcggcgagcagtcgcgtcgtcaccgccggaaacgcttcgcggtagggcgagttcgcatgcgcgctctgtgcgccgacgaacagccgttccgcgacgagcaatgcggcggttgacgcgtccggcgcattcgctgccacggggatgtgctgccaagtgccggcgatggccgcgtgccgttggagtcgttccaacgagggcaattggcgaagttggcattcgcctaaaagcaaaaattgtgcaaaacattttcacaagcgctttccgtgctccccgaccttgtcttgtcgagccacagatgagcagagcatcggcaaaatgtgacgacgcattcagtggctgcacaattttgttccacgtgtccgtctccgcaattccgtcgcgtgggccaacgcacgaactgagttccgcgttgcagaacggacctttaggccatgtcatgtttttggttccaatttccatttcgactcactgtccaaaatgggcccggtcaccgcttcgtgcacaacactcaaattggccaactccaaaacgtacaaccgattgacggcgccgacaacaagctgaaaatgagttaatttgtctttcaaattcgccatgccaatttaagcttggtccgtgccaattcgttcagtttccttttgcccgtctcacccattcgccgtctccgctctctttaggcaccctcagaaattggttgacacggccatgcgccgcaaaggaggccaaagttcgggacggattggaacaactgaccaattaagggaggggggattaagggtggttttaaatggtaaaataccggcaaaagggaagcttttgctggagagaaaggagaaaaagcaaaaggaaaggccaatgaggggataaaaggcgaaaaaagtgccgaagggccatttaccgactcagttgtgcctgaggcaacgttcattggcactaa

SEQ ID NO: 27913 - DNA, 1950 bp, Heterodera glycines
gtggctgtgaggaagtgcacaacatacaggcacctccccccggattacggtaatcgtataccataccgatagtttaccttagaattacgataatcgtataccaattgactacggtggaattacgatactcgcataccgatcaaactcctaaaaatgtctggtttttttttctatgccaaatggccatccctgttattactatttattttgaattatacaaaacgtgccctctctttaagtttctacagtatgcataaaatacagtataacttccccgttttactgttgcagaaccatttgtactggcgccagaacagtcccgtgttgttgctgagcttgtacgcggttgtgtgcacgttcggcacggtggtcaatttgtttgtgctgttgtcatttgctcgggtttcgcaggtgggcaaaatgaccgattttttggattttttatttttaaaaatttaaaaaattattgcaaaattatttggcacaatttgtttttttatttaaaaatatttttctccaaatttcaaataattttaaattcaaaataaattattttaaaataattcaattatttaaataattaaattaattttttaataaattaaaacaaaaatttacaaataaaaaaatatttttaatttttttagcttcgcaatttgcacaattatttcatcgcaaatttggccgtctccgacctgcttctgtgcacagtgacagcaccaatgacactgtacttgtccatgaatttcttctggccatttgggacgccggcttgccaaattgtacgaccaatttttttcaaaaaatttttttgcgatttgtcccatcaaaaaatctcataaatttccccccccccctccaatgaggctaaatttaatggggacggacacaataaaaaaaaatgcacagctggcaattaaaaatgtccacatctgttgagatggcttttatggccaactttactgaaaaatggtgtccaaaaaattgtacaattttggagaaaatcggtgggatttttcattggtatttcaaaaaaaaaaaatttttttttgggattgaggaggagttttgtctcgctaatcaataagctaattgagggttgggcctgatcagaaccggtgattaggcttgatcagctcggtttcatttgatttttgattactgcttgatataaatgcatgatatcattgcttaatctcgatcagggccgatctgttttggttctttgatcaatcaatgctcgggtttgatcaggacgcaattgtttttctggtccctttattggttttgatcaagttcttaagcctgatcaattccagttttgttgtccaatcactttttccactgtccatcacagatttcttccatccaagcggtcaacatgttggtctcctgcctgacgcttgttttggtcagtcaatttttaattttgaccatttctgatcacttttcttgcttgtatttgtgaccgaagtgtgccccctgctctgatcacttttccattacgttaaatgatccgaaagactgatcgaagttcaaagcaaaaaaaaacaaatttcatttcaccattcatctctctttattgacttctgctgatcaccgtgatcactgctttgatcaaaatttcttgttcagatcgcaatggatcgcttcttgttaacactgttccccgtcaaatggtcagttggccaaggccaaaaattaaaaaaaaaataataattaattactagagctcgacctggacatggatccaggagttgttttttcctggatccaggtccaggtctaggacgttttctgcaacctggattttgctggacctggatttttgtccgggtccaggaaatccaggtccaggtcaaatatgaaaaaaaaccaggtcctgatccaggttaacacaaaaacctagggggcttgacaaaatttttgaacaaattttcaaaaaatgat

SEQ ID NO: 27914 - DNA, 1029 bp, Heterodera glycines
tttcatcatctctggcgataggaattgtgttctatagccttgtcaagatcgaagtttgggttgaccgaagtgagcatttatcgaacaagtgtacattaatttaaaattttactcgaggcacctcaactccgccgtgggattgggcgcgagtgcgtgacaaatattggaaatttccgacggttctgtaagtgcttaccatcagtcttacaattaggattttttcttatttatttttttatttctttcgcagctatgacccgaccggcattactcatgttcgactcagcccgatggagaaacttcaggaccaaatgctggaagctgctaaagaacgtggaacccgcgattctaagggctattgggttggaaaacaataggaaaatggatgtaatttgatgtgttaactgttctttagcttgtattctcatataatatatacgtggagtaaataaaagaagattttagcccgatgatgacagatttttaagagttttaggcaaaatttaaaaagggaggccaagggttgccggttagcgcaggcccgtaaccagggagcagttgcggctcctccccatcaccccaaattaaaaaatttgagaaaaatgggaaatttttaaaatttaccttatttaacaaatttgacccaaaattttctaaattttgtccggcggtgcctaatggcactgccgggtcccaagctttcatcggtgaccgatttgttgtgtccttcaaatgagaatttgtggggagggcataacccaaaaagtgccttcacaatggttgcctggcaacaattaaatgacttttactggtagacttttgctcttctctttcgtccgtctgcaagaagaaaaaagaaataattatggacggagttcgaacttcgcaagagagagatgaagaccactattccgggttcaatgactatgaccatgcctacgatttgttggaggctgcggggggacgaataaggggaagggtaatccatccaccgaatctttgcctttccttttcccgaaggatgtttac

SEQ ID NO: 27915 - DNA, 1995 bp, Heterodera glycines
cgattctctcatggtcagtgttaaattactttcccaatactttctaggaggtttaaatggggaataaaaattgatgcaatttcaggaaaactctctccaaatcccactgattggcagcggcacctttcgagctgtgccttctgctggttgagcatcgccagcgacttagccctgtggttgacttcgtcccccaacgattccatgtcggtcgtcgactgtctctccaacacttcaatttcggctaccaaatttttgcgggtcatttccaagtcgtccatttgcttaataatataaattaaactggtattaaatcaccaaatgggacgacctttcgtcgctcttcttccttcgcccgcatctccaccatttgttcctgcatcatctccaattgttgcatgctgttgatcagactctccacgcatttgctggtcacgagttgttcgccgtattccctctccaactttcggtcgttttgcctaacaaaataaatgaccaattacaaaaaccgaacgaatggacaactgacactgcttgatcatttttgcgacggatgtcctccacttcgacctccatgttggacagctcttcgatgatgcgttccggtgagttcacaatgttgttgtccaatcgcttgcggttttcctcttcctgggcaaacaatttcttgcattcgtcctataatttttattaaaaataagcgaaaaatcactaataatatgttaataaatccaaagtttttgacaattttccgcccctttttcagcatttcatttttcacttgcattttcgcactgtgcccccaacaaaattttgtcaatgcgttcgacatttcttttctcatcctccgctagcgcttgtcgatcgttcaatttgtccttgagtcgtcgcactttgctgcccatttcgtcatttcgcttctccatgcggttaagcgcttcttcgcgatctttcagttgctaaaagggaaaaactcttccgcgtataattaattacacatcatctcatacagcatgtgtggaacgttcacagttcttctcaaagtcatgcgctttcatttgttcatccttaaatttgtaaattccgactaaattagcccaattgataaactaaaactagtaaactccgccaaattatacactcacaatgtgattgtccaccgccgaaagctctttggcaatgtcacactttgtggtgtacaagcgaatcagttgagcaatttgcatcttcgttctgcaggggtccggttgaaatagatcggagtagagaaattcgttagaaccatcgaacaacttgttgtacaccaaattgctgaacaaattgtggatgcaatgtatataaaactatacgaaaatactaattgtaagatcaaaataacaaaaaccaacgtaccaatgctgttgcgttcggatgatcatctggggacgagccctcgtcagttcagtggccatttcatactcgttctctttggtggtgccgacattttcaaaaatcaaatcacacagaaagtagtaggcctggatcaactgatcggacggctgaataaaaaaaaataaaattcaaacgatcataaagtcaaaaacctgtgaattgtcaagcaattcctgcgttactccaatctctttagcctcacggttgaagaattcgagaataaaacgagagtcgggtccagccatttaatactcttaagttaatttggtaattattacttaggcttattttattgtaagagttgcttttttacgggttgctattgactcaacgaaggaaagatttttttaaatatctttttttaagtggtagtgctacgcgtaaaagtcgattggacgcgtaaactgcattagagccgtagctgctacctaatcttatataataaagttgattgtttgtggctatgtaacatggtttgaatgtggcgttttgtatttgctgtgaggagagattgaaaagaaaaagagatgaaaagaaatagtttgaaaaagaagaaggtaaaagaaa

SEQ ID NO: 27916 - DNA, 1080 bp, Heterodera glycines
tttttaaatttattctctatgccagaaaaatggctatctcttttttgcgagaaattttgtaccatacaaatgttcccagcatgggcagaggggcgcggagagcaatggccattctattctacagggaatttttaaatttattctctatgccagaaaaatggctatctcttttttgcgagaaatttttcccagcatgggcagaggggcgcggagagcaatggccattctattctacagggaatttttaaatttattctctatgccagaaaaatggctatctcttttttgcgagaaattttgtaccatacaaatgttcccagcatgggcagaggggcgcggagagcaatggccattctattctacagggaatttttaaatttattctctatgccagaaaaatggctctcttttttgcgagaaattttgtaccatacaaatgttcccagcgtgggcagaggggcgcggagagcaatggccattctattctacagggaatttttaaatttattctctatgccagaaaaatggctatctcttttttgcgagaaattttgtaccatacaaatgttcccagcatgggcagaggggcgcggagagcaatggccattctattctacagggaatttttaaatttattctctatgccagaaaaatggctatctcttttttgcgagaaattttgtaccatacaaatgttcccagcatgggcagaggggcgcggagagcaatggccattctattctacagggaatttttaaatttattctctatgccagaaaaatggctctcttttttgcgagaaattttgtaccatacaaatgttcccagcgtgggcagaggggcgcggagagcaatggccattctattctacagggaatttttaaatttattctctatgccagaaaaatggctatctcttttttgcgagaaattttgtaccatacaaatgttcccagcatgggcagaggggcgcggagagcaatggccattctattctacagggaattttttaatttattctctatgccaaaaaaagggctctcttttttacgagaaattttgtaccatacaaatgttccc

SEQ ID NO: 27917 - DNA, 1051 bp, Heterodera glycines
  unsure (1)..(1051): unsure at all n locations
aagggattatcggatggcggaattggttgtgccnnccgagtcaaattggattggttgtctgtggcatttgctggcgtgtaaaacgttttcccccttcccccccccccccccgggctaattttcaaattttgtcagtctttgctgtccattgtaatcaatcccaggggattgactctcgcctctggtctgatttgtcacatcccttttttgcggtgtgtcaatttgtgctccgccatttcagtcaccgccaccacttccgccactgtccgccgttatgcgttctttcatttcaccgccgctcaaaggaaaacagccgaaagagtacggcacgcttaaaagggacggacggagcagcaaatttaccattgtgcgactaacaacagttgccttcattgtacaacaggtgggacattaattaattaattgtatggaaaaacaaaggacagacaaaggggccgattgaccattaaaagcaaatggacactaaaagggcaattaaccgggaaggaattgggggaattcggttgaacttttgaaatttttgagactgcttatgcacccctcccgttattgttcttcgattttgttgttttgtcaaaaatggcactgtgtgttgtgtaacgattgttgtgccaatttggccaaagtcagattcaaaatttctaattgaccctcctttgctttttgccattcttctttgtttgcctccctccccataaatcatttgttaattaattaattattcccctttttgattttccgtgcctttttaccattttttttttgtactttgccaaaacaaatgctgccaattctcttaattgttaggctgaacaacaaacatttgccatttccgcccttttggcattttgaaaaatttcccctcgggggggggggggggggggggctgtttcccgccaataattattgtgcgctaaatggcagccatccaacggcggatttatcggataattaacacaaaatggcactgctggtgctgctgttgtacaaacggaacataaaaatagggtaataataaaaatcataataa

SEQ ID NO: 27918 - DNA, 1383 bp, Heterodera glycines
  unsure (1)..(1383): unsure at all n locations
gaatctatatttggatgttcacgctaaaaatccctattttgagtgtttgcccctaaaataatttttttccccttattttggcatttctcttaaaatgggtcaaatcaaaaaattaatgtgtttgtgcacatctacaaactcttggctttcgaatgacccagggttgtttgggtccggacccgggaagtgccctaaaaagggaggacaagcgacaagcactttggtcgcgatttctgtgtgtcattggttcgatttcttatttttgttttctgttcacttttgttttccgttcaccttttttgtttgccatttttaattttatttatatcgatggtgaaatttgggtgatgcaaatgtacgaaaatggcccttaagaaatgggccgttaatgtacgggacacaaaagtcgggccgtaaatgtcgggcgccgcaaatgtccgattttggcttgggacgaaaaattcaatcctttttgcgtagttcaagtcctgaaagtggttatgagtgtctttgcgattgatatacatttcgtccatttttggctctggactatatgaacgatatatgccaaatcacgcgagctatttattaattagcaaactaattaaggaattggtacaagtggctaatgagttggacaacgaggaggacacattgacattggaagccgacattcagatcaccaattaaccaagagatgaaaacaaaatatcatgtttgttttatcatttgataaggtaataaacaacatttgcgctattttcttattccattctttcattttttctcatttgttaatgcacataaaccagtgccctactggcattaaaagtgatttgttttaatttatttttaaaattgaaatagcttcgctatttgcactgtctctagagggcgctccgttccaaatatcttttttaataaatttaattaatgaaaaaactaaaataaaataaataaaattaaaaatggcaaacaaaaaaggtgaacggaaaacaaaagtgaacagaaaacaaaaataagaaatcgaaccaatgacaccacataaccaaaggcagacacactaaccacttgactattggtccgcttccacacctcccttacaaattaattanattntctttcttttttggagaaattgngaccanagtgcttgtcgcttgtcctcccttattagggcactttcccggtccgggacccaacaaccctgggtcattcgaaagccaagagtttgtagatgtgcacaaacacattaatttttntgattgacccattttaangagaaatgccaaaataagggngaaaaattattttagggggcagcactcaanatagggatttttagcgtgaacatccaaatatagattcctgaaataaatctat

SEQ ID NO: 27919 - DNA, 864 bp, Heterodera glycines
aaaaatattagccctattaatatatctcaactttctattcacattctgaaatttaaaaaaaatatttgggtccaaaaatatttgagacggaaccggcccttttagtactaagacggaactggcgagacggaactgacccctactgcaaggcactgccattgcgttttcaccgtccaattcgctcaaatcgtccgcaaaattatttacaaaaaaataattcaatatcgctcccatgccagccccgaaaatgctaaatcgtaggaccatcgctgtcttctgaggttgcattcaaaatcttttaaaaacccagctcggaaaaaaggctacaagggtcggttggtactgatacagtcagtaacataacaaacattctctgaaactggcagattttgttcggggcattccgagaccacccaaatttcaaacagaaatttttcaagcaaaagcgattttttgaaaaaaaatgtttttgtttaaatttttgctaagaaaaaacacagaaaaatttaaatgaggctagttgaaacgtaaaacccaattttacatatatggccaaatcgtactgttttacgtgggaatatgcatttgtaaacattagacagtttatgtgcatatgcaatacgaatttggggttcagaatggtctcgacggaggaaaacaagcgaaactgagctgtacagttggttaaaaatgggttttggaggcatgggttgaaatcaacttgctgtaaaataaaatttattttgggcttccaaaaaaaggaaatttgtgattataacagagaagtgggtttgaacccgtttctacacagcccattttaaaccaccttttacccaaaaacgggagtaaaaatgcactggtaag

SEQ ID NO: 27920 - DNA, 1678 bp, Heterodera glycines
aaaaccacaaagattagttttagcgatttggtgcctttttggcgttttttcccgaaaaattccattaaaaattcaaaaaaatcgaaaaaatacacccctagatctaaattcaaagaatatacctttatgaattgaacgccaaaattcatttttttttcttgataaaaaattttaggtttaaaaatttccttattgaaaaacattataaaattgaattatcaataaatcagcaaaatttagtttttggttagtttttacgtgttttgctccctaaaaatcattaataaaaaaatttaaatgccttttttcatgcctttttcgggatttttgtgcctttttcaatgctattttgcgctttttggtgccttaattgtgagctcaagccataactttagggccggcggtgctgataagagacgccggaaaatttttttgtaatgttaatactatttgttaacagattttgtctaaaaataccaaaatttgagattttggctaattttttaagaaaagagctttttgggcgggcggcggagccgataggcgccgccagacgaaaattttaataatttttagtgaattttgtgaaaaaaatggccaactgattgtgtcaaaaaagtcgcgctattgattcggacttgaaaaatttcggagaatccgtccattctttacactttgaaaacccagcgaatcctttctctaatatcaaactgttgctctcctgataggaataaatggccttgaatagaattttcactccaaatatagacaggagaatttgtgagaattgaatcgcttcattacaatttgaaaaccgagcgaatcattccaaaaaattcctaattgttgctcacctgataggaattaaattgccttgaatagaatttttcacttccaaatataaacaggagaatttggtgagaatttaatcccttcattacaatttgtacaccgagcgaatcattccaaaaaattcgtaattgttgctcacctgataggaattaaatggccttgaatagaattttttcacttccaaatatgaacaggagaatttggtgagaattcaatcccttcattacaatttgaaaaccgagcgaatcaatgcaaaaaaattcgtaattgttgctcacctgataggaattaaattgccttgaatagaattttttcacttccaaatatgaacaggagaatttggtgagaattcaatcccttcattacaatttgaaaaccgagcgaatcaatgcaaaaaaattcgtaattgttgctcacctgataggaattaaattgccttgaatagaatttttcacttccaaatataaacaggagaatttggtgagaatttaatcgcttcattacaatttgaaaaccgagcgaatcattccaaaaaattcgtaattgttgctcacctgataggaattaaatggccttgaatagaaatttttcacttccaaatatgaacaggagaatttggtgagaattcaatcccttcattacaatttgaaaaccgagtgaatcaatgcaaaaaaattcgtaattgttgctcacctgataggaattaaattgccttgaatagaattttttcacttccaaatatgaacaggagaatttggtgagaattcaatcccttcattacaaaagagaaccgagcgaatcaatgcaaaaaaattcgtaattgttg

SEQ ID NO: 27921 - DNA, 1213 bp, Heterodera glycines
  unsure (1)..(1213): unsure at all n locations
tccaactttcgcgcaatgtccagcgccaatccagtccattaaagacanctttcttcacatacattttcaaacctataacctcaaaatggtatttgggtgcacccacgaccggtgaaattaacacaaagtcgttgtcgttgggcaaaatttcaatgtccaattcacaaaaattgatcagatacaacggctgattgaataggtcggtgtcaatttttgcaatgaattgagctacgttgctacccgcaaataaatcgcgtcgcgctgtgcatccgcctcccatctccaatgtatcgcccgtgtcccggtagtacccggttgcattcagatgggagtcttttgcggtcgttgaataggagagttcatgtgagaaatatgatttgtaggccatcagggcatttgcattaaaaatttcgcgcccattgatactcatttttatgttacggatgaaggttgtccgatcatttgaattggtgcaatatttatgtcatcaatgtctaggttaacgagttgactattaacgttttccttacggattagaaactcggtgagcaaatagcattggagaggtcaatataattttgactggagtgaagtttgaagtggtagggtgtgtcggtaagcggattgctgggcagaatctcgaatacctttgaagatgagacgctcacatttgtcgggggtatacggaaaaagtcaagagcattggtgattgagttcactgagtcgttgtcgattttgggaaatgtcatttatttagtaaagtccaaaggcgtccgatcgaatacgctatgccggcgacatcaaatgatgcttcttcaggcaactttttttgtttgattttgattatcaattgacattatttacagtatgatcactttaaaggtgctcgtcaacaaaactttcaagaagaattttttgaagttaaattcaaaaagttcatgaaagagaaattggatgaggcgaagctctgcgcggaatttgcgctcaatgcggctgagcgcaaaatgcgggagcagatggatgctcagatgcaggtggagcgtgagcataaccgccaaaatttgaagacggcaatggaggagcagaatgcgcggtgccgtcgacttgcccttcaaagcttccgcactgcaaaagaaatggtggagaagaaaatggactcctcccaaattcttcattctccaccacaactgcttcttctgctgctgctaccatt

SEQ ID NO: 27922 - DNA, 1262 bp, Heterodera glycines
gctttccggaaggccaaggaaaaccagtgtgcggtgtcgttcttgttctgtgagtgcaacagtgtttgggtccaggtcctgtgcaggtgccattgaacgtttggcgcgaggcggagtgatgtttgttgcgtttgttcgcttcatgtcgaattagaaaataatattttttgcgatcttaatcggactatcacttaattggacaatttcttgtcgattaaaatttcggtgaagcaaaaccaaatggatttggattcaggaaacgcacccattcagagttttttgaaatcgttgttttttcgggatatattatcaaacaatacccgggttaggatatggaggatggaagcaaaaataacaaagacaagattccgtgttcaattttcgcataaaatatttctaaaaattcgtcattcctggctaattaaaaaaaacagaagcctggttccattctcgacatagaatatttttaaaactgcgttatccctggctaattaaaaataaacaaattcccattttaaagaaggcgatgatcagtcgcgacagcgacgcgttcgccgccgtcgcaaaaagcgtgacctatcgaaccgggcaattgtcaccattgttgcggtcgtaatattgtgcctgttgttctgcgtggtgtacagcttctgctggcgaccatcgtgcgctgactgctgcgatggtggcagcgcttcaagcggaaataaaagtgcccaaaaaagtggtgtcagaagtggtggcgctagcagcagtgggagcaacacaaatgatggcaacttgaacaaaccatggttatcgatcgacttcaaaaccaacgacaattactccatatggaatccaatgcattattttccggacaaataatgggagaaatgtttgtacagaatgccaaaaaatgtgggacttatttgataaattattgaataaaattttaaaatttctgaaactcatattgcaaacactcaactattttgtgacgacacttttatgaataaatactttgatgaacagataaaaatgttttctattaaaataaaattgatcctttattgacatccaggttaattgaattaaaattttgataagataacataaacagaatatttgtctaattagatgacttagttgtagtaaataggaaataaaagtttaattaataattagggcttggatctttgcggatagcatttgatgagagaagcacgaaaatcatcacattttctccaaccaattttttgaattataatttttagtagcaa

SEQ ID NO: 27923 - DNA, 2120 bp, Heterodera glycines
ttcccgggtttgggtacaatcaccagcggtgttgccctttcagaagttgtcacttgctccaacactccatctttgacccacttgtcgatgaccttctccacttcgggtctcaatgcaaaaggcacgggacgcggtttgcacttcttcgattgcacttccggcttaaatttcagcgaaatttgccttgtgcatcgaccgagtccgtcattgaagacctcgccgtacttcagaagcaccgctccaagctctcggttcactgccttgctattgacctcgttgactgatcggatcccgaacgctttgttgagatcgatttgtaattcaccaatcaaatctctcccacacaaattttttccttcgccgtccacgacataaatttcggcattcacttctttgccgttgtacaccacatccgttttgaacgatccaaggactttgatcggcttttttccatatgccatcaatcctgaagtttgtccaagtttcggccttccgatggacatccaatcattcttggtgatgagtgtgacatctgcgccacagtccaattcgaaatctgtcgcctttttactcagctgaagctttatcatcgctggtggcacagaaatcgatttgacttcttcagacttggccagtgttccaatgtcgtgtgctttttggcactcagtgttgacctggtttactggcttcccttgcctccttggccaattggagccctgttttgtcttacatatcacagcccagtgtccaacattgccacactcactttcggcattttgagtccttgttcgggcattcgtttttgcggtggccattcctcccgcatcgatggcattgcatttgctgcgttggtgtgctactctttctttctccctttggagcgaagactttagccacttcggctttcttatgcccaccgatttgctctgcatccaattcggactgctcgagaatcactgccgtttcaacggcatctttgaacttcatttcgttcactcccttctttatcaactcggcccgaattgaatcttttttaaggccgttgatgaaaagagcgctcaggcacatgtccactgaatccttatgccattctgccttggcaattaaggtccgaagttggattgaatagtcccgaatggacagtcctgatgtctgtttggccgaaaacagctcaaacctttttgccgcaatcgtcttcgtctcaccaaatcgttcttccatcagcgctttgatctacacaattggcatgtcgcggacgtcgtctggcaacgcgatttggcgaagctctcatagattggcccaatctccgaaaagaagagcaattttttggtctcgaaatcggtgatgcctcgaagtttgatgaagaattcgaatgtttcttcccaaattgtccatgatgtttcagatgtgtaaggacctggtccgttgccagcctttacaactgctgccattgttgcactcttcttaatttgtccaactcggatcaaatttaagatgatggtcaactgttatccaactgggattaacagtgattgtcaattgttatccgaatcggattaacaatgaaaatggatgatggatgttcactgttattcaactcgaattaacagcgattgcaattgttatccgtcccggattaacaattgaatgttgaaattctccaaattcggcgattggtcgctggctgctatccaactcggattaacaccagtatatgagaattgccaccactgggtgcgcagctattccaactgggaattagctttattctctgacgatttggaaattgctattccaaatcggaattagcaattccaattgctgtttgttgcttcttcctctccgcttttatttcgctcgtctgcatttgctgactgcgccaataactgttgtcgaggggagagagcggggtcacaataatattggaaatacaacaaatgaaaaagcgaggggagagagcggggtcacaataatattggaaatacaacaaatgaaatgaggaagaaatgcacggatgggggaaaagggcgggtttaaatggactgaacgaaggggtcaaaataatgatcgataaacgagcatcttttggcgttaattcaaataattaacgaacacaacaa

SEQ ID NO: 27924 - DNA, 995 bp, Heterodera glycines
gtcgatttcaccaacatcgagggataccatgtcgtgttggtactgtatgggttggcattgcgttggcttctcgtccgccccccccctttccctgaacattcatttaaaacgcgtaatttccttcagatcgcttctatgcccgccttgttctacaccattttggttatgatggaccagcaaatcacagcagtgatcatcaatcggaaggacaacaaattgaaggtgggcgaagagaaatgccaatcttttgctgattgattgccattcggtgccaactcagaaaggctgcggatatcacttggatttgctgattatcaggtgggttgactattgatcagaacgaccagcagctgatcttccgctgattgatcacttcagtttgctcgtcctcatctgttcctttcttggccttcccttttacgttgccgccactgtgctcagtgtgatgcatgtggaggtgaaattaatcaatgaaccaattcatttgctaatcgctgagtgattgccaatttgagtctctcaaagaaaacggcgattgtacggtgcccggggaacgacaaaagttgcttggtgttaagtgagccgtttacaatgatcaatctgctaaatggacaattaatcccaatttccaaatccccccccccccagggaacagcgattgtccgccattctctcccacatttttatcggctgttcagtgtttctgacccctcttgtcaaagtctgttcttccatagccacctttgtttcccaactttgcttttaaaaggtcgtgcctttgcccgtcctcaccggcattttcctttatatgggcgtcgtttctctcatcggccaacaatttgtccaacgcatcgctttgctttttatgccggtcaaataccaagtgaaaaagcaataaaagagtgtttgagcaataaacaaataattaagccggattacgtgtggctgagaaatgtgccgaccaaacgcattcacacattcacaatggttttaac

SEQ ID NO: 27925 - DNA, 1348 bp, Heterodera glycines
aaaataaaatttttaaatttatttttcgtcgggaccgcaattctgcagcgttaccagggagtccgtcggtgtcttagaaataagcacacttgggagtcctggcttaaacaaatttttattaaaaattaatttgattccttgatgcagtaatttgcacctatcgatttgtctcaataaattaatggccatctaaattaattccttaatttaacttttatagtacgatgagcttgtttaatacacttaaattctttattcatttgtaaacataatacaaatacacttatttaaattggaattcatcagtgagaagtcagtggaaatttgcaaaaaattcattctgttagaggaaatagcccagcaaatgcgcagcacccaaaatgcgtttttcaccctcaatcacacgcaaaagttcgcagaagcatggccgatcggtggggttggaggacaaagcgcgcggtacaatttcactgaaaaaaagaatttgcaatgatttaaaaatcattttaaaattttgattgatgtcgaaaatgtcaaaatcaaactttttcgttttgttttccctggcaaattatcctaaaacttcttggttttgttttggtcaattgtataaaatgatggcaaaacgcacgccaatgtttcgggagctgacggaagaaaagcgaacgcctttagaaagagcattttttgacgacgtctgaagagcataaaacatagtaaatgcaattttaatatcacagtaaataatgtttttatttcattgctttaaaattgctaattggcatccgaaatatttctgaaaaatgtttgtttttttgtgagttttgcgccgatttcattgcctcaacaattttgcattttaaattgaatcagcaaataatttcgcactgttcgggcatgcccaactgcgcctgtcgtcgagtcaaatggcccggcatgaaaaaagagtcgtcaattgcggcggacagtgaaaggaactcggcaagagacgaataactgacaatgaaagtgggaaaatgaaaaaacaatgcccagcagccaaaaaatgactgacaaaattcggtttccgaattggcaatgcgtgtaaatttgccacaccaaaagagcgaaagaccacacttgggaagcactgaaagaaaaagcaaatttaaaacaaatgctaattagagttagcaataacacgcggcgaaaagcgtgtcataaaataatatgctgaaaaaacggccaaaaattttgagtttttttttcttttcaataaaacaaattaatcaaacaaattgtgggtggtgacctgtcaaatttggactaaattaacgtctcagtgggaagatatctgaaaagggagaga

SEQ ID NO: 27926 - DNA, 1488 bp, Heterodera glycines
  unsure (1)..(1488): unsure at all n locations
ggggggcttccccgaaaacccaaaaaaaaattttttggataaaaattatttaaataaactgactagataatatttaaaataggttatttctcttcctttcagtatccctgcaaagtttgctgcgcttctgatcagtttctgaaaaaaagttaagcctaacatcggttcagggggactgccccgaaaacccaaaaaaaaattttttggataaaaattatttaaaaaaactgactagataatatttaaaataggttatttctcttcctttcagtatccctgcaaagtttgctgcgcttctgatcagtttctgaaaaaaagttaagcctaacatcggttcagggggactgccccgaaaacccaaaaaaaaattttttggataaaaattatttaaaaaaactgactagataatatttaaaataggttatttctcttcctttcagtatccctgcaaagtttggggcgcttctgataagtttctgaaaaaaaagttaagcctaaactttttgccctgtttaaaaaggaattaaaaatttttaaaaattttattcatctccctttttgatagaaaaagcatcagagtgcctaaactaacatgtaaataaaatttggtgcgtttcagaaccctttctgtaaaaatacttatgaattaattttgcaaaaaaataaataattaatgaaaaactcagaatttctaaaaattttgaaaaccaattatgggccagattttttcaggttaagttagtccttttacagaggagtacgcctgtaaaatttggtgagtttatattgattttagagtgcgctagattcaatgaaactttttaaaatttaagcctaaactttttgccctgtttaaaaaggaattaaaaatttttaaaaattttattcatctccctttttgatagaaaaagcatcagagtgcctaaactagcatgtaaataaaatttggtgcgtttcagaaccctttctgtaaaaatacttatgaattaattttgcaaaaataaataaataatgaaccctcctccttaataattttcctgcgcccaaggtactcactcggccgcttgttgcttaacttgtcagatcggacgggtacgcatgattccaattttccaagcaccccaccgaaagtagaacgaaataaccaaaatataaggaaaatatttttaaaagatgttattcatctcccttttgatagaaaaagcatcagagagccttatttaacttttaattaacatttggtgcgtttcagagcacgttctaaaaaatatttatgaattaattttgcaaaataataaataattaatgaaaaagtcagaatttcgaaaaattttaaaaacaacaagcgttggcattttttcaggttaagttagtcctttacaatggagaaggcctgcaaaatttggagagattatatcgattttagcgcgctaggttcgatgaaactttttaaaatatgagcctaaactttttggnctgtttaaaaag

SEQ ID NO: 27927 - DNA, 1878 bp, Heterodera glycines
ccattgtaacttttatttttttaaaatttatcccaccgaaaatttccgaaaaaaagaaaatggttgggatttaatgttcccactttttgtattcctccacaaatgtgttgatatcgtccgaagtgagatcggcacgtttgaactgatcaatcagtgactgtttgtacaggttgcccatcacaccaatttgactgcccattacacctgcttgactgcacacattcacaattctgacacatacaaaaaaatacattggcaaatttattaggctgcctaattatgtattattgtcatccattaacggcacttcttcgtcattcgtcatgccaaattttcggcaatggtaaagaattgcggtccctaacggaaaagtgccgtcaattgcgccccttcccctcaccttcccccgtctctgatcagtgggcccagctgatcactgatcaatttggtaccataataattgacaccaatcgtaacatcggcttggattgcggccgattctgtcgcattttgctgcagttttaagaggcaaaattttgccacccttaaatcctaaatccaaaaatgccgactttgtacgcaaagccggcattgttgatgagcacgtccaatccgccgtgggttttcttcaaaaatgccgcaaaatcggcacaacttttctcatcagtgatgtccaactgatgaaatgccaattttgaaatgcgttttgtgcccaattccttctccaagtcatccaatgccttttcgcccagtgaaggcgttcgtgctgaaagtcaaaatatttaaattaaaaaaataaaataaaataaatagtgcacgggacaaaatcgcgccaccaattcaaactttaatttttcaaaaatatcagaattttttttgtaagaaaattttaaattttttagcaatattttcaaagttttattatttattattattatatattttttaaatttttctaaaaaaagctagcaaaattttcataatttcgaagtttgaaatttgaaaaaaattatatggttttattcttgaaaaatttcagttatggaattttttatataaatttcggcagcgaggttttgggggtgcacccataaaaaatgacccgtcatgtaaatggtggcaccattcacttgttgggccaacccacgcgcaatgccgtaaccaatgcccttgtttgcgccagtgacctaaatttttaatatttaaaattattttacataaaaaattctttcatttaccacaaaaattttcccggccatttctttgtttgctttttttctgtggtaaaataaagtaatttcctaaattaaaaaaaataattagttaattgaaaataaaataaattttattaaaaccatttttatgaaaaagaataaaataattatttttttttaaataaaatttatttttattgaaattcattttacgaaaatggtgaatgaataaaattaatggcaaaatcattctccgttaactcgccttaaaaaggcagaaaaatataaaatacaaaacaaggacagaaaaaaaacaaactatgtacatattttattgggtaattttgtcaaatgatcaaattaacgatgattttgtgatctgaaaacttttttattttcaattgcattaaattcaaaatttattttaccacaaagaatttccaatcattgtattctctgtgatagaaataaaagaaagaaaaaagagataagaaaatattataagaaaaaaataataataaaactatttttgaaaataaaaatttttctaaataatacagtttttgatactctgaaatattcttcacaaatcatagaataaaatacaaaacagaatgccaaagaataaaacaaatcatcaccaaatcagtagaaaatgaaataa

SEQ ID NO: 27928 - DNA, 1194 bp, Heterodera glycines
tcagagatttgttatttgtattcgaaattggcaaaacgtttcctttctttgtgctgcttgacgccaatgataaggtaagaaatatttataaaaattaaaaatttattcaattttaatttcaatccaaagattgccctgtgcagtaatattgcgatgccattgtattcactgttcaaaaatttctactcagtccaacaaaattgtgacatcgtttgtaatccttctggggtgcttaccataaatatctttgcaaatacatattacaatgaagatccagtgtaagtataaatggtatcggataggcggaagcattttgctttaataaagcaatcaatttaattttttgtattttctaaaaaatttggttcttaaaacattttttaaaccattcttcccggataaaattataaaatcgtttgactgaaatccctgttctttttggccaaaattagtttttatctccatccgttttattaagagtgaagaaaaaaccactaaaacttcattttataaaattgaaacaaaattaccaaatttatcaatttatgaacattttttaaattaatttattttcaatattttttcaacagcgcctatcggcaggtgggtgaggctaatcctcccatcttaggactttatttaaaatattttggtgcattataagtcaaactatttgaaaaacccaaatataaaattataaataaatgaaataacatttaattgcagtgccatgggaatgggtgacacattgttgtgcaaagccatagaaccattccgccgtttaaaactgagcaccgaagaatttgtacttattcgagcaatcatttactccaatatgggttagaagttttttataaaaaatttctacaagaaaatttatataattaatgacaaattcaattaaatttttagtttcgccagggcttagtgaccaggcacagaaattattattatctgaagcggagaaatattcttcacagttaatgagcattgtacaggtagctttctttcttttttgcaattggttctcttgacttatacgatgtttttttctcgaggaccaatctcgacgaatatggtacaaatcgatagctctcgatgagacagatcgatctaggggtgggggatgttgatccgacaagtaaaaccggagaagactcgaaaattgagagatttggcactataacttttttt

SEQ ID NO: 27929 - DNA, 1120 bp, Heterodera glycines
cgctttggattgacaagcccgatgataaatagctcgagcgcaaaacgcgtgcatgtttggaaagtatcgttcataccaatattgaggggtttatttttaattgaaattttatgataaaccttattatctcagaagctattaattgatttgaatgtttttatcgcggttaattagagcaacgaaaattggtttgaatcgtgaagtttatcatttctaactcacttctcaaaattgttgataaattgcaaatatatttttccaaaagtctgtggacactttctgaaaataaattctatactcttgtattttccacttattagattttgcaggcttattgctgcatgttctttgacacttcttcaaaataacctatgccctttattcgttcaaaacagcatctttgttgtttcgctttggattgacaagcccgatgataaatagctcgagcgcaaaacgcgtgcatgtttggaaagtatcgttcataccaataattgagggtttatttttaaatgaaattttatgataaaccttattatctcagaagctatttaattgattcgaatgtttttatcgcggttaattagagcaacgaaaattggttgaatcgtgaagtttatcatttctaactcacttctcaaaattgttgataaattgcaaatatatttttccaaaagtctgtggacactttctgaaaataaattctatactcatgtattttccacttattagattttgcaggcttattgctgcatgttctttgacacttcttcaaaataacctatgccctttattcgttcaaaacagcatctttgttgtttcgctttggattgacaagcccgatgataaatagctcgagcgcaaaacgtgtgcatgtttggaaagtatcgttcataccaataattgagggtttatttttaattgaaattttatgataaaccttattatctcagaagctatttaattgattcgaatgtttttatcgcggttaattagagcaacgaaaattggtttgaatcgtgaagtttatcatttctaactcacttctcaaaattgttgataaattgcaaatatattttccaaaagtctgttgacactttctgaaaataaattctatactcat

SEQ ID NO: 27930 - DNA, 990 bp, Heterodera glycines
  unsure (1)..(990): unsure at all n locations
agtgatcgaccaacgttgatcaacttgtattgtgttccgtttttcattgcattttcgtgtcacttcgtcccccacccctccgtcagattgcatttggttcccaagacggcgtcgtgtcctttgttgacattcgtcaggtcaatcggcagttacccgtcgccttcaaagtctctcaacatccgatcagtcgggtaaaatcagaatgagccgtaacgaacttgtcggttttctcctgcgacagatcaaattccatcccatcttcgccaataatttcttctcttcctccgattctggcctaatccattgggatgccagtgctttggcccaaggagcgaagtgagttcagccgaccgaaggcaccaccccattttattggcataatcttccgtttgcagtttaaatccgccaacaaacggaagagaaatgactggccacgaatctgctgcgggttggtgatttgctaatcgacactaatgagccgaccatgctgatttccatttctttcaaatttagacatgcggacgaccggagaaaatgaacacaccaacatttggttgattgactattgtgaatccaaactaatttcatgttcaggttgtctccccatgcttcgacgagcgttaatttggttttcaaattcaattaatcacttttaatttttcaaaatcttaagcgagtgcttattgacgaggaccctcttctgctgagttctttcgacgttgtgaacggtgcgatcgtcgccgcttctcatacggctgaattgngtgtttatgagcaatgataaatttacaaattgaaaaataatcagctgactggaaatctcattattattttgttacaataataaaaacacttgagcaattcactatctaattttaaaattggcgagttccatttaattatttcattaaatacacagcaagcattcctctcgacgagggaaaccaaaacgacacacataaccagtcgcatttatacattttaatcatt

SEQ ID NO: 27931 - DNA, 2039 bp, Heterodera glycines
tttaattaatttttatatatgattttaattcttttttttttgttggccatccgtcggcggatcgcattttgaatttatggtggaatccaataaatgtacatagtttaaaaaacataccctttaaaaagcaattttaaatataaaagaaacattgaagtattgcatttaatgataaaaggtaacgacttacttaatctgatcaccttgcaaagtataggaaatattctggaaaaatcccggctaaactaactatcatatttcctatatttaaattgatttttggtcgattaaatatttccgttataaacatatgaccaccgaaaatgaggtatggcacaaaaatcaaatgcaattcggataataactaatattcattgagggcaaaaaagtcacacaaaataagttcttattgtagtgatcaattatttagccattttttaaaaatgtgacaacccaacaattttttggaaaatttctatataattaaagtttgctttttcaattataaataatattatgaatgtcatatttttgtgcctttgtagctgggcgaatatgatgttttcgttacaattgccattttggataaaacctgctgaacgggatttccatcccgcgcccttcaaattgaatttgccgattaaataaaatctatctgctttttggttttaagccatttttccatattttgcgtcattcgtgtttaacaaagcacctctcagaggagaatcgcagtatagcaatcatcctaatgtcatttgtattttgatgagcccaattgtttttcatggaaaatattttctaaccccctagaaatttttctttcgaattaccccgatttttcagatttttcatcgacaaaaattggggtgtaatgcattttggaaaactcaactaacactgcataaaagacagggttctgttgtgactgggacgtatatactattattcctttgaatttataaaaaaattaaaagcaaaactaacatttattttttattttaaaatgacaaatctgagtgaaattactctttataataagataatggaataagcatttgtatttcccaaagaaattaatcacactaatgctttgttaatataattatgtttacttttttcagacgagctccatccctgtcagtagaatgaacgtttcgatcgtttaatgtgcccaataattctataaaaatgattattcatcattggaaaatatctctaaccgttttattggttgcactgcaatacatttcgttgaagcaacgcgttgacaaggtaaacccttgaatttttgaattgctctaaaagagatacctgctttattgcttccttgacttctctttttttgaactgtttgcacacgaattcaaagtttttgttgatttttttcgctatgcgttcccgtatcttgccatcgtaatggtaatttgcgctgttaaggatacctactttttccaccactttttcttttttatcttcgtagcggtagacctttaatttaattatttctcaaaatttttatgaaaataaagagaactataaacgaaaaaaattaaattacgcttgcatgtgtagccgtgtcggcctgaagccaatcgctttcggccgcacttttgtcgtaaacaccaaatattgttttttctgatgccgcacctccttaagatgcaaaacaaattttgggttaaatttgaaaaaccaacctaaaaaatactgtagtgttgccattacttgcgcaagtgtatatttttcgcgaaaataaatccaagtgtatccatcattaatcccttccggcactacatctgactgaaattaatgaatttttaattctatcaattcaaaattttactgctaagcactcagtcccatgcttatttaggtggtttgccataatgtggccggcttcatggtgtgctacccttcggcgaacagccatctgatttagtaattattttacattaattaaaataacattcatacaaagtaggtacaacagctttctgagccgttgcacagaaattcaatgcacttaattaatttat

SEQ ID NO: 27932 - DNA, 1928 bp, Heterodera glycines
atttgtattttcttcgtgatggcaggcatcaggaagatcgttaatataaatcaaaaataggatagggccgaggacagagtcctgggggacgccagagccaactgttttatttgaggataaagcatccccaattttaacactgaaagtcctatgactcacaaagatttttatccacattaaaaggttgccccttataccagattttccaatattaactgcttaagctctgccttttacgtttagtaagttcatgttcagaatatgtctatttgtttcgagagtgttgatgggatagttttggagcattaagtatggacgaaaaaatatacatttttgaaaattatttattatttttctgatatttgctcaaagacatatgtgcatttttaatactattgaaggaattctatgttttttgtttttgaaatatttaaaaatttgatttaaattattttcttatttaaataatattttgcgcttgttgaaacgtgtacaattttgaaaattttcacttatttaatgcatattatttatgtttattttattggccaacaatctgagtaattgatctaaatttaggtttaaaaattaaaaacttgtgcttttccaaaacaccattttttgttcgttaaattaacatttatgacgccacataaagtgagaagaaacatataaacatttttctgataaatgggtaattttaataatttaataaaatatatgggtgttatttagatctacaaattaaatctgaaaacattatatttttttaagagctttgttccatataaaattttttattattgtagattagattacaagtcacaaatctgtatttgttagtgttaaatgggactcaaatgggccgatgattcccatagcatttaattgttctacaactctttcaattatttaataatgtattttatgtttttctcactttttgtgctgttcacattttgtttttaaattatcgttcgttttactttatctaatgaaatcgtcgtttaaaaccttttgcatatttctatttggattcttgcgtaaattgattttgatttttttagtttttaaaaacctttttaatttattgtaaccttgatttataatactttatcgtgtttatattcaatattttaaatttacttttgaaaataactatttttaattcatagcaaaatttactatattgtcccaaaaatagaattcggagtattcggagtattcgcctgtcccattggtttttaaaaatttaacttttttattttgtataaaaaaatcaacatttttatatttaatcgcaattatttgattttttaaaataatatttttaaacgcgtatagtcaattagcaacattaatattaaaattttggattgatcagatcttcttgctcatataagttgtttcttttattcataaattcaacaaaatgttattcttaaaactgttttaaaaggagtgataatttcattgtgattattttttaaaagaataatttctagcaaatttaaagcatatccgtgttaatcatttttgctcttctgcttgggccaatggcacaaaaagacaaaaaactaaaataaattaggaaaaagaaataatgcaattgcacttgctttcgagtcttatttaattattataattttatgttacgtaaaatttaaaaaaataaaattcaaaagcattcattttatgcaattatgaaattatttcgataagtcattataaaacaaattttattatgagaggattttttaagatatgtttttttataattatataaaaatctaaaaatacaattttattgaagagctgcaagaaaaaatgcaggaacacaatcggagataaaaattttctcatatacgtcgcgatattgcggataataattattaaaatgcttaaatcaaataatatttcataaaata

SEQ ID NO: 27933 - DNA, 822 bp, Heterodera glycines
taattactagagctcgcattttgaggcctatgctttttttttgggcactagttccgatatattaagcataaaaatgcattttccacttggtttgaggcttcgtttgaaattttattatgcttttttggccttttatcgagaatttcgtgccttaaatacctttttaggaacctttcccttttggtttccttttaatctggtccggcgattttttagaaaaatagggattgaccggacccagaatccggcacaaaatttccgttacctagcctaatttcattttccataccattttttattttggcggcaacgtggcaatctttcggttcattggtcccgaatttttttaaattaaatctggaaatacatttctaaggctactttgagcagatgagtatgaatctgacgaccttttcgaccaattttgaatcccgaattcgaacatttaaaaaaaaaattttaattccatcaaatatttacatatgtacgactaacaataagcattgacaacttttttccgttgaactgtcgggggtaaaacggccaagaccgcataatatatatgcatcgggatttaattattttttattttaaaatttttaaaaattggtttaaaaaactggaaggttgtgagtttttaaatgcgcgatccgcaaccgcggcaaattgaatatcgaccgcggattttttttgtccgcgccccacccctggtacatatttgagattgccggcaacgttccggcttcattaaaaaacaaagaaagatattttctaaaattctaaattcgggttttttattttgaataattttttaaattttct

SEQ ID NO: 27934 - DNA, 1185 bp, Heterodera glycines
caaaataatatttaatttcataactttttttaagctctccaccaagatatgggataaggcacaatagatagagtttaaaattctctacaaaaaagttcttggaagatttttcgctaaaatcaacccctgcatagttataagtcataaactgaaataggcgccaaatttcggaaaattttctatttccaaaaaaattttgaaaaatttttttgaaaatgccaccaatcgatagagcgcaaaaaacggttgcttgaaagtggtcttggttttcccgagaaaaatctgcaaaaaataataaaatttaaaaacggaaaattttcgagggggcctagctcgaaaatttctgaaaattttcaaaatccgaaaacatggatggatgcagttcgtcgagctgcacaaaaaagtaattatcaccatcccgctcagatcaaaacacagcgatttattcgcgaaattcaaaaaacgccaaaattggttttcaaaattcgccgaagtgtacaggccaggcctttgatgctagggcctcgctcaagaggaaaaaaatttcccaaacattccaacttagggccctcccagcagaagtttttggctccgggttccctgaaaaaagttttggcgcaaaaactgcatgcatttttccccaaaaagccatttcagcgccgctggcgctcagttggcctccggaccggaatgccattatttttcctggatgcgcctcaaaaagttgcttaagcaatgtcaacatttcaggtccccccgattagccgttccggagattttagttttagcaatgaaactcgatgttgctttagttatatctaaactagggtggacagtcggcttctggtgctgaggggaaagcgcttcgcgctcagggacgcggctgcgccgcgtctctagggttcgcaccgccgtttgtttgttggatatggctgtttttgttccgcatctccgacatcttcgcttacagcagcagctgctgcagttgcaaacgacagacgtacagggacccgccacgtgaagccgcacggtggcaaaaacagcgaaaaaccatgggtccccttttttattttatacagaaaaaggcaaaaaaggtttacaattatgatgacatattaaatgattaagatcacaaaataaagagaagtaaaattaagtataattaatgaaagacttaataaaata

SEQ ID NO: 27935 - DNA, 1100 bp, Heterodera glycines
  unsure (1)..(1100): unsure at all n locations
tttattggtcatatgtatcaggctttttaggcgcgctttctgaggcttaccgnatgnctaaccgctgactaccataatgctataacaccaatttgtccattagcgcattaactgacccaattgtccaccaaaagatttttatgagtttcctccctttccgtcgttgccatttttaacggtgtttaattgggccagagctgaacatttgacagcagcatggcaccactcactgcatgatgatcatgtggacggggacaccttttgtcctgcttcttctggctgctgtgtgggcggacaaatgaatgcgtgtgttgtgacatttgatcactccgctgacccaatgatttttcaccgtaaaaacccacgcatcccacggccattaatgcatgtgttgttcatcatccattattaatgggggatgttgtgctggtccgtcccatccgtcggccgatccgatctgccgatgctttttgcccatactccgatcaccgccccctttcccccattcactcatccccggaccacttatgcatccgatcgacggatggcgatggataccccgcataggtatgtaccgaccagcagtgattttacaaaactgatctctccttcgtaatcagtcacattttttcaccccaggaaaaacaaaaataaaattttaaagtttattttccgtcgggaccacaattctacagctttgcctaatttggttgttcattaagcagcggagaataaaaaattttaatttatttatttttttgttcagcaagaagtgaatgagaaattagtcgataagcaattcgccatttggcgcgttgacgccccgtggcttccgcgggtgcggcgtccgccatcaacaaaaaagggcggtgggaaggggcccatccatcactacgagacaccggtcagaaccggacgggtcattttggagctcggcgggtacatcactgaacaggaggtgatggcggtggattggtggtgctgttttaaagcgacatttactttttgaaggctcgttctattttgatgcatctctatttgcatatgccattcccagaagagatttgtcagccaagaanttgatggacaaacgcaaggga

SEQ ID NO: 27936 - DNA, 1899 bp, Heterodera glycines
atgagatttaaatataaagaaagcgaaaacataaaattaataaattattttacaattattaaaaataaacccattaataaaaccattaagtgaacagaaaaagcattcattaaatataattgatatttgcataattaaaatagtcggtcaagaatataaattattaaaaccacaaattttttaaacataaattaattttaatatgcattttttgccttatctatcgcaactgttcaagataaatatataataagcaaaaatattagaaaataatgaagaaatctatttatatattttaatttagattcgaaatggcgaaaaattattattagctttaaatttttatttataaataagagtaattgttataattttatttactttataactttttattaagttaattgtaaaataagtttatttaatgcttttaacttttttgatcattaatctcacagtaattcgaccctccaaattgctttcgaggatgtgcttttgagattatctgaatcgctttaaaacccaaattttcattcagttaattaatgcgttttaaggcaaggcaaacacaagaattgacggaatattggaacaaagcaaaaataatttaaaaattcaaaatttaaaaatttgagcataaacaaataatttacggttgatattctctagtttcactattgaaagacattgaaatttgaatatttagattattgaataaaaaacattaaataagatttcgaataatttttaattaaacaaccacactgctggaatagatacaagcgggccattaggatatgtgcttgccagaaaataatcaaaaataagcaatcaaaggttatgattaaaaagaaaaactttaacggtaagtaaaatattaaatcattttaaatacttataataaaaaaatatattgaaaaaatatcaaaataatataattaaaaattaaatatgatgaaatgttccctttcgaagataatttatttacagagattacactcaaatttctgacaaagaatgcattttaattataatcaaacaaaatttttaatggcaaatttttaagtgattaaaaaaggcccatcgctaaccttgtttaaatcttcattttatttaaatacaaaataataaagcaaaaacttgaaaaagaatttttttttaacaataacagcacgcgaatgaacgtaatcatggaacacagcatgagatttaaatataaagaaagcgaaaacataaaattaataaattattttacaattattaaaaataaacccattaataaacaccaccaataaatgaataagaaaatcattcattaaatataattagagtcgatcaaaaaaaaaaaacttagtgtgggcgatccaaaaaaaaaaactcggtgactgataaattaaataattcaattcacaaaataacgatgccgtccagttaactctaatgtacgtcgggacgcaagtcattttcaattttttgcatcacttctccccaattttctccatttgtagtagacactgccggacgccattgatacctgttttgtagagctcatcgagctgtacaaataagccgctgataccggcacgctcagcttgggttggccatcgaccgggtcggagcgaggctgagtgtcctccggcagatgtgcccgacccatgacgggttacaagtgaattgatcaaaaaccggacccggcctgggagatagcccttgaaaaactgaaaaaaaattgttcgtaaccgggccggttcggattccgcatcaggcactttttgtgttccgaaagtggtgcgatcggcttccggaaaatgaccaatcaatcacaaacacaagaactgacagaatattagaagaaagaaaagaaaatttttttaaattagcaaaattaaaatgtgcata

SEQ ID NO: 27937 - DNA, 730 bp, Heterodera glycines
ggagagagaagatcggggattaggggggggggggaaattgtccgacaaaagtttggcacaagcctacaatgagaaaatttcggagggggggggggatccctatttattttattttttgctctttaccccaaagttttcccatgtaattttacatgagggtttttggcagatttgtggcccaaaaatgccaattttgggaaaaaatctaaggcgtaattaggggtaggggggggggcggtgccgtgccgaaaggcgccgtaatgggaaaatttaacaaattttgaaattcgtatgcgcatagattgccgaggttggcccagcagcgggtagtgccatgcaaattggcgatcaattagtggaaattgacggcgaaagttgcattgggatgagtcacgagcgagccattggcatgatcaaggagaggcaatgcgtgaggctcacattgagccgacaaaagctgtaacatttgccggacaaagaaagaaaggatggatgaatcgacgaatcatcatcatcaatcacgcgaacactcaattttaataataatttatataaataaatcattacactctactgaaaaccataaatattgcaataaaaaaaccatttttaggcaaaaaatgcgaaatttgaaaatgtgaagtttcgactttttgttcgaatttgggttcggggttcgaaatttgtcgaaatgaatgtcagattcgtggtcagcgaccccgaaaacccc

SEQ ID NO: 27938 - DNA, 1346 bp, Heterodera glycines
ttattaggtacaactattataccaggagaccagggatggcacaacattccgatttccgataacttttggggcctcggaatgccatcccccccatgtacacaaaatgtcatgggacgcgtaaagtgttgttgggacgcgtaaaatgtgatgggacgcgtaaaatgtcatgggacgcgtaaaaccgactagaaccttattaaaaagttcacaaaacccacataaaacatcataatgtaatttaaaaattgcattttatattaattatttcttaaaatgaatgtaaaatctacaaaacttccccacctgcccattgctcacaggggagtatgatcgttatgttaaatcccaaaattgtgtttgaactggtcaaagagtagactttttaatgcctctttagactgaacataaaggagaccaactatcgccgtgatcattcgctggactctgctaaggtgccgtcatgcctgatcagagaagtgccaattgtccgtgtgccgtacccgttctctggttcatcttccgcaaccatcggcggatgccgagcatttccgtccgcgcttgaaattggcgattatccgccacagcgacgccaacatttgtatgagcggcgagaggaatttttccatcgaacggcataatgccaacagaatggtgcgagcagcacaaaattgagctgggagcagcttgaccgctgatctctctccaaccccttaaaaaatcttggtcaacccattaaccccttttcattattggaagagatgggaaataaatcggacagtttcgccgaagcgatcgaagaaattgcttaaattttataggcctcagaagaattccgggtttgccacttccatttttgtataactcggtatttccggtttccgtaatttttgatgatccaagaaaaatgtttccataatttttaggcctaacaattaattaatttctgttttcgaaaaattttttggtggccttgaatttcttacgcttcactcaaacaaacaattaaggctaaactattgacgtttacgacaccaaaaattggaaaatatatgtattttaggcacaattctaaaaaattttgataatgtatctttttaacaaataaattcggatcacagcataggcaacaaatggaacaaggagagacaaaaaaaagtattttgtctattaactgttagcattttgatcactttttaatttcctaccattgattgatttgataagattatcgattgatcagaaatgagggggagggaacaatcggcaaatgaatgaatgaattaatgtgtgtataagtgctatcaaatagagcaaacagcagatgtcgttgcgaagagacaattagt

SEQ ID NO: 27939 - DNA, 1789 bp, Heterodera glycines
  unsure (1)..(1789): unsure at all n locations
ttaaatgaactgactagataatatttaaaataggttatcttctttggtttcagtatccctgcaaagtttggtgcgcttctgatcagtttctgaaaaaaaagttaagcctaaactttttggcctgtttaaaaaggaattaaaaatttttaaaaattttattcatctccctttttgatagaaaaagcatcagagtgcctaaactaacatgtaaataaaatttggtgcgtttcagaaccctttctgaaaaaatatttaagaattaattttgcaaaaaataaataaaaacgaaagactcagattttcgaaaatttttttgagccagctagctcggcgctcatttcagtgtaagttagtcctttaccggggagtatccctgcaaagtttggtacgcttctgctcaattagcaaaaaatatgagtgatcgaatttacactaaaaaagttaagcctacattttttggcatatttaaaaagcaattaaaaaatttttaaaatttaataattttcctgcaccgaaggtactcactcggcctcttcgcggcctcgtggtgggccttcgatgaatagtggtgattatctccaaaatgaaaaagcgagtttagacgcaaaaatttctcagaatttacaagaccccggcataagcgaggacctcaaggcgaagagacatgattggctctataaagaaagacgtacgataaaggggatacttgaaaataggccacagaaggtcgtgattgagaatcatgtacccggtccaaatgttgcaccatatctgggcctcaataaccaatccaaaccacaggagaccgaagaaccacggaaaataattattcctaggaaaagacttaaagagcgaactcctgatcctgaatcagataatgatacccttgaggagttaactccggaaccccaaacaccatccacattaaaaacacccattccgatcaaaactattatacacccgacccttttaaacggtctttttaggtacgtgaaggaaaacaaagatttatttaaaattacggcggccggaaaggtacagtcgaacatgaatttgccgattgaaaacagtaattatagagatgttttgttgtatctcgcagggaagaaagatgaaacaccccggggtgcaaaatttctcaaagataggttactgaaggatccaacagtaaaagacatggttgataaatcaaaggtcatgtggggacgtggaaggaaaaaggcaataaaatctataaaaacacccggcatagtgcgagagaagaaacccttcaaaccactaatatgggccagactgtagagaaaattttatcaaaaatttattttaatttaaaatctgcggcaagttttgttggaattcaaaaaattttaaatgatgccaaaaagattgacccggaaattacgaccgatgacgttaataaattcctagaaaagcagagaacatacacgattcacaagcccatcaggaaaaaattcccgagactaaagacggtaccgagcggcttccataccgattggcagtgcgatttgtgcatatttgaccagttgaaaaagcataacgacggttacaaatatctgttggtatgcatcgacgtgctgagtcgaatgatcttcagtgcaccggccaagtcaaagaagagtgaggacatgatcgaagcttttgatcgtgtgntcgaaaagtctaaaattatcccgatgaaaatatatagtgacagtgggcttgaaatccaagcaggaaaaatgaaaaaatattttgaggaaaaatcatcatcaaaatgtaatgtatagtc

SEQ ID NO: 27940 - DNA, 927 bp, Heterodera glycines
ttatcgactagtaatgcagtttaattattagattaccatacatgttaaaaacaaaatatgtaattaaaagccaaaattctgttctgcaaagcaaatttagttaaatgcataacacaaatggcaaaataagctatacacacacaaaaatataattcaaataatgaatgataaatagaaaaatgtttagttttattgtctcttttgttcacccattcaatatttagaccttcattcatccctttgccgacggcaacggacgctgctcgcggctattagcaaattttgtactggttccatatgtatcctccccccccttcattaattaatttaatgtataaatatataatttatccccccccattcttattaatgatctaattaatttcatatccccgcctataattattttattttcatgtccctcccctctttgtatatatccctaattaatgtattatcatacctttctccttataattaatgtattttcgtattccccccccattttcttatcccttctaatgtattttttctcgtcgttattatattttatttatttttttcatataatatattttggcggctgttttcgttttgtgagtggcacaacagctcgtttagcagctccattgcggattttgtggccataacttattttgaaagtaatcaatctgtctaaaaaacagcagttcgccgttcctaaaaataagaaaggcacatcagaaaaagagaaacccttttgcttttttgtctgatttttttaagtcagagccctaattgtctggcattttatacccctgtaagcccatcgctagggaaaatcaggaatggtttatgaattttgtgtatttgtacttttttgaagcagtgtaaatatgttatggcccaaaatcaaaccgtgtcgtataaagtttgatttcattttta

SEQ ID NO: 27941 - DNA, 911 bp, Heterodera glycines
ctctgtcacttaagcttttgtttgcctttgtccgttctcatcaactttcagtcagcccctttcaacatttcatcatcattcactccatatcattttcatcatcatcatcatcgtctctttattatttcgtctcttttttcggatggtcatcaaaatgccgtaattattattcatgggcggcatatgccttaatgagggaatgggccaaacgccggggggggcaactgactaaatttccattttccctttcctttgcacattccgcaccattctcttgatgggaattaacgaaaaaagaaaagtccctctcgaaaaggcatttctttttctgatgaacaatttagcgatggaagcgaaaaaaaattaagggaaattatcggagagaaatcaaatcagaaaagtgggggagggagggagccatcacttaatagcggtggggtgggaccacacaattgccattttccgggggggggggggaatgacagcaaactccgccgaatttcatcagccaaaagcacaacatttttgagaatgacaatgccaactaagcgcaaatgtcatgaaaattattataattggcatgagaatgctttcattcagcttaattttgaatgagaaaatgcggaaaaagccatcaccaaatgagacgccaaaataatactgagaaaatgttaagtgttatgcctttgctaaattaaaaagacccaaataaaaaacgaaatagcaatggaaattaatttttatttaaaaatgggttaaaaaactattagaatacctatataaaatagagaagtgcccgaacattgggagcaaaagcattacggggaccgggaaaacataaaaagacagagacagaaaaaatcacagttcatgaaatgcaagaagcagctcattttttacataaacttatt

SEQ ID NO: 27942 - DNA, 1166 bp, Heterodera glycines
taaaataccgaaatatcttctcgtttcaatgaaatctcattacttgtttgaacaaaagatcaaatttattattaattttttcatttcgaatttatgttcagaaataattcgaaatctacacgcggaaattattcaaacagtttacacagtcattaaataaccatccgtattgctttgaaccctcgcgtttcgattttttattggaattctagttaggagatcggattgaccgaaaagaatgctatatcatgatctgcaacccgtaataccccagaaataaaacaacacatattttgagtggggggggggggacaaaactgtacattaaaaaatgtcgggcgggttgggtaacgggacgcaaccctatggcatttttgaatagtttttcgacctgtccgtccaattgagactcgacttggcaatctgaaaaaggtcaaccggctctttgctgagcagcacacaaacgatgttgtctgtttgaacttctgccatcaatttgagaagttcacctctcatcgcgtgacaccgtaaaaggacgcgcaaagtgaacgaaatggccacagatgccaaacgtattctttcattttcgcagaataattcctccaatttttgcatagcctttatctgtcccaattatttaatgattttaaatgattaaaaatgggtcgaaagacgtaataccgggaccggaaggcctgttttccgggaatccccccggcgttttgtgttaaaaactgggagcaagagttacggcaaaatcccggcggtgccccggtcccgtccgggctctaattaaactcgattaaaattagctaaataatgtttgcttcaccatttgttcccctttggcactgttgacattttgtcccctgacaatcttttcgaattccttctcaatttgtttttttgccgttcctatacaaaaaagaatcactttcatttcactgatttcttctgccacaatttgtggcacttttccactgaatggcatttccaaaagtccgagcaattccctgaacaagcgaacataaaagaagaacactttgagccttttcatttcgccattttcaactcgggcgcctcccatttgctggtcaattaaactgacaaaatgagagaaattagtgaatttaaatgattgtcttctactgactctagaggtcccc

SEQ ID NO: 27943 - DNA, 1499 bp, Heterodera glycines
  unsure (1)..(1499): unsure at all n locations
ctttgccagaatatgaaattgaggcaacattttaatcatacagtaaatatacatacatatgcctactgtgacaggtggcagaagatgcagaattgatgacaactgtttaccatatacaagcaacggatgacgacagtaccatgccgaacagccgagttcggtacagtatccaccaaaccttgcctgttattgatgggagtgctaacacatccatattgggcataaacaaatggacgggcgaggtaaaaactgtaattccttttactgtacataatagacatatactattgtatattcggacatatacaattttactgtatttcatgtgtaaaaatgattttccaacctagaaatttttcaacaaaacttagtaactttttcataagaacatttcaagaagaaaaaagttttggaaaaatttttctacgggttttttcaatttttgatatattgataagtttttcaaaaaatttttccaaaattcgctaaaaaattcttgaaaaatttttattgaaattttcataaaaaaactgttgaacgtttttttgaaagattttttatgtttgaagctttaaaaaataattcgagagggaaacgatacggggcggggatgaacttactcccttaacttacaattagacctattatatcattaatgataattcattaacagattttcctgcgcgaacagttggaccgcgagcattgtgccaaatacagttttgaggtggaggcacgcgacaatggcattccatcacggatggcacgcgcacaactgcatctgcgtgtgcaggacatcaatgacaacgcacccgtgtgcacaccacaacagcaagtgattgtgataccgcctgggcaagcggcggcaggctgcacgcgcaaaacagccgccgcactgggcacgctgcgggtgggccgcgtacaggcaaatgatccggatgcgggtcccaatgggatggtgcgctttcgcatgcagcagccaaacgaatggttcgaattggatgcaaaaggtagggtaccttttttcggcagaatttttggctttgaaaccccccttttccttcagcgtcaattcttgaagaaaaaatgttttttttttcaaatttctaaaaattttacgaaattgacctcaaacccatatgctcgtttcgctttttcctccgtttcatgttttttgtgcggttggtcttctttgttccttttttcccctttgtgggagttccttctttgtcagtgctttctcgtttctctccgcttgttttccggtcttcctttctcttctcttgtgctcttccgcggttgcgtccctcccccctcttcccgtttgcgtagctgggtttgctttctttgcgccttttcncntttccggtgctctcttccttcgtcgtccgnttgatataggccatgcctcggctgctttttcttcttcttcctcccctatgagccatcattctgattgcggaagaccaaagctcagaaagacctcaggcagcaagctg

SEQ ID NO: 27944 - DNA, 2102 bp, Heterodera glycines
  unsure (1)..(2102): unsure at all n locations
ataatagcttctgatgttttgattttttgaaaacaaataaaattggatttttttcgtttaatgcaaaatgccaatgttgaaaaagtgatttggaaaaagagaaaacaacaaataaataaatgtgatagcatccgcaaaaagatcatattgtccgcattctttcacaaaacatcaaccagcagcaagcgccaaatttgtcgtcgtcggtcaagcggacggaggcggcggtggaggggctgaaaaaaattggcaaattaaaaaaaatggttttcatagcgggaataaggctttagcacaacaagagaaaattagcggcaagggtcaattagtactggagaaacctcgttaacccaatgccgttacgggtgcagtacgtttcccaacctcccaaaaaaaaatttttttcactaaataaaattttaaaaaattcaggcggccatatatgaaaaaggtggggggggagggtcaaacgaaattcgaaggtgtagtattttgctgaaaattttcgatttttccttgtcggtactccctccaagactttttctcgaaaagacataaaaccagcaattttttgatgtaaatctgcgaaaaatatgcaaattttgtcaaaaatttcagcgattttttggaaattttttgtccctgtaattttccaatanaaatagtttctaagaccgctgangcggcggtggcggcggctgaggcgtcatggtcggagtgggcggctgcggaggcggcggcggtggnggcggaatgctctgtctgcaaaagaaattggtggcacaaataaatgaacagacgcaagacgagaggagacaaatttaaaagaaaaaattgacacaagtttttttttagtaaaaaaaggttatttttaaagactaaattcttttaaaaaaatgttactttattacaagtttgaacaaattccgattttttatagattaattaattaatagataaaaaattaaaaaaaagaactcagtgcatgcggaaccgaaccccgctaaattgaatcgttagggccgcgccttaaacattgcgccattcgcacgacagtattgtaactaactcattgagaacattcattccgcactttttctattttgattttgtttgaaattgatttatagtacaaaaatctataaccaaaaaaaaatggaaaaaacaaaaaactttgcatcagcatcaattgttgccgcgcaaaaagcgcaatggttaaagcacgccacttgggattcaacccaagcgcaggttcagtcccgcacgcacgcaacttttctaatttgacctattttctccgccggtaattcaaaaaatttaaatgcttctcgtttttttcttatctaaccttgcaaacaaaaagagcttctttttcattatggtaataaaatataaactttgattaaaaatttgggtaaaaaaaaaacttaaaaatttttttgttgataatgaatgataattaatttaccgggacatcggagggggcggcggcgcgaacatttggcccatttggggcggcggtggcggccgctgggccatcatttggtgcatttgcattggcgccatgggcaggccggccatggcggcgtgcggaagaaaactgaaaaatttaaaaaaatttgtttaatgacaagcaaattatttaaattgaaaagtgtcgccaaaaaattttttttaaggcacggaattaaattaattttttaaaatgcaattaaaatctttaaaaagctcccccttatttaaaattttcaccatttttagcaatgaaattgcgcaagaattatttttgttcgaatagtgggtttaattcattaaaaaaaaattttttttttaattttctattaaaattctttgtttaagtttcagaaaattctttaaaaacacctggaatcctgaagaaatcaattccttatatagtacaatttattttgaataaattttccatcaaattccttgtttagggttccaataaaatcttgaaaaaaaattccggaattttttttctcaggtacgccattaggcttttttttaaattcatattttcaattcaaatgcattgatgttcatttaaaaaatatatttggcataaaaatttcaaaggg

SEQ ID NO: 27945 - DNA, 1345 bp, Heterodera glycines
  unsure (1)..(1345): unsure at all n locations
tgttaaaaaatgggacaatttttagcattaccattaaaataaaaataatcggaaatgaaacttttttctntattantatgaaaaagccattggccacattctgtaaggaccaattggggttgatgccactgaaactatgtcggcacttttaaaggcttattgaaacattcaacaatttctataggaaaaagtttttctattctattataaaaatgccctcctaaaatcgaaaaaagttgaatatttggcttttggaccaattatatgtaaaatggacgaatatttttaaaaacattttgatcaaaattgaggccaaattttctgtttttgttaacccataacactgctagattcaaagtctcaatcgcaaaaacaatgaacaatgaaggcctaagcttctccctgttaaaaaatggggacacatttttagcatttaccattaaaataaaaataatcggaaatgaaacttttttctttatttatatgaaaaagccattggccacattctgtaaggaccaattggggttgatgccactgaaactatgtcggcacttttaaaggcttattgaaacattcaacaatttctataggaaaaagtttttctattctattataaaaatgccctcctaaaatcgaaaaaagttgaatatttggcttttggaccaattatatgtaaaatggacgaatatttttaaaaacattttgatcaaaattgaggccaaattttctgtttttgttaacccataacactgctagattcaaagtctcaatcgcaaaaacaatgaacaatgaaggcctaagcttctccctgttaaaaaatggggacaaatttttagcatttaccattaaaataaaaataatcggaaatgaaacttttttctttatttatatgaaaaagccattgctcacattctgtaaggaccaattggggttgatgccactgaaactatgttatcgcttctacagagtaaccaggacaaacatatgcatttgcataaaatttaccggtcagggacgtattagtaccgccattttcgtaccgccgttttcgtacgggggacgttttcgtaccgccgttttcgtacgggggaccttttcgtacgagttcttgtacaagcgtcagattcaattagaaaaacttatgactaactaatcgaaccaaaattttatcattttttaatttcccattcataaatttaatgtaaaaaatgcataaatttaacaataacaaaatgggacaaactagggtcgcatcccatagtaggttcgggaaataccggcgagaaaattgttaatgtcttataaggtcacattgggattggcataattgtgatcattttggggg

SEQ ID NO: 27946 - DNA, 1525 bp, Heterodera glycines
tcgtccctcttcccaacaatggcttcatgcaaatcacccattagccttctttgcatgctgctgatcatgctgctgatcgatccatgcttcaacatcagtctctttaatcccgcttgttcgtttgtttttcaattaattaaatccctaatttatccattaattaattttgtacaatatttcagctgatgattgtgttgtggccattcgtaaccggactcagattccaccgggggtcagtcacagtctgttaaaaatcaatactattttggcgttttgcctaagatttactaacaaaaatgcaataaaaacggaaaatacacccctaataatcgattcgaaaattttcaaaaaatacactcccctatgaatcgactttatttggcataattaatcgtgccaaaaattaaaaaaaaaaattgtctccaaatacaatgtgccataattgttatttttgaaactagggttaagccccgacatgtttcggggaattacgaaagccgtaaattgcacttgaaataagatggaagtatctttaaatgagtttttaaacttttttattctggactttttctttttgtgtttttttagactttttatgaaaatttcctccccgacgaaggtgttgctccccgacattttttaaaatttctccagccatccccgacaaattctttcggggaatttcctccccgttccccgacattttgctccccgaggctcggggaggaaccctaatcttaatccataaatttttgagacaaaaaaaaaacgacaaattattttgaattcacaaaattttttttaaaaacttcatacattatgtttaaatgttaattgtgagataataaaaaattatttctcattaaataacaaatgcttagattttttctttttattaataatatctggccaattttaagaatgacttttttggtaaaaaaaatgcaacatctcactagaagtattgtggtcaagtgttgcaaactgtagtttgctgttgtgatgttcattaaggttctaacacataagcccgaattttattttatagaatttttacttaatttgctgctttaattattgttttttaaatatcccgcatgaaaacctggaaatcccggtcccgttttccgtctttttccctggcgggatttttactggaacgggaaaaaaatacggtagtcccattcgggaatatcgtcccgcacaaattcgttttcccattctcgaaatttttttaattgaaatttaattaattgtaaaatttaaaaattattttttctttatttttaaaatagccaaaaaatccaattaatcaatgattggtcatttttttagaaaatttgttaacaaatttcacccaagatttcattttttcccccggcgcggctttttggcaccgcctgaccctccctgtaacccagaatttttttgaaaaaaacgcgcaaagaaaaaaaaagctctttgaaaaactaaacaaaaaaaagtcgtcaattttgttttttgggggggttgttaagctactttt

SEQ ID NO: 27947 - DNA, 161 bp, Heterodera glycines
cgatcacttacttaatccctattgggtttcccccccccatcctcccgttcgttacaattgaaccaccccgatcagttatgctttatccccccactcccttcatcgcccgatcacttttgatccatcttcctattttaggtactttattccgtttaataata

SEQ ID NO: 27948 - DNA, 733 bp, Heterodera glycines
caaaatagggctcaagtacagtttatgcgtccaatcgacttttatgcgtccaatcgacttttatgcgtccaatcgatttttatgcgtccaatcaattttttatgcgtcccatcattttttatgcgtccaataaaatttttatgcgtccaatcaatttttcattaaaaacctttaaacatttaattgcactaaatccaactaccagctcaagaaaacacatttttctccattcaaaaacaggcaaagttagctttatttttatctcttttcgtagtcaaaaagccgtcatttatctctccatttgccggcaaaaagctgccagccgtcattttctctccgttcttcaaagtgctatggcaatgtttcgattggctctttttcttttggcctgcgctttaactcatgcaatggaatggcacggctttattattgacaaattcggataccgaagggaatatgccctgacaataacaacatctacgataaaggccgatgcgttaacgaatctagctatgaaacggaaaccgaccgttacattcgcaacacaacttacatttatatgactggtaattctgagaagaaatgtgtaattaaaaaaatccgtacaggaatagaaggttgttgctatttttgtgggaaaacgccctcaggaaatgctgctgacgatatttgtatcagtacatgttcagaagataacgcgcaaacgacaaaatttttcagcatattttgagga

SEQ ID NO: 27949 - DNA, 1783 bp, Heterodera glycines
  unsure (1)..(1783): unsure at all n locations
tcaagttcatagcaatttgaaataagccaacctaccaaacccgcccccccccccccacccaatggtgctgaaatactttagttgccaaactctccgacccttccaaaaagactcgcaagtggataactttttatatattattatgctaattttcaaaactaagattgtaagttgaatcctgaggccgaattcaataccggagaaatgtcgtttttttggcgaaaagcggctacaaattccttctttttgttccccagcgctgaactatttaaaataacactggagaaaacaatggaatttttacccaattttttttttaatttcaaacttacaactttcaaaaattttattttgtttggaaaattttaataaaaccataaacattaaattgctaaaaaaatttcaattttttcaagaaattttcttataagtttctatgataaaaactctcattgttagctgttccatgtggtctcaccaattgcgatgcctcgccaaaggggttgtgagtggtcttcggtaaatgcgatgagtttactcagcaagaagggggcaacaaaattaagcaaatcataggcgattttgcaaaaagcagccccaaaggaaggccatttgaacgtgaggaaaagcggccaaatgattgacagcggagcatcgcctttcggccccttccctttcttgttggctcgtccaatcgatttggaatccatctaaaaattaaatttttgtgatattaaaaatgacgctcacgcgttgaacttatctgcaaaagttccttttctgccgctccatcggtgggaaaaagcttcactttggtaccgttttcctccgcatgtttctctccgtgtgctatgagaattgagggtggaaaaaggatgttcacccccaccggtaaaacaaaaaacaaacaaaaaagataaatttttaaaatttatatttcttacaactagatgttttttttttgtctagtgttcgcattaataagcacaacagagctaaaatttcgacagcaaaaactattttttactaaaataattttgctttttatatcaagttttagcaacgcagttttttcaacaaaaaatggctaacattaagggagaagaattacttatctaaaaatttggcagtatttttataagagactctcgccaaaaatgacaatttttgagtcaaatcttgaaatagaagaattggtttggcggtgccgataggaaaaactcaaatgaaataatttgtaactgaaaattcttaaaccaagcacaaacatagaaaaccattttacatttttgaaatattataaataaataaatttagttaaaaaagaggggaagggaggaaatgaggcgctacccaattagataaatgaccttaccttttaattgttttgctcgtattttttcgaatttctccagcaaatattctgattggtcttcttccaacaagtcccaaaggtcgtccatttccaaaggccgctggtggccaagtcgcgccattccgttgaaccaccaaaaagtgatttggttgaggaaagaaactcgtccctccggacatgcctttttctgtaattttacataatctgaagataaaactaaatatataattgcattatattacagtgtaaatcaaattagacggagtatcggcaaaacaagataagaaaagttccataagtacagcgaagtaatacaaaatggacaaaacgacgagagcgtaattcgcctgaaagtgaatatttcgaaaaattaagtnaataaattatttttgatttacgaacttcagc

SEQ ID NO: 27950 - DNA, 1416 bp, Heterodera glycines
  unsure (1)..(1416): unsure at all n locations
atgaacgaaattacggatcgtgaacagaaaatcacngacctgcgaatncaattgtttgttataaaaaattggagaacccacaactgggatcccggtgctggaccggaatcaatcaaaaatgggaaaacccgggaaatccagctgcttaaaatccggaacctgggcgctcgtcccggtaaacaattggatctgtcccatgtcacgacatactcgagttacaaatttcaactaaaaaataattagatcaaagacaagtccgacatgcaaagggagcttgcattgtatgaacagcgcagcaacgaattgacagccaaggcggaccaattgcaggagactttgttggaccgggagcgcgaattggacacattgcgtgaccagttcaagaaggtttgtgcttttcttggtgctatcttttccccggatgtttcgatacttttttgcgcttatacctttattccttttgtgtcaattggcccgagaccgcaaatccctaatttttagggcactccgagtgcccgccccctgctggtgtctcggaataacttttttgttttgttttttagtccctaagtgaccagacgtcccggctgaacgagttggaggcggagttgcgtgctcgtgagcggttggccaacgtctacaaggccaacagtgaagcggcaaatgccgaaattgctgaactcaacgacaccgaagtgcgactccaagcgcagctcaaagaggccgaacaaagtaaatgatttgatcagttattttaaatttctaatttttattccgaatttcaagttgttcacagttacaccgctgaaatggagagggcggccgaggagcagaagaaaactatcacagaaaaaggtttgaattgcttttttatacaaaatttgtaaagattaaatttcagacgccgagatcaagcgtctcaacgatgaagtggtcaagtccactgagctgctgaatgccggattcagacgtaagtacgggcaatgccggaccccttacaagcacatagagttacactgatgtaattcccatcaaaaagtggaattttcttgcaactagccaaattccccattcctggtaccttcataaacatgctttttccctcaaaagtttgctcactccgtctgttttcagtgaaccgtgccgacgaagacctcatccaactgtcgccggctgccgctgtggcgagcagtttgttgaagagtggcatgtcgctgacatccatttacgcggaacattggtcgcgtggtggccgaattggacaagaaaaacgatgagttcaaacagttggagcgctacgtcacggaacttgatcgagtttcaatatatttttgtactttttctatgcaaagacccctgaactaaggaaattttttgtcaaaaaatgacaaatttacgattataaaaccatgaatt

SEQ ID NO: 27951 - DNA, 663 bp, Heterodera glycines
ttttctcgtacatttttctcctcccgaaacaccaaataggcgcgtgcgaaggcgcaacgcgcgcgccgcagcgtcgccgccacttcatctgcgtcgacctccaccgccgccgtcaccggtggggcggcggcgtccgttccgtccgcgctggtgttgccgcaggcgccaccgccagtcggggcgctgccgggcgcggcgcagaaccaaaaggcgtgcggctcgccggccggcaacgggtcgaactgcgcgtgcaaatcggcgggagtgatgccgggcggcaaacggcgtagcacaacctgaggagcaattggggggggggatgaaaaaatgccaaaaaccgaggggagggggggggggagtaaaaataaattaaagaagaataccgaagcgttacagagaaaaactcaagggtagcgggtgacaaaaaaacacataccatacccagggtctagaaacatttttcggggggggggggacccgacctgaagacctttttttttgctatttacccaattaaaaaaaccttttttccgctgttggtgaaaactgcacttttcactaaaaatgacccaattttggccgttttaggtaaaaaacttgtaaaaatagtggaaaatggaggtccggcggtgccgataggcgccgccgggaaacattttggaa

SEQ ID NO: 27952 - DNA, 785 bp, Heterodera glycines
  unsure (1)..(785): unsure at all n locations
ctgaggacgcgaagcggccgaattaaaccttccttcctagagggtgcggagcgccctttgaggccgcgaagcggccgaattaaaccttagaatacaaaagggcgcggagcaccctttgaggccgcgaagcggctgaaagtcctccacaaaattatcaatgcgtcctcgcgatgcctgtagaccaaatagaagcgcaaagcgcccgtctgaggccgcgaagcggccaaatgattccacaatatttagaagcgcaaagcgctcgtctgaggccgcgaagcggccgaatgagtccacaatatctagaagcgcaaagcgcccgtctgaggccgcgaagcggccgaatgcacttgctcatcacttaacaaacgcgcatgcactagcaacgaagtcctttgcgcgaagcgctcatgtaatgcatattcttttcatctctcacaagtatactgtctacaccgagcaattactgtgcaaagcatactgtctacaccgagcaattactgtgcaaagcatactgtctacaccgagcaattactgcgcgacacgctagtttatatactactaaagaaacaaggcaactcattgctaaaactaaaatctcgggaacggctggcgggaggggctcgggaatgtggcattgcttaagcaactttttgaggcgcatccaggaaaactataggcattttggtccaagggccaactgagcgccagcggcgctgaaatggctttttgggggaaaaagaaaggccagtttttgggcccataacttttttctgggaacccnggag

SEQ ID NO: 27953 - DNA, 1665 bp, Heterodera glycines
ttaaaaacaaaatgtggacattttataaaccatctgttaacaaagcacactcaaatgttcaaaaatttccccgagtccttccgcaaaagttataaagaaaaaacgcaccgcaaaatatggttttgaaaagcaaaaaagttcgtcaaattcgatgttggaagcccatcgaaaattctcgattcccgtgtctagaaatttttcggggtttttgggtctcggttctcgtatcgtttcccatggtcatttctctgttctcgtatcgtttcccatggtcattaaaaatgtcggggcggggtcggggttgcaaccctagtccaaactgtccgggtacacggtggttctcagttcgcgtgtaactgacaaatgagcgggaaaaaagaaataatgatgacacttttgtgaatgcaaagaattgaaaatgatcgtaagagataaaccaagattggaaaagttcgaacagctttttcagtacgaaaatttagaagcaagtgttttgccaaacgcacatccaaggaaggatgaaaaaaaaatcattttttttcattttttatagaagattttaaaaattttaatggaattaagggccggcggaggcaaataggctctgtttgaggaaaattttttgcaattttaattctataaataaattggaatacaacaaaggaatcaacctgcactaatttttttaataattaagttttaattgaaaattaaaacaaatgtttgtacgaattatctattgacgagttgtgtgactcagctacaattaggttgtttttttcctttacattttattggcatgtaaaaaagcaatttttcttgatggaaatgaatttttcggcatttactacatccaagaatagataaattctctctctctttttctctcctgtcttttttctctctctctcctccctccctccgtctctttctctttttttttctctctctctttctctctctgtttttccctctctctcttttctctccctctctctctctctttctctctctttttttctctcttttctctccctctctctttctctctctctctttctctctccctctctctctttctctctctttttttctctcttttctctccctctctctttctctctctctcttttctctccctctctctctctctttctctctctttttttctctcttttctctccctctctctttctctcttttctctccctctctctctttctctctctctcttttctctccccctctctctctctttctctctctctctttctctcttttctctccctctctctctctttcctctccctctctctttctctctctctcttttctctccctctctctctctctccatttttcgttttggtttatatgtagctttcgctttttgccggtctcctgcggatttttttcaactttcacacaaattttcaaataatttttggtacttctgggttttgggcctacaccacaaaatttggtacttatgcagtttacgccacataaaaaaaaattgtttttttttaattattaaaacgtgttcccaggagtattcggggccgctgatcacgaaaattacattcatttcgactagtttcgaactccggacccgaattcgaaccaaagacaaaaattcatttttcactaaaatccacctttatt

SEQ ID NO: 27954 - DNA, 1120 bp, Heterodera glycines
atcactggggactcaattatccatcattccaattcccgcgtttcaatcccaccagcattccagtcactgggactctgttctcctgcattccaatcaccgggactcagctctccgacattccagtcactgggactcaattctccagcattccaatcaccgggactcaactcaccatcattccaatcgctgggaccgaacctcacctgattcttcggtatcgcaaccaccgagactcaattctcctgcattccaatcactgggactcaattctcttgcatttcaatcacagggactcaactaaccagcattccaatcactgggactcaattctccatcattcctattcccgggactcaatcccaccagcataggagttcaatcactgggactttattctcctgcgtttcaatcactgggactcaaccctccagcatttcaatcactgggactcaaccctccagcatttcaatcactgggactcaaccctccagcattccagtcactgggactcaacacaccagcatttcaatcaccgggactcaattctccaggatttcaatcactgggactctattctcctgcgtttcaatcacccggactcagtttttatgcattccaatcaccgggactcattctcctgcatttcaatcactgggactcaaccctccagcatttcaatcactgggactcaattctcttgcatttcaatcactgggactcaaccctccagcatttcaatcactgggactcaattctcttgcattccaatcactgggacctaacctcacctggtccttcggcattccaatcactgggactcaattctcctgcatttcaatcactgggactcaaccctccagcatttcaatcactgggactcaattctcttgcatttcaatcactgggactcaacacaccagcatttcaatcaccgggactcaattctccaggacttcaatcactgggactcagtttttatgcatttcaatcacagggactcaattctcctgcatttcaatcactgggactcaaccctccagcatttcaatcactgggactcaattctcctgcatttcaatcactgggactcaaccctagagcatttcaatctctgggactc

SEQ ID NO: 27955 - DNA, 1088 bp, Heterodera glycines
cgcgcccctctgccatgctgggaacatttgtatggtccaaaatttctcgcaaaaaagagatagccatttttctggcatatataataaatttaaaaattccctgtagaatagaatggccattgctctccgcgcccctctgcccatgctgggaacatttgtatggtacaaaatttctcgcaaaaaagagatagcctttttctggcatagagaataaatttaaaaattccctgtagaatagaatggccattgctctccgcgcccctctgcccacgctgggaacatttgtatggtacaaaatttctcgcaaaaaagagagccatttttctggcatagagaataaatttaaaaattccctgtagaatagaatggccattgctctccgcgcccctctgcccatgctgggaacatttgtatggtacaaaatttctcgcaaaaaagagatagccatttttctggcatagagaataaatttaaaaattccctgtagaatagaatggccattgctctccgcgcccctctgcccatgctgggaaaaatttctcgcaaaaaagagatagccatttttctggcatagagaataaatttaaaaattccctgtagaaaaaaatggccattgctctccgcgcccctctgcccatgctgggaacatttgtatggtacaaaatttctcgcaaaaaagagatagccatttttctggcatagagaataaatttaaaaattccctgtagaaaaaatggccattgctctccgcgcccctctgcccatgctgggaacatttgtatgggaaaaaaattctcgcaaaaaagagatagccatttttctggcatagagaataaatttaaaaattccctgtagaatagaatggccattgctctccgcgcccctctgcccatgctgggaacatttgtatggtacaaaattctcgcaaaaaagagatagccatttttctggcataaaaaataaatttaaaaattccctgaaaaataaaatagcctttgctctccgccccctctgccatgctggaaacatttgattggaaaaaatttcccccaaaaaaaaaaacccttttttgggataaaaaaaaaatt

SEQ ID NO: 27956 - DNA, 914 bp, Heterodera glycines
acatatgtttggccatgagaaaatggttcttcactataatctaatccaattttttcaaatgtttgtgattggcttttgtttatcgtaaaggcaaatgctaatttaattgggaactgatgtcttcttaataaaaatgggaactttttttcttctattaatgttattcttggtattagtgtttgttcacctattctgtcgccacttttaataatacaactaactagccgctctgagggcatgcgtggggagcgtgcacttgcttgccctagcccgtcgagttgtagccagtaacgggtgcacagtccaggttgttagtgcagtagcagctcaggcgcagatgcgtgtctggatgttcgtgcagcagcagctaccggcacatgcgtgtggcacccgtgagcagttggaatgggcatgcgtggcacccgtgaacagttggaacccgaaggcttggcgaatgggcatgcgtggcacccgtgaacagttggaacccgagggcttggcgaatgggcatgcgtggcacccgtgaacagttggaacccgagggcttggggaatgggcatgcgtggcacccgtgagcagttggaacccgagggcttggcgaatgggcatgcgtggcacccgtgagcagttggaacccgagggcttggcgaatgggcatgcgtggcacccgtgagcagttggaacccgagggcttggcgaatgggcatgcgtggcacgcgtgagcagttggaacccgagggcttggcgaatgggcatgcgtggcacccgtgaacagttggaacccgagggtttggcgaatgggcatgcgtggcacccgtgagcagttggaaagggcatgcgtggcacgcgtgagcagttggaacccgagggcttggcgaatgagcatgcgtggcacccgtgagcagttggaaagg

SEQ ID NO: 27957 - DNA, 1906 bp, Heterodera glycines
  unsure (1)..(1906): unsure at all n locations
ggaatacggaagacaagattcatttaaaataaaaaaaggctaattttgcgttcgcaaaattatcgactaattaataattatataatgaaatcaaaaaaacattaaaataaaatctaagtgaagaattttaatcacaataatactaaaaaatacaattacataataataaaaattttttaataattataccataagttcatttaaattgtgatcctttattaaataattggtcttgtctttatatttatttactttaatttaataaattttaatatcggtgattgttaaaaatgctataaaaacaaaacatatataaaattcctttggccagtaaagggaaatggagtggaattaatttaattttttccaaaatttttttaaaattattttttaaagcggaaaaatatttatgggattccctggaataaatttatactaaaaaattttaaaaaaaaaaaattttttttcctgggatttcaaaaaccccttttttaacccaaaaatttttttttttttttttttttaaaaaaaatttttttttttttttgggggaaaaaattttttttttaaaaaaaaaaaaaaaatttttttgtttttttaaaaaaaaaaaaaactttttttttttggggggggaaattttttttctaaaaaaaacccggggggccccccgggggggggggggggggggcccttttaaaaaaaaaaaaaaaggttttttttttttttttttcacaaaccccccgggggaaaaaaaaaaaaaggggccccccccccccccccccctttttttttttttttttttttttggggccccccccccccccccccaaaaaaaaaaaaaaaaaaaaaaaaaaaaaacccccccccccccccccccccccccccttttttttttttttcttttttttttttttttttttaaaatccggggcgcggggggggggggggggggaatatttttttttaaaaaaaaaaaaaaaaaccccgggggggggggggggggggggggggggccaccccccccccccccccccttttttttttttttttttttttcccccccccccaaaaaaaaggggcggggaaaaaaaaaaaaaaaaaaaactccccccgggggggggggggggtgtttttttttttaaaaaaaaaaaaaaaaaaaatattttaaaaaaaaaggggggcttcaaaaaaaaaaatttttttttttttaaaaaaaaattctccccccaccctttttttttttctccccaaaaaaagggggggtttttttctttttttgaaatttccggaaaaggggggggttttgcataaaaagggggggggggggaaaaaacaccaaacccccccgccctttttcaggttgggattttttttgggggggaaggggggaagggggggaaacccaaaaaaagggggggggggcggcgggcccggacatttccttcgggggggggggattcgaaacggggttgtcaccaatccccgattttaggatgccgaaatggctgcccccatttatgaggtaaataaatttttccttatttgacggaccaaatccaataaaaaaaaaagttgggtatcatttttcntttaagaaattcattttttggcgtcaaaggcatttttaaattaantggggagaataatcaatgnaactaacncaatatcgctggtattgcggtttcaatttttccaatcattttggcatcggtaccaaaaaacagtaaatttacacaatcgccaaaaaattttgcccttaaactctaatattttttttgattggactgactcttaacatattcagttgctccatttcgcactttctaagtccgttcgtccgtcttcaactcttcagcaacagtcccaaacgaccaccgccggtccttccgtcgatgtaaaatacgag

SEQ ID NO: 27958 - DNA, 1338 bp, Heterodera glycines
ttcgcctattatcactgtttaactataaaataaaaattctatataaataaattaccaaagatatgacaaataaggcttctctccaaatgatactaatcgctttgcgtcaacttaccttcactaagttcatttagggaatggtaaatttattaaatttcttattatttttttctttatttagacagttcaacccagaaatagtggtccacaaagtcggtccgcaaatgtcggctaaccctttttgggtggggggggggtaaattactacgttataacttctcccaaatgaagacgaaacgaatggaatgagccggaggagaaaatattccatttaaaagagggaggatgcagcaaaaaaccataaaaaatttaaagttcattgtcagcaatttccttattttccatttccagaaggaggaaaccaaactgagtcccgaggaggaattgcagaagcaacaggatttgaactcgaagaaagccgtcataaatgcttatgcggaaaagctgaagggtcttattcaaacggacaaagacagcacagcgaagtaagcaaattgataaatttggagtttaagacaaggaaattccagactgaataatgcgctgacggatatgaacattgcttctaaaaacagaaattatcgtcaaatttctttgagacaacggtcggcttcgacaagttcgaccagctcaacttcaagcactgtaagctccacttccaccacttcgtccgattcttcttcgaccacttcttcgtcctcatcctcctcctccacgtcgactgacagccaagaaaagaatgacaatacgcaacggacaacggggagaagcagtccgaagggagttgagcctccgaagcagccgatcatgttgaagcggatgattggagccaacagaacagtgaaaaatgggcagcacgtacccaccgtacaagtcgaaaaccgagtcccacagaaggtcacgaaaatattgcctttggagtctgcccaggcgaaaaagggccgttttgtggcagcctttaaaattgcaccgactgccgctcatttgcccattgccaactacggcacaaaaagcgcagcagtggccaaagcatttgtcaacagtgacggcggagaagacggagaggaagaaacactcccgaagaatgcgcacaacaaaatggaagaaaaccccaatcaaaaactgcaaaaacagttgacggatgacaaaatagaagagcattcatttccaacgacaatggcacacccttcaaaagtggaggaaatgaaaatgccaagcgaagactgtgagaaaagggcaaaacagacagagaccaaagaggagccgaaggaagaagaa

SEQ ID NO: 27959 - DNA, 1075 bp, Heterodera glycines
  unsure (1)..(1075): unsure at all n locations
cttacgtccatttctgcttgaactttttgtttactctgtcgatgcttcctaaagtgccgttttgctatttaagtccctccggggtgtccccgccttcagtttgatgacgttggccatcgccagtgaggaggccgtttcgctctcgcccaagttgtagtcccacccgttgaccaccttccaggtgaacacgtactgctcctgcttcccgctgctcaatttgctctttcgcgcgttcgatgtcattcttcgacagagtcaatttcaaaattaccttccattaattattcattaattagttcgccgttcacttcttcaaaatgatgaaaatgctgaagaccaacaggaacaaattgacgcagaaataagcgaccggaacattatacggaatgacgacacccttcagcaccgtttcactgctgtagaacccgtaaaagaggtaggaatattgaaggtagccctgaaggggggggggatgactcatcaaaggcatttgccggagggtgcaccccaaagtcgaggacggtgttcagctcatcggcatgggccaacatttttggcggaatcactttgatgtgacgggtttgattgaatctcttggcgtcgttctgcgagtcggcaagccactgaaaagtcagaccctttgacaggtgagcagagagagagagagagatagagagaggaggagagagagagagaggaggagagagagagatcaagagaggggggagagagagagaaagagagggggagatagagagagagaaagagagagagagagagataaagagtgagagagagatagtgagtgcgagagagagagagggaagagagagatagagagagagaagcggagagaaagagagagagagagtgatcggctcacctcgggcaccacgacgaacaccatcatcatcagggaagtggtgatctgagcggaagaagcgcatagaccgatcggtaaacaaaacagaaaaaagtacattcattcccaacacccaacggaggaaaatgaagtaggaagagacgaccgagccgaaggggattcgatctgtttgattttggactcccnacggga

SEQ ID NO: 27960 - DNA, 1157 bp, Heterodera glycines
ttttccctttgactccaattttcttcactaatttttcactcagaccccattcttaccagtgcttgtttttcccggttcccggttgccctaccgggaccgggaccgggacctgagcttttcaaaaccagggaccgggaaccgggacctcggatgaccgggaattcccggcccggtcccggtcccgtggcactctagtattttggctacttcgtcactaaaataggtagttaaaaatcactattttggcgttttgtcactattttttcactatttcaagattttttggaaaattccttaacaaaaatgcaataaaatcaaaaaatacacccctaagaatcgaccaaaattttttttaaaaatacaccactaagaattggaaaattttttcaaaaattcttcccccaaatttttttacttgacaaaatttttgatttaaaaaatgtcaatatttgctaagagaattttataaaggaaatgtagctcatttgcaactgcaaccagtgaataaaaattattttttgctcaatttttggctaaaaattatgtcactattcgtcactatttcggactttttgtcactatttcggcatttttactcactattttagttaactatttcgagatttttggtcattaaaagtcgcagccctactgatcaatttgatattagttcgaagcttttcattatactgtacataatgacgtggctgatcacactgatcactcaaaaataattgaaattgaagcataaacgttattaattaactaattaatttttgttaatggatctttcgccctcctctctctgtccctctctctcttaatgacgttcccactttggatgtgttgtaagccttccccttcgaattccctttactaaattgccccaatctcactaaatatggcgcaacataaaacatttgaagcagctgtcaattcttcccaattctttgtcattagctgcctttgtattgcggcaaacgatttggttgagagaggaaggaaaggtgaactgatggagcgggggggagaagaggagcaggaattggagaagaggaagaacggtgaagcaacaaggagaggacagagaggggataaagaaaaagagtggagggacggtagaatgggaaggggggggaggaggggaaggggaaggg

SEQ ID NO: 27961 - DNA, 1057 bp, Heterodera glycines
aaaatacgggtttttctcttcggtggccaactgagtcccggcggctaatttctcacttttgcttgcgtttgaaggcccgtaactttttttaaaggacagggagcggaaaattcttgctggtaggattttaagttgaagtgttttctaattttcaaaaaaaattccaggcctctacctatacttggaagggctgcagaaattggcaacttttcagtaccaactttgcccagttcagtccccgttgaataaactcattaggctttgacctgagcgcagggtggccagcagacttattgtagagctcggtgagctcgattttctgaaatttaaaaatttcgaaaattttcaaaatttttcgagctaggcctaaaaaacggttttcgggtttttgaattttaggaatttttaacgaattttcccagaaaaacggagaccacttccaaaacatagtttttcgagctctatcgattggtatttttttcggaaaaatttcgattttttcccggaaatagaaaaattttttggcctcagcgggacatttgagtcccgggcccataactcgtcaggagttgattttagcgaaaaattgtcttagaacatttttgtagagctttcgaaactctatcgaatggtgtactataagtctggaaaatttcaaaaattttcgagctaggccccctagaaattttcgaaattttttttgtgggccaaaatgggggtgaaaattttttttctgggctattttgaggtgctgagtacgattatgatgtctattttaagtttcagaatttttggaattttttaaaattcgaaaattttttaaatttttttggtccttggaaatttggattaaaatttgaaaattcataactcggtgatggtttcatcgatttaactataataaagccttaaaaatagcaaaaaatcgggagaattttatgggatttatttggttttataatgttcaaaagaaaaaaagttattccagaatttctggaaatttttgatttttctagaaagaaattcataactcggttctgaaaagtcatactgtaaa

SEQ ID NO: 27962 - DNA, 1167 bp, Heterodera glycines
acccacttttatattatcgtagcatggtcttgctacgaaatagaggcattcctcaaatcggaaccacaattactttgggtgacaaataaaattttaatttaattttttaatattttatttttgaaaggtgttactccgaccgaaatcagttctgctagggccgaacggagtttcaataaaatgattatcacaggagatcgcatagaagaaattttccatgttcacttgctcgtgtgagttatgcgacaaagcagaaaagtcaaccgactgagcaaatatcttctgtctataattttcttgttcaccaaaaattcgtcaactaaatccatctatcttccttgctatatttaattttatttttgtaaatttaaataaaatttcttttgaaagttttaattttaaaatcaaaaaattgaggattggcaaattgaaaaaattctaaaatttatccccttcgacaatttcgtgttttcaatgaaatctcgctaaaatgccagaaaattttaaacaaatcaaccataaaagaaatttttttgttaatcgccccccccccccaaatttcataataacaaaaaaatttcatcgacatatggtggttgaaaatagttatttttttgccaaaaatgcagcgcctatcggcaccgcctgacccccattttaccatatttttgaaaaacggagaccaaaatcgcaaaaaatagtaattttttggcaaaaactgcgaaaaattttgtaaaatacaccctccaattcgggattttaaaaaacaaaaaatgcacccctaaaaattgactgaaaaaaaagcaaaaatttttaaagactaattagctaattaattttctgccttgagatccatcaaatcactctccctagttataagtgtaacttattatcaatgaattacacgctctcaccactaataactaggggatgatatagttttttaactattttttcctgagctccctatagcctgaaaagcactaaaaacatgttttaagggggttgttaagctagttttcgagttattagcaactattttatagttttttatttttagcaactaaaaaaaattaacgagaatttttgattttgaaaattatgtatttcattaacggtttggcataatatttttgctttttgaagaaaattttgtcattttacacc

SEQ ID NO: 27963 - DNA, 1141 bp, Heterodera glycines
ttctataaactctgggatttttatgactgatttttttttaattttaaatctgaccattttgtgatcggaagttgaaaagttttcaagtactgttaaattatggattaattcaaattcactggtttaaaattgctttttctctagttggttccttggcatgttgtttcaattgtttttggtctatgaaccaatcagcatatttgaaaccggatcatttctttgaattatcttattttcatcccctaaaatatttgggatattaaaatctccacaatatatgatattttttgaattactcagatcagaaataaattttgattattcgtccttttgaactgttattgtcggacattttttttgtttttcgggtggagatgaatttctttgcctgtgtccaatttgtcttccagtccacagtcctgcacaatgccctttataaagtcattgtcgtcgcttcaaccgcctcaggcaatttctccaacacagcagatttggatttgtcgaccatcatttgctggttggtgatgccgtagtttgtgtatttgactaagaaacacgggtccatagcaaaaggaggtgaacaaccccatagaagaggggtttgggcggcactggcaagcgaaggcgctgactgggatttgtattggatttgtgccaaatttctttgaccgttgttttgatgatcgattcaatggtgggttttagaatttctgccaccatttgagcaattttggccagttcctctggccccaacgaaccgatgatatcgttttcatcatcgacaaaggaacgtgaccttttttgtgccattttgcgttggaatagatcaggaagagggaatgaattttggggttttattgattggattttgatagatgaaaattgaaaggaatgaaaaatttttatttttataattattttttattttattttttttgtgctgatttacaatgtatttgtaaattcaaattctattacagcaataaaaaacaaaaaaatatttatgttatccttttattattattttaaaattctttattttgaatttcatatttttgaaaattttgatcttaacaccttcgaaacatgtaatgaacaatccaacaatgaaattgttttcatatttttatgttcattaata

SEQ ID NO: 27964 - DNA, 975 bp, Heterodera glycines
  unsure (1)..(975): unsure at all n locations
agaaataagtagttttaaaaatgaaaaatctggggaaaatattgaccatattgcccagagtaaaaaaaggtcatatactatcattttattcttctcgtattaaatcaagaatccggaagaattttttggggtttttaacatttttggtttaaagcaatttgaatctggtcaatcagattttttgttataattttaaaaattttataaatttttcatccttttttatttctataaatttaaaaaatgattttgaatccattattcagttttgtgtaataaattttttaaatttaggattttgaccaataatgcaggattttgccacatggacaagtactttgaattattttctaaaattaattttttttaatttaacataatttgattttttaacgtacgagccggagacgttttgtcggtgccatttgtgccatgccgtttcggcgaattttcgcagctgttttgttgccgggcacttttgtcagccaagcctaaaaaattgttgtttttttataatttctcaatgtttgaacggtaggttaatagttatgcataatttgggattaaattaatcattgagtatcaataaccaaaaccaatttgtgaaatatctcttaatttttcttcaattcctgagtttaattttatttatttattttgtataaattggccaaaattatccaaatattttcattatcctgatcaatttgagtaaattccttagcagataaatttttggcattctgcatcatccatttgactgcggcatatttaaatttaaaaaaatattcaaaaaatcacctagagactaaaattattcattaacaaaaggatnaatgncttcttcatctgaagattccgagtcaaaaacgacgggcataatttgaaatttgctaaaaaatgcaataaaacaaaaaaagaaaaatattaaattttaaattgattgattgattcaaaatatgaaataacaataat

SEQ ID NO: 27965 - DNA, 1004 bp, Heterodera glycines
atgcattttgactgtataatgcccacggaagtgtcgttccccccgactggaaatagaggtcaaactgtgagtcaatgacttattgagacagtttgcccatgcaaaaccaaacaaccaagtcaaaggacccttttcgaagggacagatagtgtgtagctgttccctattgccggttgactttcaactgtgagtcaaaaggatgattaattgtgacagttgtgcctatgcaaaacccaacatcagatattctgtggttgagacagctgctcattttggcaaggtgccaaatttaacccagccgaaaaataagccccgcctactcggtggagtataaatagcctgtcatttccaacaaaagtgcattttttccattcatttggaaattttgaaatttttctgcaaacgactaaagcgctctttcccttttgcttcctcgctctctgcgcactatttaaaccaatttaaccataaccttttgtttcctaccatccctttaaatttttgcattccctctttcttcactatttaaaccgaattcaccaaataaaaatataattccataatcttccaataaacctataacaatataatttaaataatattacaattaaataattaattacaaaaataaaagttcgtgctcatccctttaattttctacgtatccttacatcttttacctacttacccttttttgcttttgcttttcctctttgctcactatttaaacccatttcaccacttaattttaatataaatccctcaattttaaaaaaaaaaaaaaaaaaaaaaaactccaataaacttaattaaatcataaaatttttataaaaactttacttcataaaataaaaaaaaaaactttccttaattcatatatccatattttacccaatcaatcaataaaaactataaatatgaagggggcctccaaagcccaatcttcttctccctcccccaaaaaatctcaaaccaataaggcattcgaaaaattgataacctca

SEQ ID NO: 27966 - DNA, 227 bp, Heterodera glycines
ttaaaaatttttaattcctttttaaacaggccaaaaagtttaggcttatcttttttttcagaaacttatcagaagcgccccaaactttgcagggatactgaaaggaaaagaattaacctgttttatcacattagcttgtcatcagtttttataaaaaattttcaaaattctgagtctcctattattttatttatttttcaaaattttgaagggcggggggggggggc

SEQ ID NO: 27967 - DNA, 1907 bp, Heterodera glycines
tgccaaaaaacctatagttttccaggtgcgccatcaaggtacgaatgggtggtgcaaattcaccccctagctattcccgggaggcaatgcaaattcaattaggttacataaaaaaatttacattttatatttcctcattaatatttccactttccaaattattctttttgcaaaaatatataaaaaatttttttgcaaaatttattcaacacatgttctttgtataatccataataataaattatgtaattatgtaaccatctcatcatcatcaccatttttgccagcttacaaaacaatcgaaataaatggaaataatttgtccattttatttttatttgataatttacattttatttctcataatcgctcgaattgtagttttaaatttggttagcttttgaattttttaataaatactcatgttttttcgaaatgcttaatgcttaagtgtaaattttacttctttatcaaaatcatgcctcgaattatacgcattacttttgtttgttttttgaataacatgtaatattttaattttttttttaattttggcattcatttttcattataaaaatgatgctgcttccgccaatgattttcttggccctctctttggcatttcttttgaacaacaatggcacatttggtggcagttgtacgtccaaagatggcgtcatggtcagcaatggacaaatgaagcaggaacaactgaagaaaaaacgtcagggcacaacgccaaaagcgcgtgatttatcgagaaggaattcaagtacctcaacatcaattggatcagaaatcgacattaatggtaaacaaaatatttgaataataaataaaaatgataaaaaagataattaaaatgcatttttatttgttagcattttattatactggggaatcgaaacattttttattgaattcataataatttcttgacatttttaatttacactttgttaggaccgagaatttaatcggcaagcgaaaaataatcttattattaattaaaattaaaattctaacatgattatcatcggcatcaattgagctttatacgagaaaaattttctgtaaaaattggttaactttgcgctgtaatttattactaatttacccatagaattcggaatagcgaaactaagttaattactgattttcaggaacatttctgaaaaaactacaatgtcgaaaaaacaaaaatattttttctaaaaataatagtttttttgggtaaaaaaagactgtcagaaattacaaaaatgctgctacttctgctacttactactaagattttattttaacgatgtttttggcccagtaaaaatcttttttaaatcaaagtgccaatgccatttgcagatacaatcaacttcatcaaagagaccactcgagatggctacacatcgccaatgcaaagttctcgtttttcggattcgcagatgccttttccaccactctcaccaaacgttactcattttgctgttgataaatcgagtcgagtaagtgatcagtgaatcctttgtaacataaaactttataaaatttaaactttcacgaaattttcaaatattccctaaatttctttaaatatttccaatttttcaaagtttttcaggaatttttccaagtgagggtgtaggacgacagttttaagaaaagcactagcacaagaaaaaaaaagaatttatgggaaaattggcactaatttttgattcaacttttgaaaaggaaataagaaaaaaagttttttttttgaaaatctattcctaaaaataccaaaaattagtttttaaaatgttaaaatgtgatgttcccatttaacgcgttaccaataattttttttctccagaaaaataaccattaatattgattatttggatttttaaacatatttcttacatatt

SEQ ID NO: 27968 - DNA, 1156 bp, Heterodera glycines
  unsure (1)..(1156): unsure at all n locations
atgattttggcggtttttgtattttaaaatatatttccaaaatttttcagaattttgctaattttaagtatttaattaaataaaatgagcaattcatttaaaacacattatgtcttatattacactccattttttgtttggaaaattatccaaatttaaatcttgcggagattaaaattgtgattacctttatgttctttcttcaaacaacgcaaaactatgtagtacatccgggttatccaccctccgaaaattttttaaattttttacaaggagaattttttagtgatgcgacatttgaagattggcactcgagcataatagggagtcgaaaatcgagaacaaagaaatcttaatgaaattaattgaaatgtattttttttaaatcaaaaacatacatgaaaaaagggatgggggtcaaccgaaatttttggaggccggtggtgccgataaacgccgccgggaaaccgggaaaattttttgtgattttaaataaaattttaaaataaaatcatttacaaataaaattaaataattaatttataaataataagcaaaatattctgattttataagcatcatttcaatcctccaaaatttgttctccaaattgttttttccatcttagaatgaatgctattttttgtattttcaactttttagcaatttcctttctcatttttaatttttatttgccaatagatttcacttttttccattttttcttgctccattattcttttactgctaattcaattgtttcttctattttttaattattggaagggctaactccattaaaaacaattattctttgatgaaaaaagggaaattgttgaaaaatatttttaaaaaaatataaatttatgcaaaacgataaacattcacgaaaggaatggaatgaatttagagcaaaaattaaacaaataattgatatggattctgtgacgattgaaaaatgggcaaagaaaatacttcaaaaagtaaacttttaaagaatttggttttattatttaatttaaatatttttagggcggaatcattatgcaattgctgaaaaaatggaaacattgaaaaaaaaaatttaaaaaaaaatcccaccctcactgactgtgaaatgtcaaaaatattggatattccacganagttctttaca

SEQ ID NO: 27969 - DNA, 1817 bp, Heterodera glycines
  unsure (1)..(1817): unsure at all n locations
agaaaataaagcgaccgaaattaaaagaaagaaaatggattaaggatttggatggaaaagacatttttaaatattatatgggataataaatgaaatggcattttaagggtttgtgatggagtgccgtcgcttacctttccatcggccgaatgtttcgcccctttcgcgcctggggcggtcgtctttcagtcgcctcagttgcgaagaacggaccgggcaattgcagtagagtcgctcagtccctttggtgaaaggtttcagcatgtcaaggacagtgccaaaccgaaccggcaattcccggtacgccaatcggaccgacggggcccttgccgcccggggggccggcttctccaggccatcctgacgagcaaaactttctaaaatggtttccggtgccatttctcacctgggtagcccacgtcacccgttgcgccggccgtgccgtccgcgcctctctcccccgcctctcccgcgtcgcccatttgtcctctgtcgccctttggccccggccgtccccttcaaaaaggcactaatgagtccctcaaagtcaacttgcttcaggtgttttgtgccaccttcgccgggtgtcccttaaatggcattttaattgttgcttttctcggcctttcctttcttttcccacccgcttttcctgccgtgccgtctctccccgctcgtcccacttccccaatttttcctgatgctcccgcgggcgctcttttcggaattcccggctgaactcatcagtccgttaattgccttaattgattttttgccaattgctttacctttccgttttctccgttctctccctttttgccctgcggcccattcgccccggggaatctgccaaactcgcataattagtctttttaatatttttttaatattattcttaatcaacccgcgtggcccttcaggacaaacaaagcattgtgacgcgtccttttcgaagtttcgttggatttcgtccccactttctccctttggacattatttaatcgttacactcatttcgtttccctttcaccttttttccatgaacacccggcacccccgggatgccgtcgtgccccgctttccctgcaaaccccggcggccccttcggacattcgatcggttccacgcgctgctcattgtcagtttgacttctttgggctgctttttccccataagtcggcactccctgtgcctttgccattgcctttcgctccgtcggtccctctatttctcccctctccgttagggctgtgccgtttcgctttgtccatgcttcggttgggtttggctttggcacttttttgctcttcgccatgccttcctcaagtggtattcttttgatgtacagctcccaattcggtggcttttccttccgtttgccctgccccttctgctgtttgctatgtttctcttttgtcggctcgccttcgcgttgcttcatcctttgtctgcctttgtacgattctgaatgccaatcggtcatttccttctgtattaccgtaacatcgactcacttcgctccaatcggtccaaaaagccgcggctttccccatgtgacatttgcaattcgcgccgttctctgtcgtgcatttgccatccgttggatgattttttgcgaagatgcgtcaaatcccgccaaatttcatctgccatgctctgctggtaaaatgccaaatcctttggtcgtttatctgccacttataaaactgactttgaattgtttgccctcccttgttgccatttcgttcagtgattccaattcgtcgatcagaatcggcaacatcanagtgcttgcgcagatggcaacagccgaaagt

SEQ ID NO: 27970 - DNA, 1401 bp, Heterodera glycines
tattaaagcaaaagctgttgcactcacccaatgcaattcacataaaacgtaaagctgacattgttcaaattgcccgaattttggtttagcgcggccgtagtctccccaatttgacatcgcttcattatccatcgctcatcccattcatcatcatcttcttcatccatactttcatcattgttttctgctttctccaatgtgagcttttcgttggtccgttcgttcaccaattgaaatggcacaatttccgttggcacatgaacagtaaattgaatttgatagctggcggaagaagtggtggcacggataaatttctaaaaaagggaaatgaaaatcaatgacagtcaatccaacgaaaatgtgtccacacaccttcttgaaattgttgactaaatcagcgatttctgacgaatcactccagcaaatcaatttcttcagttggccatcttttgccgggatgtgaagccattcagacagaatttggccagcagaatatgcaagtggctgatcagaatcaccacaaatctcatcgagcaattggtcaccagaatcaatggcatttgggaacagacgatcagcatcgattgaatgaatgttgagatcggagagcacttttggagaagtgaaacgaagcaaacagtacagatgatcagcacttggaaatttcaattggcgaatatttggcacaaaaattggcaaaatatggcggatcaaagcattccaaattggctggacaaaaaaggtttcgttccaagacacatagaagaactccaagtttgttcctttgtcgaacatttgctgattggcacggataaatgcgatgacagaatggtcgatgtagctgaaaataggaacattgtatccgttaatccatgtcggaatttgaattaccaaatccgaagatgcataaaacgaattttcttgggcagcgaatggtcgggcaccggaaagggcacataattggcattgtcaataaacacacgcaattctggcaccgctgtcactttgttcttgcgcaatacgatattcttccaaaattggcaattcgcttgtgccatcgaaatgtttgtcgaccaaaaattcgaaacgtgacgaaagaagtgccaattagagtccgagttgaagacggtcaaaatgagggaaaatgtccatccacacgtcgttgcaaatccaactgaaattgtggaaaatcaaatcagagtaaaggaaaattttgtctaaatattattttaccggcggttcattttgttggaaattagcacaattacgaaggacgtcacaaagggggcacaataataattatgttagaaatatttaaagtacaatgagaaaccaatcgaaaaaacaaacatccttagaaggacgaaaaacgcaaaatgaaaacgtagaagctaaatgctt

SEQ ID NO: 27971 - DNA, 1297 bp, Heterodera glycines
ttttttgtcccttttcggcgtgccattgttcgcctgctgttggttgtcccgcatgattggcactttcatcacaatgggctcggcagcgcagctggccttctcacgtaccttaaaaaatgaatatgccgccattttgaggcccttttaaagaaattttgcattaaaaaaaattaaatgaggtatatggaaggaattttttcgtactggaatatcgtttgattttttacgagaacgatctccgccggtatccagacccccagaccccgactttttggaaaaaaagggtctggatcgggaccccaacacaataaaaaaaaaaatttttttaggcctccagctaaaaatgaatgggagtacaaccctaaatggggtggggatggaaaaccttgtacactgtgccgaaaaagccttgggcaagcacttcgagcagttcaaaatcgtccattgctttcagtgtgccgctgaacgcgccacgcgaggcactgacgcgacgctttgacgccgttgtcgcaaaaagatgctttgacgaaatgggcaaatataaattgatgaatatacagacgaatgcaaatgagagcattttggttcgaagtgttccctttatatacttaagcgtgtcaacacggcgagtcaattttgggctccaagtacaattaagtaggatttttcgtcttagtggtctgtgagttagtcaccaaaaagggggtctcaggttcaaatcttctttgtgtttgtgtataaatttcattttttaaagcaactaaataaaataataataaaaacagaacgccaaaagaacaaatacaaacagtagacattttattttaccgattttatgaaattttttttagcttataactttttcaataatagacctagagtgccacgggaccgggaccgggaccgggccgggaattcccggtcatccgaggtcccggtcccgggttttgaaaagctcaggtcccggtcccggtagggcaaccgggaaccgggaaaaacaagcactggtaagaatggggtctgagtgaaaaattagtgaagaaaattggagtcaaagggaaaaataaaaaataataattaatatattctttaaaagtaacactgccaagtgtgcgaatggcctaatggctagtctccttgactttcccttcttctttcccctggttcaatccctctacagaaattaaattattttcaattttttttttgtatactcgtgggtttcctataaagaaaatatgattcctcatagttttttaaatggcacatattttatcattttttttaatgaaatcct

SEQ ID NO: 27972 - DNA, 1436 bp, Heterodera glycines
ctctttctccctcccctttctatctctccctcccttttctctcattctctctcactctccgcccctccccatttattccgttctctcaggtgaccaatattccccaatctgtcgacccggacggtcttttgctgacaatggcaagcgccgaacgtcagccgttcttttacagattcggcatcttttacccacaaggaatggagaaaagagaagctgaattttcggtatggcgttttatttacatttttggctgcttttctgctcgtatttttgtaaatctccgcataaaaatgcatttttatccgtcctttttcggggcccataccaaaagaatcgagtaactggtaagtttgccctgagtagctgcggtaagattcttaccctgggttggcccagggtaaacatgtgaccttgctttttaaaaaattaaaaaagatgatattaaaaaattcattttgctaatttgtaagttgtacttaaagtctgctctattcaatgataaaattttcgttaaacttttttgtttttcactgagctagggagcatcaaaaattttgaaaattcttaaatttttttgttgattttttgtctatattacttttaccggttcaaaataatgattattcgattttggacaattttattttcccttttttttaaatattcgacctttggaacatgaaatacccacaaaaatatactgcgttttgcgtttaataactttccttataagtaatataatttcttgatataattcgatagctctaaatgtcctctataatcctataaaatttcatagaattaatgaaataatgaaagagttatgatttagtaatgatactaaaagaaacgggtaaaccaggtaattcgctaattttgctacttttctttcagatttgcgaaaaccccgaggaccacaactgccgttcgttgccgctggcggtggatgcgaatgatcacctcaattattttggagtcaattcggaggagtatctgaaggcgggatgcccccgagacatgctcctctgatgggaatggcactccctttgctcttccgatgagattggcactccttttgccattgccaattgatcctttttttaatcatttttcggtcgttttttctctgatttgccctttaattctgtaaataaagtgacatgacgagaaagaattgaaaacacaaagagaaagtgcgacaaataaatctcatcagcagcagcggtgtttcctaatttattcgtattggcaaaacaacgaaagcataacgcaatttagccgacttaacgactcacttcagcagaagcaggccgaggggcggagtcaacttccgattggcttattacgcgcgatgattgaattgcagtcagtcacgcgaatgcttataaagtggcggggagggagagggaaggaagggtcccggagggggggggggg

SEQ ID NO: 27973 - DNA, 996 bp, Heterodera glycines
cttcccttttctcttccctttcatcctcctctttctctcctctttcatcttctcttttttcttcccttccatcctccgttttcttcacctccctccgtttctgctcgaccttctcccatttggattcctcacaaggcaatgcccgcatggttaacgtttcccccaaggccttctccccacaacgaattgctctcgcccgtgccataattaaagtgttatttccgactaattaaaaggacttttttttataaatgcccattaatttcagttccccccgggcgttctccccgcactcatcgcccattcgccaaagggcgatttcttctcagtttcccgggtcgctggcattttggccgccaaaaaaacgcaccatttaattccgctttgtcaccccattatcatttcgcatgtcaaagtctcatttcacactgatcaagtaccaaaacagcagtgttaagtgatcagcgttcttttacattaagacaaatgatcaaatttcggttttctgtcgagtgaatgcaacgaattcccaaacgggcgttgagatggaagcgatggtaagtcaaatggaccaaaacaaacacacattgattaccgatacatgaatttgtcaaaggttgggtgttcggtggcggcactttgcctctacgacatggccaaatcggcaagtttacacacacggctggaatcggtggaattagtgggaaagcgaggaggacgaagagactttggaagggtggacgaagaagaatggaaggaggagaaggaagagaaaggagaagatgaggaagaatagcagagaaaaagaaacagaggaaatggagtgacagagaaagagagacgagaaagacaacggaggaagaaggcagagaagaaaagtgataaggaaagaagaaaggggccatgatcattgcatgtcttatcactggatttgctgatcatttgttctgcaatgaaataaaggaagggcgggggcactgatcaaagggttcagcc

SEQ ID NO: 27974 - DNA, 620 bp, Heterodera glycines
  unsure (1)..(620): unsure at all n locations
cctgcannggtctgtnntggctgggaacgcataaaaccgaccagaaccttattttttgagcgtctggtaaaaaattatgttaaaatcctaagtaaaaaaaattgaaaaatagatagaatttaggacgaagtgcgaaaaaatcaattgtccatagaaattagccttttggggctgtgggaggagggacatctgcccaattaaacccttcatttctttaaatctcatcctaccacttctccctccgtaattgccaattgatgggcttccaaatgttcactgtcgttaagtgcaggtacaaagtcgaaaacacaaacggcaaaggaatggggagggaattgcgagggacacatgccgttgtgcgttggatttggcaagtgcggttgttgcgtttcaactggtgcagataccgcttggcgttgaggtgtggtgtcaagttgtcggctgctagtcactggtggtgttggaggaaatagaatcggctgtatggtcgcggtggtcgcgntctccgccagggaggagncgttgnaaatggcttctaagggggnccccnncnnnnnnaanccnncatcaggccctttatggttggtggcacggggggagacggagatgaaagtcgtcca

SEQ ID NO: 27975 - DNA, 1700 bp, Heterodera glycines
  unsure (1)..(1700): unsure at all n locations
gcccattgagttcatttttagtttcggagaaagtttggcaaatcatttggattgggcaaatgttatatcatcaatggttaggtcaacaagttgtccattagcattttccttctgaattgaaactcggtgagcaaatagcacttggaaaggtcaatgtagttttggcttgagtggagtttgaagtggtatggtgtgtcggtcaaagggttgctaggcagcagctcaaacactttcaacgttggccggaggagttttgaaataaatttttggtggatcgagcgtgtgaatcaaacgcgacgggtcaatttgagctgctgacgtcggcgggggtggtgacaccgcagcagctggaaaacgaggtggagcgcctggaggcggagccaacggtttagttggctgttgaggaggtttgatgacttgagttgctgccggactttttagctgtgctggaggcgcagtaattgttggttttacaggcgatgttggctttacggttatgtctttttcttcatcatagtgtggtggagattcttccggaggagatggcggcgatttagatttagcggaaagcgaaactggaggtggcggtttaacagtagaaatgggtgctttcggagacagtgccgaactctttagttgcgctggcggtgccggaattgttggcttagcagatgggctctttacctcagttgttgtctttggtggtggagggaccggtgttgtggtcggggtagggacggttactggtgtctttgtcggttgaggggtggttgttggttgtacggctggtggagggaccggtgttgttgtttgtacggatggtggagggaccggtgttgttggttgtacggctggtggagggaccggtgttgttggttttgtggttgtaggaggggtggttactggtggctttgcaattgtgggaggcgctggtgttgtgacagatggaggaggagctgacggttttacagttgttggtttagcagggcttgagacaggcggtggtgtcgacacttttggcgtcgttttcagtttcttttggtgtttcttcataatggggcggtgactcctcaatcaccccttcatcatttccatcgtacaatgggggagagtcctcaatcaggacctcatcatttccatcgtacaatgggggagagtcttcgatttttccactctcgtctggtggtggaggtggtgtcggtgacgcatcccttttgtttctctttagtggtggcggagagtgaaggggtttagtccgatttcgatcctcttccacctcacgtgggagtggtaacagctttgctccgctacggttccgcaatgtgactgccaaaaagtctctgagctggtcaaccctgttaaccgatgccttgggcaccggcactcggattactcgctgtcggtcctcatcgatagtgcttcggtctgtgaaatgaatgtcaatccactgctcatccaatgtaccgatggtggaccacgaataggggtaactgatactgtgcagtccacacacccacgagccgttaaaatgcaaaggctttgggagtcggacacgaaatttgttgggctgattgtccgggtaatccgttacattgctgggcaaaacacaaagaaactgtttgacatgcttgtttattatcancacaaaatgaaaaatgcacatgcttttatancagctgagactcattaatccattcccg

SEQ ID NO: 27976 - DNA, 1099 bp, Heterodera glycines
aaactattacccaaaagccaatacaaaaaggcacacaaacgaaacaaaaattaccaaagtgacaattgtcaaattatggtgtataatggcacaggcacaaaggatttaatatttgatatttttaaatgttaattttaaaaaataattttttctcattaagaattttaataaatttttaacatgcaaaaaagtttttcaaaattgtgtatttttgaattttctttgaaaatttaagctaaaaatactattttcttgattcatattaggctggaataaaaaactatggaaattcatacaaatccggtctctactcatagacaactgaaagcacataaattccaaattatttaaaaattgaagcaaaattcactaaaacaattgttaaaaagccacaaaaaccaaataaaatgtgttgtgtacattcattacattattcactcattgacaatcaaaagttacttttaactttggcgaaatgttctcagccaaacggccgaattcgactgaatttaaaaattcaataattttaaattaaaaatttgccgatgggtcaaactcaaaattagagtgccacgggaccgggaattttgggcaaaaccgggaccgggacttgccgggacctgagaagccgggaccgggacctcgatttttcttcgggaccgggactaacagggaaattttaaaaattcaaaaaaatttttaaaatttttaaaaaattcaaattttaattattttttaaagtgaaaataatataaaattatttttttattttatttttattttataaaacccaaaagttaaagctaattaaattaatgaaaattttgaaatcaaattttcttcaattatttgaaacaattaatcatttttggactaaatgatcgaatattatatgaaattcagatttatttttcacatcactttttttcggcgcgctttttccaaaaaacttctttttgggaagaagggggtccggcggtgccgataggcgccgccgggggaaattttgaaaatttggatgtgatttgttaacagatttacaccaaaaaaggcaggtttttgggatttattaagctccatttgtatggattttcttcaa

SEQ ID NO: 27977 - DNA, 1340 bp, Heterodera glycines
  unsure (1)..(1340): unsure at all n locations
taaaatggaaaatgaaggacagctcagtcccgcgngaatagcaaatgctaatcgaacatgcgcaaattgtgcaacgcaattcgcacagcccttacagcaaattcgccgtcggcgctgccattttgaacaacgacggacagattttcagaggaggcaaagcaaaagcggacggacgcttttcacttgaattgtcccttcccattcagcaaatgtggaaaatgcttcttacggggcgacaatttgtgccgaaaggagcggtaaaataaaaaaataaattttaaaaattgtttattttcaaatgccaactttttcagcaatttgttccgcaattgccgcaattgggcccaccaaattttgcccaaaagcaatttgtgtagtcagtgagtcacgagaaattgagaagataatgaaaaaataatgaaagtttagccgatttgactgaacccggcgcaccgtgcggcatttgtcgtcaaactttggtcgaattcggtgacatggcggtgggttaattttataaacattctcaaagtgttcatccattagcaatacatggagaaagaatattcattcatttcacactaaacacattgaccaatttaatttcttttccattttcttttcggcaacgaattatttggtcgtttgataacattttaattattattattctttgaaaatgataattacttttggttggcgaataaatttcaagtcattaaccaaatgggtcacatttatttatacgtttgaatttggtttatcagcagaaaagagaagagattgctgaaaattaattacccctattaattgtggttatttatttatttatctttgtcaatttgtcttccattattaaatcgtccttttgctcccccccccccctctaattaaggttcttttctcccaattaaggtccttctctattcgcgtcccagcaaaaaattgttaaaaacgcgcgtccaaaatctgatcccaatggcattcactcccaacgcattgaacactttcaaaagtgacgcatcgatgagcaattaaccgaatgaatggacgcgcatttgaacagtgattgatcaaaccaattagagagttaatgatttaattcaatttaatttaaaagcaccaatccaatccccgaaatgcactaaaagcaattgtttaaattagagcatgaaaatgtttgttaaaaattcactaatttttagccatttaatttttgggttttaaattgtatatttctttttccaataatatgcataaatatccttttgtttngtttgggtattatccctgctttaattgngctcaacttttacttctcatgatggcattntctatggcat

SEQ ID NO: 27978 - DNA, 830 bp, Heterodera glycines
tttcaggaggcatttgaatcgtttgagcgcgttaacatctttaagaatttgttcaaatcaatgcgtacgcccgccgtgctcttcgcttcgatgattgccctttactgctgttcgttttgcttttcctgagccgctgtttatgtccaaaattatttcccaccaattaatcagatatttaatatatatttttaaaggtgcgggtcggacccctcccccctcgctcgcaaagggggccagccagcgaggggggggccggtgtaaaagagggggaggaggggactcgcagcgagggggtgtcacaaattttaaatttttttaacaaattctttaaaaagtccaaaaaaattttccctctgtaccccaaaatcccattaaaaaatcggcggccgacaccctctttttaatgtatgattatatttctgaaaccgtataaccagaaaagatttcgaatgaggcaagtcgtcgcctttttttttgctcttcacctgtaaaaaattcagtgctattttaattttaggtttccccccccccatgattaagggcctgaattcggtgaaatgctcatttttcaggccaggaattttttcaactgcttggcctcgacaccatggcctccattttctccctcttcctcacactgattattgtcgcgcttggcatttggacatattcacgctacagcggccaattccgccatgcccaagtgttcatcgacgagcgggtgcacttgctgtggcacaatatattggtgccggcttttgtgaacaccgctggtggcgtggcactgaacatgacggtgattagccagatattttgatttgatggttttt

SEQ ID NO: 27979 - DNA, 1264 bp, Heterodera glycines
  unsure (1)..(1264): unsure at all n locations
agagagaggaaacaaaacagaaatcacatttgttgagaaggagagaaatgagcggagatagcaaatgaattgtaaaagatatgcacgggcgaatgacgtcatcgcgagtggggcagagaaagttcagtcggtcgacacattgatcatcatgatcactttcgcctgccactgagcgcgacgggtttgggcaacgcttggagcaactgggggttcgacatcatcacctgagcgggggagggatcattaagtcgaagaggaggaattcatttacaactcggatttgggggctccaccgtgaaaatcttttcaaattacgaaccaattttttaacatatttcatctaaaactgcaaacttctgagtcaaatttctaatggagatttagatctgaaagcacacctgaaaaatttttgaatttaaagccgggggcgttgcggggaggcgggcagtggtctgaaagtcgaacaattttagaaaaatgaattttggatttgctaaatccactcacagcattgccttcttatggaggtttatactccacttccatggtgaggaggggacggggcgggggtggcccggttgttgtcgtcgctcttcacccccttctttcgcttcctttcctctttcttcgctgctgctgcgtcgttgcccttttccttcttctccaattgctcctccttcttctccaatttctcttccttcttctccaattgctcctccttcttctccaatttctcttccttcttctccaattgctcctcctttttctccaattcctccttcttgtccaatgccttccagcaatactaaaaggggacggagtttttatgaagtgtaattttaaaaagaaacccatttcttaggggttatttctgaaaatttgagtgcaatttgttaacagattttcactaaaaatgaccaaattttgtgattactagccgacttcacgaagtcactctctcttaccccttcgtctccaacttttccccacattttatcccaacaaatacgaagtccccccccctccccttttcgggccctcatacgaacaaattcagngggggggggcggggcgggggggggggggggtcggcccctccccctattgcataatatggggggtggngcttgaagtcaaaaaattgggattttagggttgtattttccttttttctatcgatcttacatccacattaataacatacgcatatccgacgaatccgcccgcgccctgctcagggtccatacgaatgacggacacctgc

SEQ ID NO: 27980 - DNA, 1276 bp, Heterodera glycines
ctagggttgagcggtaaccggtaattgtaaaaaaaccggtaccggtaattttcgggttgaaaaaccggtactttttggctgggaaaaccggtaaaaaaccggtactagtaccggtaccgctcaaccctagttgggcctttcttgatcttttttggttatgtgcctggttataattattattgtttattgcttgttgttgttgagcccattttgtgtgctaattgggtgtttaattatcaccggcatttatgtgtcagccgttcaaattacgcatttttaaagattttgtttacaaattcattttatttctatatacttattatttgttacatgcaaaaataaattttggggttcaatgccgacaaattcaatgtagataatgtcaatttgttgattcttttttaaagtgagctcacttatttccatttttaaaaatgttcgtcaactcacccaaaaaatgacatttcgccaactaatttcgtgcttatctgtgcgtattaagtagggttgagcggtaaccggtaattgtaaaaaaaccggtaccggtaattttcgggttgaaaaaccggtactttttggctgggaaaaccggtaaaaaaccggtactagtaccggtaccgctcaaaaccggtactcggttctcagttgtaccgtttttttcagtaccagtaccggtaccgctcaacccctaatttgaaggcccgggccttcgattgttcaacccctccaaaaaggggcctttaattggagaggggccttcttccagatgggtcttgtacatatatattattcaacccctcaaatttggaattttatgggacaaaaggtgttaaaaatatttttctttgcaattttatcaaactacttttcgagtgaaggatgtaaagcacttataataaacgagcctcatctacaaaaatatatgaaaacatatctctatatttttcacgtacagattgattctcttcaaaaagtttagctgtatatataataagatcattaaagtctagagcattattttttttagatactcttgatatttgttatatatttcctcatatttttttatattattaaaattttttatctttttatttttaatattattaataattcctactatttcttttatcttcttatttttattaaaatatttataattaggaaactcaaacattttattttcttcgtcattttcatcagaaaatactattttacttattataaaattttgatcttgttgatcatatactaaaaattttcctaaataataaaa

SEQ ID NO: 27981 - DNA, 1290 bp, Heterodera glycines
cgagggaaatgcctttacggacagcagcgaagtgatgttgacgatgaacaaacggaccgactgaaaattggaaaattcgaaatacaaagacaaagaatgttacaataaaattagacaaaaagcacctctgcattgtttaaggccgcataaactccgttgttcaataaaatcgctgacaccaaattggcctgcaaaaactcgtgccattgcgcctcgtcgcttagttcggatgattttttggccatttcaccgacagtcccggcgttgtggaagagcaaacagaggtcaaacggaacggtttctgaattggtaaaagcggaataagcgcatggaataacttttgtccaatgactacctctccacgcctttattcggctgttaatgctgcccaacgcaaagggttgtgttgccaagtccgcaaaaacgagttcaacaacagccgaggggtttctgcagaaaaactatattgaaaatataataggcggttgagcccaagcaatcttaagcctaaagcaaaggcttagtctaggcctttgtataagttgtaaatgacaccgaactccttgcgaatttgatccccaaccgcctcaagcgcttcttttccgcgagccaaaagaacgaaaaaacattcattcgtcgcaaaaaacttggccatttgaagggccaattctcgtccaatcccacggcttgctcccgtcacaacaataagcacttttttagcatccaatttagcaaatgaagacatccattaaaaaagaaaaaaacatttgcaatcaccaaatcacgaaatacaaaagcagcgtcaggacaaacttttgaataaaattaaaatgtttctttccaccatttatactttggcaattatgcaagacaaaacaaagagaacatgttttaaatgaaaggttaaagctgatagcaactggccacaaaatgacggtttatcgggaaagtatcacaggcacagataaagcattccaaatacttacctaaatagggttaaaaacaaaatgaactttatgaagaaactgccttgtattgcagtttaatgtccaatcgaattctacgagttcagactttttcttactttgccaaatcgtacatttttggtatcaatcgaaagtttgcaaccaaaacctgcgcttacaaaaacaaatcaaacatttatcttgaatatactcgaaaaaacagctaaatttcggattttctattgtaaatcttttcaatatttgcttttttcttttacgcataaattgctgagactttaaaccttcaactgatacaaaaagtgta

SEQ ID NO: 27982 - DNA, 1233 bp, Heterodera glycines
gggttaatcatttcagggaatcgcaaattgagccgaaaagaatgggatttgcaccgaatcaaacggactaatctttcgcaatttgtacataaattggcgagattaagaaagaaaaaaaatgtgtacaacaaagtcgctggcgctgttttgtgtgtacggcttgaagaagttggctcgttgtgttgcttgccgctaatgaggaggataaacaaaagtggttgggggtaattaggggattgatgtaattaatctgttgtgggaagaacaaaaagagtgatcagtaagaccgttgtaggaaaaaataattgatccatttatgactaatcaattgctagtaacggtttaattaccaaattccatttttgaaatttgtcggaaaaataaaacgaaaaaattatcattgttccgtcgtaaatctggcaaatccccatgttcgacggatggtcggcaccagaaaatgatgatgatgattatgatggtagtagtgttggtgggattagttgaaaacaaatttgtcgacttttaccaattcaaatgttaaaaacggcgattgtcaacagtactctgcgacctgtctttacttaatcgccataaaataacaacaaaaacataacaaaatatatcgagtctcttacaaaaagacaaaacgccaaagaaaaattataataacgaatccgtgtcatgtcgaacgtctcgccacaaacgccacatctccaccagacttcttccgctcgttgtcagcgcgtgaaccattcgccagcgactgtttccaggatcggcagcagttcattgtacagtgtgtgctgctctcggacgtacggtggtggcaaccatacaaaatggacatgtttgaattgagctcaataaaaaattgtccatttctcagtagaagctatattaaaatagaaatttccgtttcaaaaaatttcgttacataaaattttttttgaaactttgtctaaaattttgtaaaatttcaacgtaaaatttaaagaaaattatgacaattttttgtctctactttagaaaaaaacagcatcacagcaaaaaaaaaaaaactggggtctttggattttgatgcctaaaaaatttaagaaatcgggtcggatttccgggttttctctacatccacggctggaccgaaccatacgaggtcacagtccgtgttcggcacaatacgtccgaacgtgagcacattgggcacacattcttccgccaactgtacccaactca

SEQ ID NO: 27983 - DNA, 199 bp, Heterodera glycines
agacaaaatctgtgtaatttatgccaaaaggaattgaattgaggcgatacattgactaaaggaatgtggagccatcacatcattcataaaaaattaattttttgtaaaatttttggagttaattcaaatcaaacccccgcccccgcccccgcgggggcggaattatcgtgcccccgtccccgcccccgcgactctgacc

SEQ ID NO: 27984 - DNA, 1662 bp, Heterodera glycines
  unsure (1)..(1662): unsure at all n locations
agtgattaaaagaggaagaacagtgattacaattaggtacaactgtgattagaagaggtacaactgtaattaaaagaggtacaatagtgattaaaagaggaagaacagtgattaaaagaggtacaatagtgattaaaagaggaagaacagtgattagaagaggtacaaaagtgatgagaacaggtacaacagtgatgagaagaggtacaacagtgtgagaagaggtacaacagtgattaaaagaggcacaacagtgattaaaagaggtacaatagtgattaaaagaggaagaacagtgattagaagaggtacaactgtgattaaaagaggtacaatagtgattaaaagaggaagaacagtgattagaagaggtacatctctgattaaaagaggtacaatagtgattaaaagaggaagaacagtgattagaagaggtacaactgtgattaaaagaggtacaatagtgattaaaagaggaagaacagtgattagaagaggtacatctgtgattaaaagaggtacaatagtgattaaaagaggaagaacagtgattagaagaggtacaactgtgattaaaagaggaagaacagtgattaaagaggtacaaaagtgatgagaagaggcacaacagtgattataagaggaagaacagtgattagaagaggtacaaatgtgatttgaagaggtacaatggtgataaaagatacaatagtgatgagaagaggtacaaatgtgatttaaagaggtacaacatggtttaaaattaaataaataatgaaaagtttttataaaaatcgattgcattttaatttaaaatttttttataataaaatactctttttattcattaaatataattttgaaaattaataattgaatatttattttgaaatgaaattcattttttataaattcaaaaaataaataatgaaattaaataaattaattaaataatttataaaaatcttgaaattaattaaaacattaaaaataacccaaaaatacaaagaaaaataatgtacaccgtccggactcgaacttcgccccccccccaaaaaaatgatgcctcagaatccccaatcacacagggattctgaggtcttgacgatgtcaaaagtaaaatctgatcacgtattcgtgatcagcggcccaaataacgcctaaagacatgtttttggaagatttttggtgaaaaaatttctcaactcaaaaatcatgtgctcccccctatggtcccgaaaccaaaaatcacttttatttttataacaattcgcaaaaaagagataaaaatgtaaaaaaaaatttatattatagagaaaaaaattgcggatttttgtagtattttatatttccagaatatctttttagaaccgagttatgaatttttttctgaaaaatcgaaaatttccagaaattctggaataactttttttcttttgaacattataaaaccaaataaacctcataaaattctcccgattttttgctatttttaaagctttaattcacttanatagagcagtccttcattgagttatgaattttcaaattttaaacccaatttccaaggaccaaaaaattgcaaaaaaatanagaatttttaaatattccaaaaatctgaaactttaaataacatcatatttgtgctcaggaccctaatta

SEQ ID NO: 27985 - DNA, 1755 bp, Heterodera glycines
  unsure (1)..(1755): unsure at all n locations
ttgcaaaaccgaaatttgtgggattcaccgccggcgagtgacggattttacggacggatgagaaacggcgaaatggccaaggaaaagccgaaggaaatcgaacaaaacaagacgagaaacatagagaagagcataaaagaaagaccattagtaaggggcaaaccgatggaagggacagagaatggagaggaagggacaaaagagcacatggaagagagaaaaacggaggagagaatgtgagggaagacgaacagacgaaagactgcggaacgactgatccaatcttatatttccaattttgctttcttgattcaaagtatcaaatatgtattcagaccaattactaagaaattgtgtcgtgttgaatgaggaccgcagccgggggaatccccggtcaaaccgggggacgggaagccccgtacggggacaccgtgatgaaacaatttgaattatttactaaagaaagtaggaatttctctttgattgcacatttttaaatttatgttagggttattttccctttttcttctaattgtaagttcgataaatagatttatttattttattatataatataataacttttatttaaaagggtaaaaagaggcgataaaatgtttgtttagaaagaatgaaagggtgtgaatagacccgcgagacaaagcttattgttagagaagggtcgtaaatccaatcttaaaggcaaaaacaaattaaacaaaatcgaatggaaaattgttgttaatgatgagaaagaccccggtggaaaattaaaggaaaaattaacggaatacaaaaaaataatggaaagagtgagaaacacaaaagtaaatgttacatgtgatgaggacgagcaaaattagaatatgaaagattcaacgtgtgggacgaagacgccgctaacatcgtatgaaataaaatggcaaacgaaagatccaagggaaagggaacgaatgaaaccgaagcggacgaagaaacgatgaatgacgacggcgtcatccaaccgacgaaacaacgcccacctgttgctgcaattgaacgaccctttctttcttctgtccgttggcatccgtttcacgatcagagttaatggcggagctaagcgaaatggcggccaaattgctgcacaaattggaaacggaagacccctcgagattaagatcagagatgttgagcaaagaagtaaatggaggctgtcctaaagtcagccattgtaccaaagtagcaaagaaaagcccaccgtgttttctgagcacttccataaaattgtaattccgcggatcgacgcgttgagttagccaccaatggcgcttgatttcgctaatagtcgcgcgtaattttgggcccggctgaagcagccaacttaagacctgtggagggaaaagcggatgcaaaaacagtgttcagtcttcacttacctggtacaatccctcagaaatttcccagggaagttcgatttcggcatccacaatttcgtgagaggaacgaaagggattctcgaagaagacgagggtgtacagcaaaatgcctacggaccacatctcaacctcgggccccaagtatttgttcccactgagcactgaattcgaatactttgggtgagcagaagcatttcatcggattgggcaccttcgggtgagcagtattccatggtgccgtagaaatacganaagactattccttctccgaaaaaggcagccgaaaccaagtcaatgagtttgcacccgaaagtctggtcaatgattacattttcat

SEQ ID NO: 27986 - DNA, 1851 bp, Heterodera glycines
caaaatttgaatttttagcgaagaaaatgccgaaaaatactatttagatcggtgaaaaggcacggaaagatgaaattgttcgtacttaggaagaattacttttttatgcctattttaggtattgatgattatgtgatctaaatgttggactttgccatttacgtgtaacatatatttgatttttacacatgaattcataaaaaaagattggcatttagctgaactatgtacatatagtcaatcccccccccccccaaaaaaaaaagaaaaaatatcacaaattatacaccattgatttgtctcaaggagttaagcactaaaaaaagggtctccagtagcgggaatgggtttaaacagttttaagttggttaaaacttcgaaaatggaaagaatttggcacataactttttaattttaatttatcagaccaaatgcgaaaaatctgaagtttcgactttttgttcgagatcggttttccaagccattcccccatctgtttgtgcatcgctcaattaccacgaattaaatggcaatgcgacgaattgcgccgagaattaggccaattagagggatcatttgccctgcgggtacagtgtgatgggcacgggtatggtaaagtgatgtcaattgggctcaaagaggcgaatttcttcaattaattggatggaccgaatgaccaaaacggcaaattgagggccaaacgaaatggcttttcagctgtgaagcggacaaattcctccaaaagaagaaaaaaagtctcaaaaaaattttttggataatattcaatttttataaaataaaatatattatttctttttattcagcagatgaatccatcccttcggcattctttcagcatcgaaaacattttaacaaaaggcgtaaattttggggccttttctgagtaagtccgaaatgaaattgtttacaaaattttttcttaggcaagaatttgccaacaaatctctccaacgattttcgccatcttttccattctcgtgagatttgtttaaaaattattatgaaaattggctaaaatattaaggccattgcttccgcaccatttcctcggccgctgttttgacaaagtgccaacatttgtcttagaaccgccgccaaaagcatttccaactgaatttagcagcgcattttttgagcggaataatggagaacgaaaaggtgttagaagttagaacactcaaataccgtaacataaatgcaaaaatcccacggtaaacccgtaaaatacggtaaagcacagtaatcgtaaggaagaagctgactgctgggcgcttaaaatgctgaaagcgataagatccataaaaagaaagagcggatgtgcctcgatagctcaatggtagagctgcccatgagtgggtggacgagtgggttctattcccacccgatgcctaacattttgccattccttatttaatatatcacctaaagaaatgtaaaatattaatagaaaagtacatttaaattttaatcgatgcgtctctctttttgattcgtaattttagtcgaatttgaaataaaaatatttaattttttactttttttaggcatttcgttgtgctccttttttttggttttctttgtttttttagttgacaggctactttaaaattaattatttttcttgagaaaataatttttttattattatttttttaattatttttttaaattttttttaaaatttttttttaaaaatataaaaggaaaagaaaaaagaaaaaaaagataaactaaaaattaaaaaatcaagaaaaataattaattttaaagtaaaacactcctcggcaatttaatggaaaaactgaatgaattaattggtcatcttaacaa

SEQ ID NO: 27987 - DNA, 1003 bp, Heterodera glycines
ttaggcagtgagcttatctcacactcgaagaagcgcaaattgaggaggcgaattgaggatggccaaaatgagcaggcgcaaaattgaagcgcaaacagatgaagtgccaattgaggaggcgcgttgagaaggtgcaaaagaggtggcacaatttgaaaagacgcatgaggaggcgcaaaatgaagaggagcaaattgaaaaagccaaatttgaagaggcgcaaattgacgaagcacaatttgaagaagcacaatctggggcccattatgaagtcaaaggccaagggcgctggggcccattgtgaagtcaaaggccatgggcgctggggcccatcatgaagtcaaaggccaagggcgctggggcccatcatgaagtcaaaggccaagggcgctgggcccatcatgaagtcaaaggccaagggcgctggggcccattgtgaagtcaaaggccatgggcgctggggcccatcgtgaagtcaatggccaagggcgctggggcccatcatgaagtcaaaggccatgggcgcttgggcccatcgtgaagtcaaaggccaagggcgctgggcccatcatgaagtcaaaggccaagggcgctggggcccatcatgaagtcaaaggccaagggcgctggggcccatcgtgaagtcaatggccaagggcgctggggcccatcatgaagtcaaaggccatgggcgctggggcccatcgtgaagtcaacggccaagggcgctggggcccatcatgaagtcaaaggccatgggcgcttgggcccatcgtgaagtcaaaggccaagggcgctgggcccatcatgaagtcaatggccaagggcgctggggcccatcatgaagtcaaaggccaagggcgctggggcccattgtgaagtcaaaggccatgggcgctggggcccatcgtgaagtcaaaggccaagggcgctggggcccatcatgaagtcaaaggccaagggcgctggggcccatcatgaagtcaaaggccaagggcgctgg

SEQ ID NO: 27988 - DNA, 681 bp, Heterodera glycines
  unsure (1)..(681): unsure at all n locations
agcgaagtttggaaaggtcgcggctcccccaacaaaatgaagtggtcaatttgccattttcccctctcattttgcctttccacagaatccttccgttgggcggcactttggcatggctcggcgacttcaaacagccgcactttcaagcgggagtcaaagcgattaaaaagggtcggcaaaaatggggggaaaagccggataattggccacttaattattccctttcagtgtatggcgtagagccggactttaccaggtaaagcgagaaattgaagcggcaaaacaaacaaaatgatcatttctaagggagggcggctccatcccagtgactctgaccttccaaaacctaacgggaaagagtgtgatgcttttgccgatgggcgcttcggacgacatggcacattcgcaggtcaaaaaggaggaaggatgggagaaatcaaaggaaaatgaatatttagaacgagaaactgaacgtgaccaactacgtgaacggcatgaagatgttcgcggcctacattttcgagtgcgccaaaatatgaactggcagaaattatttatcactcatagacattccatttattttccattccatcgactntctaacttctaattacttttaaaaccctttgttaacttcgaaaatatatcactttctcacttaattcctttgtgtgtaactta

SEQ ID NO: 27989 - DNA, 1696 bp, Heterodera glycines
ggtcgataacatcaattcaaaaattggtcctgctttagtcggacaaaactttgccgtaatgcagcaaaaccaaattgacaaatttctcatcgacttggatggcactgacaacaaagggaaacttggtgcaaatgccattttgggaggtaccttttgttttatccgtgttgtgcttataattgaaaaaatgttatttggtcaaaatactaaatgtgcatgaaaaggatttgatgagattatccgtcagtgaattattaattgaacctaaattttgatggtcttgattagaacaaaaaccactcagaaatttgctttctttttaaaaaacatctattccatctataaaaatcctcatttctcttcattggttattgcttttccattaagtctcgttggcggtgtgcaaagctggcgctgtgcacaaaggccttcccttatacaaacacatcgctgagttggctggaacgcggaaggttagcgtaaacgaccggtacacaatgtgccttacaattaattatcactgcatctttaggtgattttgcctgtgccggctttcaacatgattaacggtggatcgcatgctggcaacaaattggccatgcaggagtttatggtgctgcccactggagcgaaaacattcaaagaggccatgcaaattgggtccgaaatttaccaccatttgaagaaggcatgcattttaatattgttgagtgactctaagacaatgtctattttaggtcatcaaagaacgctatggattggatgcaacttcagtcggagatgagggaggatttgcaccgaacatccaaaacaacagagagggattggatctgctcaaagaagcgttcgccgcatctggacaccaggacaaggttaatacactttttgaagtatacaatttatcctttaaggtcattattggtatggatgttgcggcaagcgaattctataaagagggaaaatatgacttggacttcaaaaagtggaactgtttttttttttgcgttgtaaaattcattttaagtccaaacaccgataaagcgcagtggttgaccggagaacagctcgccgatatgtacaagtccttcatcaacgactatcccgttgtgtccattgaagatgccttcgaccaagacgactgggaaaattggagcaagttgcaggctgccatagacattcaacttgtcggcgacgatttgacagtcaccaacccgaaacggattcagaaggcggtgcagaaaaaggcatgcaactgcttgttgcttaaggttagtctgaagtcatttaacttaatttgacaaaatattggttgaggtcaaccaaattggcacggtcactgagtcaatcgaagcttcaaaactggcacgaaaaagcggatggggagttatggtgagagggtggggatattacaccaatggaatgaaatatcactttaggtttctcaccgttctggcgaaacggaagacaccttcattgctgatttggttgttggactcgccactggacaagtgagtgaacacattcattaaaaataatggtgttttctagatcaagactggcgcgccgtgccgttctgagcgtttggccaaatacaatcgtattatgcgcattgaggaggaattgggcactgacgctgtctacaccgggaaaaggttccgaaaaccgcaaaactaagagcgtgagcaaacgaagaaaa

SEQ ID NO: 27990 - DNA, 683 bp, Heterodera glycines
  unsure (1)..(683): unsure at all n locations
atcatcatcattttctggtgccgaccatccgaacatggggatttgacagatttacgacggaacaatgatacaaaattctttttcttttttttttgtctgttcgtcggtcgacaaaaaaatgtgccgattgatggatgtgactcaactccttttttttataatcggtattaattttttaacatttacatatacattttgcacattcataaatcgcgacggatgaacaaaaaatgccgaaatttttggaaacaaatttgttgtcttgttgataataatccatattaacaactgtaattaataagcggatctaaggaaaatgtgacttcttttgcaacattaacataaatttagtttgtccacatataaatggtgcttaaacagatttgataaacttttttggcattttgttgttaaaagcattgtttttgcagttttgacgcaaaaatttcccataattgattaaaattttttcttttctcacattggattatataaattccgtgaatcccacctcttcacgccccactcatttagacttttttccaagtcaaaatatttttctaaatttatgataattaaaaaatgcaatttggtaattaaaccctatcactagcaattgatcagtcataactgatcactttttgtgcattctgcctcanttaatttatatttcacaaatctac

SEQ ID NO: 27991 - DNA, 1339 bp, Heterodera glycines
  unsure (1)..(1339): unsure at all n locations
aacaaaatttaaaaaacgggcgcgaagcgcccgttcgaggccgcgaagcggcctaaagatcgctgataattttttaaaattcccaattttttcacaacccatagcttatctaggtagcgaagctcccaaagcgcgaagcgctttttcttaaattaatattttttattaaataaatgttttaaattaaaattagttattttttaattatacaatttcatgaattttttaaattgatttatcaaaaaattaataaatttaatttaaataaatattcaattattatacacttccaagttctttttaaattaataattatctaatcactgttgtacctcttttaatcacttttgtacctcttctaatcactgttgtacctctcataatcacttttatacctcttctaatcatttttgtacctcttctgataaccaaaatttaaaaacgggcgcgaagcgcccgtatgagtccaacaaaatttcaaaaacgggcccgaagcacccgtccattccaaaccatatttaaaaacgggcgcgtagcgcccgtccaagctcaacaaactttggaaaagggcgccaagcggccgaaaaggtccaacaaaattttaaaaacgggcgcgaagcgcccgtctgaggccgcgaagcggccgaaaatgcacatcaaaatttaaaaacgggcgagaagcgcccgtatgagctcaacaatttaaaaaacgggcgcgaagcgcccgtctgaggccgcgaagcggccttaaaaccccttaagattttaaaataaattccaaatctctaaaaaaactcaatgcttatctaggtagcgaagctcaagaagcgcgaagcgctttatcccagctaaatagccgacggttcacgcacccgctagttaattaatatatacgttatattggcaaggagtttcgttgctaaaaccattttctcccggccgaaggccgggagcgccctgaaagtggtggaagggtcttacaactttttgaggcgcatccgggaaaaatataggttttccggtccaagggccaactgagtaccagggactgaattctcacttttgtttgcatttgaaggcccctaactttttttgtaaaactcgaatcaaaaagtgcccgctgtgagggcactccgccaaagtgtcctctaaatgctggtatnttttanaattttttttgagcaaacccctgggctgcaaaaaatggcaactgaagcgtgctcaaaagtacacttcagtaccaggtgaataccgcgccaggggttgatctgagcggggggtggcagcgaacttattgtagagctttgaagctcgattttttgaattaaaaatttcgaaa

SEQ ID NO: 27992 - DNA, 1033 bp, Heterodera glycines
ctttcgtttttatttattttttgcaaattaattcttaactattttttcagaaagggttctgaaacgcaccaaattttatttacatgttagtttaggcactctgatgctttttctatcaaaaagggagatgaataaaatttttaaaaatttttaattcctttttaaacaggccaaaaagtttaggcttaacttttttttcagaaactgatcagaagcgcaccaaactttgcagggatactgaaaggaagagaaataacctattttaaatattatctagtcagttcatttaaataatttttatccaaaaaatttttttttgggttttcggggcagtccccctgaaccgatgcgcccagatttatggggagaccgaatccttccggaatagcttcactatagcctgtactttaattctgcgttggatttttgctccccataattgtttgagtaccccaaacggacacttgaaaaaatcgatttatttttgttttcggggcagtccccccgaaccgatgcgcccagatttatggggagaccgaatccttcgggaatagcttccctatagcctgtactttaattctgcgttggatttttgctccccataattgtttgagtaccccaaacggacacttgaaaaaatcgatttttttgttttcggggcagtccccccgaaccgatgcgcccagatttatggggagaccgaatccttcgggaatagcttccctatagcctgtactttaattctgcgttggatttttgctccccataattgtttgagtaccccaaacggacacttgaaaaaatcgatttttttgttttcggggcagtccccccgagccgatgcgcccagatttatggggagaccgaatccttccggaatagcttccctatagcctgtactttaattctgcgttggatttttgctccccataattgtttgagtaccccaaacggacacttgaaaaatcgatttttttgttttcggggcagtccccccgaacgatgcgccagatttatggggagacgaatcctt

SEQ ID NO: 27993 - DNA, 335 bp, Heterodera glycines
ggggagggaggatggccattcatgggacgcataattccgactagaaccttctttattttaacttgcaaaataatggccacacctactcaaattgaattatattttaatgttgcgttgagtttggtcaagaaagctggtaatgtaagtaccatattagtaaaatgtacaaaccatttttaaacggttttagcttgcgaagaatgcatatgctcagcctttgggtgtggtcaagacaaaaagctcacccaccgattttgttactgaaacggaccaggctgtggagaaacttttaatttctggactttctgaacgttttcccgaccacaagtcattaa

SEQ ID NO: 27994 - DNA, 2337 bp, Heterodera glycines
  unsure (1)..(2337): unsure at all n locations
ttcttgatggtccccaacaccgcaaagaaggacgttcttcttcgactgttccagctcgaattgcaaaccgcgaagaagcgtgaccgtaagtacaccaacagactgtcgatttataattgaccaccgaagtcaaacggactgatttattattcgcggattcgttcttttttccagccgtcaatgggaaaatacgcaatacgatggtatttgtgaacaccaagcgagacgctgatgttgtttccacctacttgaaccaattcgactttaacaccaccacaattaatgggtgagtagtccgttctctttaattcagtcttcttccctctccctttaaagaaatcgtccgcaagaaatgcgtgaaaaggcattatccgattttcgtgccggcgtgtaccaggtcactaaaaaagcccaaccatttttcaaaaattcatcagattgtcgtcacaacggatgtttgcgcccgtggacacgacctcaaggatttggaccatgtcatcaatatggaccttcccgcgtctggagaagggattgacgacagtttcacgacgtatgtgcaccgaattggtcgtaccggtcgtttgcagcagggctcggctaccactttctttgacattcaagccgatgcgaccatggcggagggatttgtccaggcaattttagaaaacaattttcatgctttaatataattttcagagtcttcaagaagcgactcagccggtgccagactggctcaacaaattggttgctcgagagcccatcgctggttctggccaagtcactgacgaggagctgcttggcattttgtgaaacaaccctttgatcgttgcaatctttttcttttatcattattgcgatcatttggatttttattattatatgcttaccaatgattttgatcttctctcttttttatgtttacaaaatgtgcttggcgcgagataaattggagttcatatgtgcctgttttcttatgtttatttatattgttatcattcgaaagcactgagtttgaagaagttaatactaagaaattaagcaatacctattttaacatttaaataaagttactaaacgatagtaattgcaatacattattaatcatattttttgtcaattacctaaacgctgagattttgtataggtattaacttttctctagtctgtaaaattctccaacaaaattgccgaaaatttgcacttccttcgaaatttctgcaattgtatttccgtcgaccaaataaaactgtaaatcggcattccgttcctttgctttatggcctcttcagcaacctcttcctatggcaactttgagctgtcaacaaatttggctgaacttccgtatggtttatttgctcaattgtccagccaatttgaaaatgagtgcctttggcgattggttttcaccgatgacgaccagaacagcccattctaccttgggttcgttcgttgaatgttgttgcttttgctgttcttatgcatttattccgtcgcacataattctctccaaaaaattccgtcagaatttgaaatctgataaattgaacatatttatgcttaatgtttggtttggttgtcttcacatgcttttatgcgcttgaccatttttcagcttcaatgaggctgaccgttgcgcgaggatggccaattgtggcgcccatttgctgcgactgctcggcaatcggggccaaactgtcaagggtttgcagcattgaccacatcactgtgaggcggaaatgtgccaaaatttgaggatttctctcccggctccattcattggccaaagtccatggcactaaaatggacgtgcctcagctgatccttcgacgccgtttttgtacttttttaaaaattaaaattatcaatgacaaaatgccgcaatttttgttggccacaaatcttgcaattaaatcccgaattggctaatcgttttttgttttcggcaccgttcccctcttttgcaggttccgtgatttggtctcggccggaacaagtgttggtcagcgtcgagggggaggcgtccgatcggcttcgtctgcagtgtaaggccagcgctttccccaccccgcgctaccaatggttggaggagggaaaagcgatggacggggccaaccaatccttgttgaccattgtcaggtgaatgcacaaaaatagccgtttcttaccaattttggtccaaaaaggtgactttttaaagatttttgagccaaattttcgaaaataattggtaattttgtggtgcaggcaggcgccaactaaaaaagttgaaaattggcgaaatttatcctttcagtggagatttcctgaaatcttccanaatgcatttttaatgaccca

SEQ ID NO: 27995 - DNA, 1638 bp, Heterodera glycines
  unsure (1)..(1638): unsure at all n locations
gctgacgggaattgcttttataattctttatcagttttgcttactggatctgagttgaaagaaaatgctaggattatacgacgcgcgattacagagtatattgaatcagaggtttagcttaacgaaatgggaattccatggcacggatggtgggaaatgtttcatcccggacaaacattatatgattcaagtgggaatgaggtacagtatttttttaagtttgataacgaaatctttctatagataattagtatacgtacatatgtccagaatcataaggagccggcaaaatctgcctccgaaagacataagtggggcagcaatgttgattttctagcagctgcaaaattattccaaattaatgttatcgtatgtagtccaaaccctcagagaaaagaagattttggaatacaatatgtatggaatatttatactccggatatgctggatacggtatccatttaaatacgataaatcaaaatattaggcatatttagatgcttgttggccagtcgagagaatataagtcaatttttatattttttgaattgggacatttcaaagcaattatagatcctgcggagttaaagcaaaactagcttattataaaattaaaagcatttgcataattttctttaaataataacaaaaatttgctctttaaataatcaagtataattttattaaaatagtaaattgatttgctttttaattggttgattaatcatattcaaatataattagttaaaagattaaattaaaaaccaatataaaatatttagtttgcttaataaaatttattttgctttgcttgattgctgtggctttgtgtgtatacggtttagggccgaaacacaaataataattaatttaaataaattaacccaaagagacaccgtactgatgaggcccggtctctttcggttaaatttgcacgtttcgcgaagtgcccatttttgcactgtcgcgaaacgccccatttttacaccatttttgcactgtcgcgaagtgcccaatttttgcatttttcgcgaagtgcccaatttttgcactgtcgcgaagtgccctttttgcacttgtcgcgaaatgacgtagcaccaactataatgaatggaactgaaaatataatatacattaaaccccatgcaattattaattaatatcatttaatttttatcaatacaagaaaagtgtaattttatttaaaaagtatttaaccttaaatatttaaatacacactattctgatcaatcttaccaaaacgagccgatagatacgggcgacccaaaaaatgcattcttatcaaagggaacaatttgtaggatttcgatatccatgacgtttttttgcctgatgcggcatgtggaaaatgtgagaattaaatatatatgaattttggagttttaaactcttactcataatggtataaaagtaaaagctaataacctatgttcaaagatagaaaatacatatatactagcaaaaaaaatctagtgggaaacccnagcagttagattctccttattaaatacacccctaacaaagggagagtacacaagtgacggtgacttccgaatgaacttacaggnntangtagataccccccccctttggattacaaaatttttttatttttgc

SEQ ID NO: 27996 - DNA, 1285 bp, Heterodera glycines
ttttctatttttaaaaaattaattgacaattttacaatctttttttcctttcaaatcgtttttttcggcccaactcaaaaaatatttacctcacaacggagtcgggccgtgcttcggcatttataatcttgtttccatctggcccttttttcatcgccctaatcatgaaaaaaagaaatttaaaaaatcctcttatttgctttttttaacaaatttaaattaatttaattatcaaaactcacagtcgctgttgggtccatagcctttgtcaaaggttgaaggcagcaaatagaacaaataaaagctaaaatacaactaaatataaattttataggcttcactttactctcaactataacattgtgactaaaaatacaaaaaaatgggggggggggagggcgtgtaattgattgtcctttcaagtgcatagaaaacatttatccattagaattaatcaattccactaattaatgaggaaggaaaggtaaggagaagagaaatattatttgatatagaatttttttctgacatttaaaaaaatgtttatggatctctatctagagagtttggaatttatatgaattctaaaatataacctttcaaataccttacaagatttttggagtgaaagaattcgaatttaaaaaaccataacaaattctggaaaaaggattcttaaaaatttctgttgttttttttcgactttttatgaaaatttcctcccgaagagttatgtttcaacccgacatttttaaatttcttcattcattcgcgacaaaaatttgacagggatttcctccccattccccatcttttctctttcataatatggtttttcaaatacttcacagaggaatgggggcgggaggcaattcgaaggtttaaaaacgggccatgtttgggctgcactttttcactgccaactcacactccaccagcaaaattttacaaaaatccatttttcaaaaaataagtgaaattagaagaaaaaacaaaaataacatttaaatttaaaaccttttaaaacaatcttaatttacaaaattaaaatctggtaaattcaatcataaaataatttagtaatttttcaagataaaggctttttaaatcccaggaagaaatatcggtttttaattttttaaaaatttttagacttgagatggaatcgaaccctagacctttctgttcaacagctattggcttatcacccaaacccttccctttcgttctgtatgcctcttgttttaaagagtttaatcgtccgctggcccaatccttacaatat

SEQ ID NO: 27997 - DNA, 769 bp, Heterodera glycines
  unsure (1)..(769): unsure at all n locations
atattccaaatatnctatcatattnnctccatcaatattccannctcnnattttattnctttttatnatcccttnccaaatnaannctcaattnaaaaattttatttttttaccttttttgaaaattttcacaaattttttttcaaaaacaatacttttttgttttaaaattttttagaaaaactgggatttttcatcatctacgtcttaaacattttttttgnatttttacagcctaatcaaagcatggttcactgaatcgtacaagcacatgaaaggggttccgataacagtggaagagatggaatcgaaatgtgaaatttttttaaattttaatattttccataaaaaatatttggcgctaaaatttttatttgggtggtttggaatttttgctatttagatatttcctatttaattataattagttttttgaatttctaatttagggcaaaaaacttttattaaatttaaaaaagaaaaaacttagtttttcgatcaaaaacgggaattttttaagcattgcactaatagacgtaaatgcattaataattatccagggcattttctgtcggcatttttgccattgacggaatgtttggtggcattatggttggtactgttgcggacagattagggcgccgtaaatcacttctgtacaacaatatattggcgatcattgctgcggcactgataacactggcaaaatatgtgaatatttattatttgatcatcattggacaattcattattggatcgaatgttggta

SEQ ID NO: 27998 - DNA, 1503 bp, Heterodera glycines
  unsure (1)..(1503): unsure at all n locations
ttttttcgacaaaanttttgctaaaaaatgtctttttctcatatttgtacggcctttnggggtcaaaacggctaacttagctgatgggggccgttataagaggggttttttgaaaaaatgcgaaaatatgtacataaaatatggacataatgccaaaatatggaaataaatcgcgaaatatggaaaaatatggataagaactccttcctagaggcttcaaacaaagctaaaaacatgtttttcatgcgtttcaggcctccaacagtccaggaaaaaaatatggatttcatataattacaaatctaattatcattgtcactttctaatggatcagtatcaagccaggcactaaaaataaaatttaaattattgattttttggcataaattatcgaagcttttttttataaatatgtccatttggtattttttttaaatgtttaatgttttttacctatacgatttttgccacatacaattgttttttcttgaccaaattctcaaataaacgcagaactcgggtcaattaaatatttatttttgaagtcagttgagacctaacagaaatattaaatttagcatctgaaaattttgtcgtgttctctttttcaaaattatacaaaaataatacatttttttccacaaactttaaattccaaccttatgcaaaattagatgatttttgaaactttgtgcctttataaatatttatttttcttataaagccctaatatgatgcgaacaaaaattgtgcagtaatttttgctcagtttttaacatattaaacaaaattaaaaatttataattcaatatatttcttaattttaataattcttatattctcgacagtgaaaagagtttgataataactgtacacattgtaagatgaaaaaacttcattattgaatacaattttgagatcattaccataaaatataagatatttatgaaatacattttaattaataatgtaagaaatgacaattcctaacttactaaaaaatgaaactttaaaaagaaattaaaaatgactgtcaattaactattacatatataaaaatagcttctattagttagtcttttttaattcatgttagtaagttattatatcatccgaaaattatttctaataaaaaacacatggaatttgttcataagcatttttcatgccagtcctcgcacacgaatggctaaggagcattttttagacaattgcaaaaatattgaatttccaaatttataaatttttattatatgctaaaacaaattccatttttatatacataaatttttttccaaaagttctgacaaaaatttaattttttttcgattttaagggtgtatttttaaaaaattccaaaaagtcgatccttagggtgtatttttcgcatttttcttatgaaaattttcaaacaataaccgaaatatgctctaaaaacgcaaaaatggccaaatatgcacttattctcaaaaaccccccaaaatatgcttttatatgcactaa

SEQ ID NO: 27999 - DNA, 1447 bp, Heterodera glycines
tataagtagtgtaaggtcaggtaactggggccatctgagcgccgggacatttcagtcccagcgctcagccggccatttgagcgccagttggcgctcaaatggcctacgccccccgagttgtcgaccatttgtcctagaccatttgtcctattgtcgaccatttgtcccaaccatattatattgtcttttaattcatcagcgatctaggggatccgaactttgacaagtcgtcccatcacactaaccattaggccatccagacaaacataatttattttattattttgtgctaaaattaattctagaaaaatcatcaatcaacaatgtgtgtgtgtgttcggtcacaaaaaaattagggactgaatattttaaacaccccaataagttcttcacggcaaaaggggcaacgcccatcaattgaaacagtttcggcgcatcggttgcagagggcacgatgaccacatggaatgcatgcataatttctctaaaatatccaaaattagttttgcattaaacgctgacgacttttctggtatagcaaacggcgcaaagtgggtcgtcgtcattggaaccatccatatctcgtaattccaatatttcttctctcaaatctttcatctcgttgaccaaagttgcctttgtctctctcaacacacttatttctcttattaattgttccttttgttgtagcaattcgatttttttgttatggatttgtgttttcctatttttaagatgataaacatctcgttgcagttggtccttgtcgatttctaacccaatgatcatcgcttcaagccgtacaatttcgaaattagcaaatggttggtgggacattgattatttttccgtgctaaaaaaaagaaaattatatgattaaatcggggagggataaaatgggtcaaatgtgtgcaacatctctatataaataaacaggaagttgcattaacatatgcataaaaatgtttattgcaccattcactctaattttgtctggagctactggtagtggcaaaacgcaatggttgatgaaattgttgagaaattacaaggaactaatagacccgccgcctgcaaaaattctgtattgttcagagatgaatgagtcggttcttgatctgatgaagcggggaattgagacgcacaacggtttgccggatcaagcgttgatccagagccagccgaaaccactgctcctcgtgctggatgatttaatgctgaacgtgggaagcgattttctggatctgctgttcacacgcggttcacataactggaatgtcagcgttatttttgtcacccaaagcctgtacgggcgtaacattagaacagcgcgagctaacagccattatttggtgctgacaaggaacccgtctggtcaactccaggtcagaacggttgggtcacaactatgccaaaacgactcaattactttatggaggcgtacaat

SEQ ID NO: 28000 - DNA, 1333 bp, Heterodera glycines
  unsure (1)..(1333): unsure at all n locations
caattccctaccgccaattccctactaaggcatttgggccatctccgtaccaaaaaatttttcgaaaattttcggaaaaatttcatggattgcgtccttgaatggcaagaacgtcctggaaatcggttcagtcacttgaaagttgaaaatttccttgaattcaagatgtccttgaaaataagtattcaaaagaaaacattcaaaagtttaattttttgaactttatgtaaaatttttattaacatagcattttttggtacaaaacctagttaaattgaatagaaatctcaattttccccgggacgcctatcgtcaccgcatgacacctttgccccctggaaattttttggaaaaagcgcgctatgatattcaacttttttaataatttcaaaaataataggcaaattgtccaaaaaaattttttgtttttcgctgagaaaaaaatcaatcacaaattttttaagagggctgaggaaagagtcgaagtggagggcgaaggccaattgcaagacgaaactggaagtgaaagtggagatgaaaatgcagaggaaaatgaaggaggactgagcttcgattccgacattttgagacagctcaagaagggcatttccgaaaaattcacccttttcactgaacctttccgctggttaaaaacgcctaaattggtgtcgtatgcaaaagagcatccggacgaagtaagcatggaataaaccaatggaaaggattaacagagaaaagacccatggactagggatgtgcgagaagtgataaaattaaaaaatgtgaagccacagaaaatgtaaacaacatttttggctcatgtttcgcaattaacccgtgttaataagcatatgtgactgtttatattttgaattttcgaattattcggccctagttcggggttagaatggaacgaaatttttaattttctcattaacccaaggtctacccaaactttaggaagcccagaggatatgcactgataatcaataaccatgactttggcacacaccgaagagctggaacaaacttggaccgtgataacctgaccgccctcttcagccaaatgggttatgtcacccaaaatgctgacaatttaacagccgaaaggaaaagaatggacaaattccaagcgaatgaaatagaagtaatgatcgataagcgcgaagaaagggatacgcccacccatggtgccggacattccgtcatcaaatactattttaatgtacttttttggtgtttttaatatttangcattttgggtttttagggcatatttgangggatttgtagtgcatatttgacattttttagtgcatataaatttgcccta

SEQ ID NO: 28001 - DNA, 554 bp, Heterodera glycines
aattttcaaaaaattcacaaccccctagaattttttttcaaacttcccgattttgactgtgttttatgggtgtagattagagatcaacatgtacctggatccagccctgtatttttcctggatccaggtacaggcacaggccatttttcggcaacctggatttttcctgtacatttatattcctgtacttatgtacagacaaaaaataggtactggccattttttgaaacaggtagaacggttttttcaaaatgttgatctctagtgtagatcaacatgaaggagtgatatgatcaacttgctgtgaacattttgttggtcaacatgaaaaattgacttagcaagaattttttcaaatttttctcttcgctatgcttcaaaaaatgtcaaaacattttgaatatttttaaactcttaaattttttcagttgaaatttcaaaagttagtgatacatattttcatttattcaaacatagaaaaaatttaaaaacctgaccctggcgccaaaacgtcggcgccaaaacgtcggcgccaaatcgtcagcgccaaaacg

SEQ ID NO: 28002 - DNA, 891 bp, Heterodera glycines
ctttcactttctgttctatcgttacaaaaagggtttgggcaagggagaagagattccatccttttcaatggccttataaataaaatcattcaatttattcctctgcttttgcttctgagtctatgcgtcgtccaaatggtcgactgcccccagcaaaacggacaccgccagcaattgcctctgttcaatgcttccgagcattttttcgaaggggctgagaaactatttgaaatttggttcgataatgaccagcagaagcgagaaaatggccacaaaagcacactgagaaccattcccgagaacgaactgcggcaacttctgaacacggccgggtgccacattctccaggcaactaaaaagcagagaatggcaataaaaatgatagatatgtagccattgtttccggaagtttagtccgaaacgttttatatataggcttacgagaatcaccgtgcacaatacatatgacatcaatttgagcaaaataataaactaatttgtcaggtgcttagaacagctgaaatcgatgcgtatttgctaaggtaaacacaaggccttctaattgtaagtattccaatgttctttgtttctttgacccattagcgagagcagcatgttcatctcggatcgacgtctcattttgaagacgtgcggacagacgcggccgttgcttgtgatcgaaaagttgttggagttggcacggaaacattgccaaatggacacagtgaccaatgtgcgtgtggtgggaattggccttttgctctgagttttgtcctttcaatctctgtcgttattgctttgccaggtgtattattcgcgtaagaatttcttccggcctcatttacagccccaactccacgccactttcgacgaggaagtggattaccttga

SEQ ID NO: 28003 - DNA, 1476 bp, Heterodera glycines
  unsure (1)..(1476): unsure at all n locations
aaccataatgagtccaacccattttatgagtctaatcaattaaccataatgagtccaacncattttatgagtctaatcaattaaccataatgagtccaacncatnttatgagtctaatcaattaaccataatgagtccaacccattttatgagtctaatcaattaaccataatgagtccaacccattttatgagtctaatcaattaaccataatgagtccaacccattttattagtctaatcaattaaccataatgagtccaacccattttatgagtctaatcaattaaccataatgagtccaacccattttattagtctaatcaattaaccataatgagtccaacccattttattagtctaatcaattaaccataatgagtccaacccattttatgagtctaatcaattaaccataatgagtccaacccattttatgagtctaatcaattaaccataatgagtccaacccattttattagtctaatcaattaaccataatgagtccaacccattttattagtctaatcaattaaccataatgagtccaacccattttatgagtctaatcaattaaccataatgagtccaacccattttattagtctaatcaattaaccataatgagtccaacccattttattagtctaatcaattaaccataatgagtccaacccattttatgagtctaatcaattaaccataatgagtccaacccattttatgagtctaatcaattaaccataatgagtccaacccattttatgagtctaatcaattaaccatacctttacaataattttgttcatgtcaaacaaaccctatattttttgttatcagccaaaagcactaataataagtctgaataaggtaataataccagaaaacataagcatgctaacctttaaaaaggtacaaacaaaaataatcaagaattgctaattaatcatatatcttttttgacaattgcctaaacacttagatttgtataattatctttttttagactttgtgcgttaaactgataccaaaaatcctatgatttgttcaatatgaaacaaaaagttctgattcaagaaactcaggattcagttgatttgactcgtaaagtgcaatagaacctaataaaatccttcgattgtaatttggcaataaattctcaatttgtcagttttaatacgtcggaattgggcgcaatgaccgcgcacattgtgcaaaaacatccgcaatatgcggccaaattgctggcaaaacagctcgaatttggtgaccaccacagcgaacaaccgggcaacacaatgccaaaagtggaggagggggtaaaagggccatttacaccaaatagaggggaagtggtcaaatgggggggggggcaccaaaaggtagaaataaattttgacgggttttaaaaatgagagcattgtcaccggatgtgaaaaatttgaaggatttgacgcaaactgttcactgattctaa

SEQ ID NO: 28004 - DNA, 717 bp, Heterodera glycines
ataaactggattagagccgtctttttatttatgaataaatttggcgaaaaaaaacaaacaaaacgaaatttcgatcacttttccccgatcataacattttcttatcactctgattcatcacttctcaagtgctgctgttgattaacgccgtcgtcatccaacagttcatccccgtcctcggcaccacttccggcttcaacatcgctgacgcatccgtcttcggcacattccccgtcggcattgtccatggcattccgtttccgatgcttgtcaaaaaaggcacagcgcgacggttggaagcaaaaggtggccaacaaagagacgaaaagcatctcgacacagagcaaaaagcaaatgtaaactgtgaggagaaatgaatgggaatttaaaagtgccaacaaataatttgtgccacttttcaccgctgctcacattgtgccaccgccgaagagggcaatttggcgggatcatgcgctatggtcggcaccatgtcgagaatgccgaagaagtcgccgacaaacttttgcacggatcaaaacagttggcagaagtcgacgatacggaagagcagcaaaaaactgaaaaaaaattcgtcgaattttttccatatttcatttgaaaaattgtgagacgtgccgatattcgtgcaacagcgaagcgccgaggggcacaattacgtaagagccgtaggagccaataaacatggaaatcatagca

SEQ ID NO: 28005 - DNA, 1784 bp, Heterodera glycines
  unsure (1)..(1784): unsure at all n locations
tcctcttaaattctagtttaaaaatctaaatatttttttataatatcccatatgaaattgtgaaggatttaacccctaaacattttttggtataaactttgtaaataattgacctaaaatcacagaatttgatcattttttgaataaaatcagttaacaaatcacaagcaaattttcaaaaattttctaccggacccccccccctaccttgtcgccaatgtttattctaaaaaatgcgcctaaaaagtgatatgatagtaaaaaagggtcgtagaccggaggcggggtacccaccccgacttcaagccgaaatcctgggaccttccctgctcccctccacagcctcccaaaattccattaaaattttcaaaatttaatcaacaaactgaccataaaatattgtatatttaaaaagaatataattttaaaaaagtttatgaagattatgccgacgttactatatacgttatattgacaaggagtttcgtttgcaaaaacaaaatctcccggccgaaggccgggagcgccctgaaaatagtggaagggtcttacaactttttgaggcgcatctgggaaaactatagaaaaaaattcagcgcggacgactgagtcccggggaccgatttctcactttttcttgcgtttgaaggcccctaactttttttctaaaacccgaatcaaaaaatgtctgctgtgagggggctaagttgaagtgttttctaaaaaacaaaaaaaattccaagcctctatctgcaataggaaaggctgtaggttcgtggactttttcagtaccaactttgtccagttcagtccccgttgaataactcattagggtttgacctgagcgcagggtggccagcagacttattgtagagttttgaaagcccgatttttccaaatttaaaaatttcgaaaattttcaaaaattttcgagttaggcctaaaaaacggttttcgggtttttgaattttaggattttttaacgaaattttcccagagaaacggagaccacttccaaaacatagtttttcgagctctatcgactggtatttttttcggaaaaatttcgattttttcccggaaatagaaaaaatttttggcctgagcgggacatttgagtcccgggcccataactcgtcaggggttggttttatcaaaaaaacgccttagggcaaaattgtagagctttttaagctctatcgaatggtgtgccatatggccggaaattttcaaaatttttcgagctaggccccctagaaattttcggaaattttttttcggacgaaaatgggggtgaaaaatatttttctggggtaaaataaggtgctgagtacgaatatgatgtctattttaagtttcataatttttggaattttttaaaaattctttattttttggcaattttttggccctcgggattttggcctaatatttgaaaattcataacaaatcgaagggtggatcaattttcgtgcaattatattataaaaatagagaaaaatcaggagaattttatgggatttatttgggatttctatcttaaaaagaaaacaagttattccagaatttctgaaaattttcgatttttcagaaaaaaattcataacccccttctgaaaagaaatttttgaaaattaaaatactacaaaaatccgcaatttttttctttataatataaattttattttacatttttatcactttcttacgaattgttacaaaaataaaaccgattttgggattatggaccaanaggggtgagcataggatttttgagttgaaaaa

SEQ ID NO: 28006 - DNA, 1996 bp, Heterodera glycines
  unsure (1)..(1996): unsure at all n locations
aggtcttttttactggggtaaaattacaattataatgttttttcaatttttttcatgaacggatcagattttaattaatatataaataatcttttttatttttattattatttgttctggaaggttattctttttatttagtgacattgaatgattgcccaaattcactgaaaaattattgggacggcaatttttgccattcggaactcaaaatcacaaattgtttgactgttcaaaagaatagcaaaaaaacgggtaaaaaatgatgttttatatattttaattatttattttcttcaaaaggcgatcgatctgtcttcgcaaaacatccgattttgctgaacaataataatgacccgtccaatcacattttttactatgaaatttcagtcaggaaaatgcaatagtaagtgaaccattttactgtatgttacacgtatcatattgtgttgcaatgaaaggagatttaaacttaattaattagtattttgcattaaaacaaacaaaacaaaaaataacgaaggaaaacatttctcttgacttttttgagctttatgaacaattttcttctctacattattatcattcatatgtattaaaatttcagttgcagttgcgtcttttttggattctcattaaaaagagaatcttttattaccgggccattgaccagaatcgcatatggttactcgagtaatggaaaattgtgggccaactcggcgaatcttgaaactgcacgctcctatggagaaaatgatgtggtcggatgcggcgttaatttggccactcgacagatctttttcaccaaaaatggaaaacgcatgggttggtaaaataataaaaatgagtgaaagaattttttgttgaaaaatattttcaatttgtacaaatttatcttagtgtgtttaaataattatgtagtggagtgccattgggccgagccgggaattccagtcctccaaggggatcccggaaaatgcgtcaatagaaaatgcgtcggtgattagaatttaaaaaaaaaattctatggcattaagtattgtcgtataaaggtcaaaatattataatctcattccgaatctcggacaccaactcgaacaaaaataaaagttcaaattttgcatttttcatctaaatggttagatgatctttttatagcagaattaaaggctttcagtttacttaagtgtataaactgattctgaaccaaaaatgctaatttcgaacattttgactttttgtttgaatttgagcccggggctcagaattcagaaggtatctcataaaattcttcttttatactacagtacgtaatgctacagaacattatttatttgtatcacttacgcattttccggtaacgtaaatttctttcgaataaaactcaagttcaagaaaaaaataacaactttttaaatttcaaaaaataattacaaaaatcgttgaagagttgaaaaattttcagaaatttttcctgaaattttcatagaaaaaactgccacttcggtccaccagaaatttaaaaaactttattttttagaatttaccattttataattatggaaaatgaataataaatgaattatgttttttttgttcagatgcgggcggcttgtacattttggcaaatgcttcatctctcagtgactacttcccattcgttatgctgttcaacaacgaagacatgatttatgcaaatttcgaacaggaattcatattcaatttggccactctttaaaaaacgattgcttttaattatttgcgaaaaactgaattatcaaattattatttttttgtcggcgaagagcgcgcgtgaatattttgctcataaataaaaaatttttgctatacctttgtataaaagcaactanaaatttaattcttaatatccattcgagaacccttatgtattttatgaatttttgcgggataaaacaaacacttagtgctatgaataatatnncagatataaaatttgattacttttgngcgtaat

SEQ ID NO: 28007 - DNA, 1369 bp, Heterodera glycines
tctttcaattttatttgtatcacttctcctttataagtaatgtgatattattcctctcagatgttacgcaaactatctgacgcgtaccaaaaggcacttttgacgcctatttggaacttagttcaacaaatacttgatgaaaattgtcgtgtgttttttggaacacttaacggagtttttcgtcaattggaagtattctttcaaacatatgattagaaatttcagttttctaaatgctgatgatattttaggacagagaaattgctgccaattgtttgatcagtggtcgcggcggcatcaaagggcaaattcggctcgcacaggcaattgatgaaattcccgtgataattcttattacagtttaaatattagttttttagggcgcggagaaagtactttctgtcagtgggcaaattcacagcccttccatcgagcctgacagaatggaagtacatggtaattcaagtctatattcacagataaacatcggagggcgtcagattaaaaattctttgagaaaattattcactttcaatagatttacagtgaaagcgatttcttcaatagcaaacaaagcttacagtaatatgtcacagtaacgtctttcgaaatttcatttagacctggggaacgtcaccgctggtagttcttctaccggtcggtctttacacacgttgtgtacttttgcctcggttggtgctgccaatgattacgttcccgctggtgttgtcacggctccgttggctctcagcggttcaaaaatcaattgcatcggtcgttctcttgtcgtttttcaagaaggttcgggttttgtttcgcttttcccttaccgtttcagtttttgcttgattatttccattccctatgtttcagggcgttccgcattgggaagtggcgtaatcggttacgcgaaggacacgcgcattttctcggacgagtttgacgaagtgattttccattattagcaaattgcagcctttttaaaatgttttttaatttttagatctttcgtaatttgattacacagtacagaaatgtgaacgtctcagattgttggcttgttctcagagacggcacaagttcaaatccagattgtcgcgcgttcttcgacatgttggatgagattttggcgacggaagaagtaagtatcttatcattggattattagttaaaattaacaacttttcagaaaccattgctttttctattacattttcaaattccaattaaatttactcattttacgctttttcaggttcaggaatacaccggacctcgaaaggcgatctgttcgttggtcaatgtggaaaaccaagctgtgaacgggtcaatcacgttacacaggcaaagaattttcaagcaaaatttg

SEQ ID NO: 28008 - DNA, 1433 bp, Heterodera glycines
ccccccttttcttttcctttccttcctttctcccacacatttctttcgtaaattatgtcgaattgtattgttttctgtgttttaatgattcaattaaaaaaagaattaattttgcccgtttatttttcgaaaatttgcattatttgtacgctttccatttttaattcgaattttaccaaattcctctccttatctgttgatttagctcatttcgacacctaacctaacaaacaaaagcatttttctcttcgtctttgggtccttttttctctgtctgtctgtctgtctcccatactcttctcctctctgacttcccttcccccattctctccccctctccctcccctcgtctttttaatgctcccaaaatatctttttttccccttctctcttttcctcccattctcttttcgctcttttcctctgctgccagtcactcactctttcttgctgacaaatgagagcgaaagaacccgcgaggaatggaacagctgatgatgagagaaggaagcagcagggaaagaattggaggagaaagtcggaggggaggaggaggaaggggaggagaggacgagttgtggaacaattttaagtgaggggaggggggagagagttgctgaggacagagggggggagggcaatttgcctatcattttccctctttctctgttttgaatgtcccattaaaaagtcacgatcacttccccactgatcaaatcatctgtccgaccatttgaccttctcttttccccagcatttccttttcctttgctattttttatgttgccttttttgtaacttttcccttttttcgccatttccatcccaatttttgtgtgtacgtatttataggggggttaatgggtagggaacggaaacaaaatccacatcacacaatctcatcgcataaagcgagcgttgggggacgaaataatgcaggcagagaagtgagagcaagaagaaaataacaaagggtcgacggatgggcagtttgagagataactaaagaggaggagagtggaagggcggagagcggactttcatttcttacattcattcggtcgtggtgggagacgttgggtgggaaagggagggggggggagcaaaaaggagggaggggtcggtcgtttgctgttttgttctgaaagaacgggctgggaaggatgaaagaggaaggtgcagcaggcaagcaggaggagacgacgagtggatgacgagaattccccggcccggcccctttccccctcgcccccaactcccccaatcagtcgcaatcgtgaagatttgctctctcatctccccgaggttcatcagcctttctcccattcccaccatcaaacttcatcactattatcagcatcattttcttaaatttgaccagttttgtgcttctcggaaaatggtacctcctaatccaacccgatcattaaaag

SEQ ID NO: 28009 - DNA, 1604 bp, Heterodera glycines
tcccctcccttcgccttatttttcgatcaaatttctcccgtattttcacacaaaaacactaactgaaaaagccactttccattacaattacaatcgatttgccaattcaaatttgaccagcttttcaatcattgaaaaagtcttttcttgcataaactgatgcttttaaatttctttgattatgaaatgcgccaaattttccctcactttctctttttttcttcttttgctttgacccaatgtttgtttgccttcgactgaactcgcgccgtgctcaaacatcggcagcagcagaatgaatgagcccatgtccaatcagtaaaacatggaccccccgggggatggggcgcaatgaccgaccatctgctgctccgctgctgtctcgtgcctaatgagcgcagttttgggcgctgcggttgctgctgaccgtcccgtccattacccccgctcccctccctcggctcttatcccctccccatcaactctctgagacaaaaatgggattattgcaaattgaaatcaaacgaatgaatatgcttatttgaataaaagcatttatccaattccattccgattcttcaatctctcctctttctcttcacacttatctccattccccccgggggggggcgatgatggcagatgggtgacagactcaccgaaacaacgattggggggttggagatggatggatattttggggtggaagaaatggcgcgatgagataggatgggatggatcatcccctccctctctccctctcccttcctcctccgttttcaatccaaggtctttttttcccttcctcttccctcctccgcctctcttttgcgctattttgccacttttctctccatttcttaggccatcgatcccaccgattcaaatgccccgggcgatttcgccttccatcggcgatccctcccctcccctctcttttttattctttgtttcttttttctttgagggacatttgggtggcgcagatgcgctaaatgagaaaggagcggacataaaaaagaaaaacagagagaaagaaaaagcaataactaatgaaagtgaattcaattggaaaatcaatcttttttttagatcactgatcagccgttacatcgaacttccgatcgtttgaaccctcttccgatcacttgtaccctcatccggttattttcactttcccccggtcgcttgctcttttgaaattaataattgcctttactttccgcttagtccattaaattccatcactaattttgcggaattcgttttcacatctgcgcaactgttttattcattgcaattctttgctctaaatgcatgcacaaattattcctctttccaaatcctcgcctctttttcttccgcttgcctctctttccttctttctcttcccttcatttccttcacttcttttccttctcttcttttctcttactctctctcttctttctcatcctttctcttcctctctcccttttcctcctcttcttctcttatcttttctcttcctctctccattttttcttcccttcttgacttctcttccttctattcctcctctttcactgccactcttttctctccattgtttcctttccttctca

SEQ ID NO: 28010 - DNA, 2057 bp, Heterodera glycines
  unsure (1)..(2057): unsure at all n locations
tttcgcctcgcgtttatacgggagatttgtaccacttttgtgccctaattagcaaagaaaaaattgcgtgggatttttcacatgaaaattaataaaaaagtaattaaataaaccatggcgcaaaaaaacagagcaatgaaattgggtaatattctcttcccatcaaaattagcacaatttcaaccgatgcaaagagaacaaaacgatttttgatggtcattttgattaattgctgcaatgcaatgtcattaacacagattcattttgcaaattgtcattatcattagatcaaaaatgaccaaaaaaaataattaaaagaagcgagagaatgcgaaaaggtgaaaataaccactttttgggacccattgggcgaaattctggcgattcggcgcacttttcaggcacaacaaatttcaatgaattttgtgaaattttttgttgagactatgtgcccctcaaaatgctttgaaccaattttaaggggcgaaaattctaattccttcaaataaatacgcacaaaaaatccaatggacttaaatttttgaaacagttagtggatgcattttgcttgtttttgtttatttgggntgttggttttctgtgccattgacatttatttttgtaatttgtcgggtgccgcgcttctgctgcttcgctgcttcggcttgtcacgaaaaatgcgggtgatgaaggttaagcacttttaactcattcctaaattaattttggttttaaatttcgagcatatagcaattaatttcttatccacttttactacaaattctgcaaattgtttttttttttacttggttctttttttttggaaattgaccaaaataacagttatatgtactgttaaagcgaattatttttgttggtaattataatacataatntattgaatcagtcagtgtttattattctctaaaaaaataaaatcccatataacagtcatggtcatagtgtacggacactccactatnatacaatttaaaatgctgaaaaccaatcaaaaatngaaagtgaattaaaaaattttattttgtaattttgtagcgttttttatgggctatcaaatagcaccattcattattttgtagatgctctttatacatttagcaaattctcaaatatttttagattaatgatagtatttttttttgaaaatccattaaaataaaaaaatcctttcctaatttagcgttttttaatatataaatttaaatgcttttccttttcttactactgtgcataagttggacaaaatgcaaaattttcatttatttaacttaatttgaattaaataataattggaatttcaaatatttttttcgctatattattataaattaaattgagatataacactcaaaaaatcattgttttttaattaaaaatattttctttttagtcccttgaccctaattctgtgccggactctgctgaaactgtgataatgtccgacttcgccttcgctatttcagccattttcggtacgaaatttattaatttttaaatcccattaaattacgtccatttaaatctaataattattattcttttaatatgactgtgcattttctgactcattctgcgtaatgaagtgatatgaattcagatgaaaaagaaaaaaattttggtttggtcaaccaaaacgacaatatttatggtgataaaatgattataaaaaatgcaataataataatattgttttggggttctcttcttttggcgaattgagaacctgttaagtttacagcaataaacgacttttattttgtaaaataagcaaaaaatacatttgaaaataaaatttttttgcgaatttgagccaattttttaagaaacattggaagttttgggtaaagcgccgccgagaaacatttttgaaaatttgttaacttgatttgcctaaaataactttatttcgagcgaattttttaaataaaattcataagttttattatttttagatttaggagtgaatataaaaaaaggaatttttgggagcttggcatacttggaaaaggggggggggggngcgaccaagatttttt

SEQ ID NO: 28011 - DNA, 687 bp, Heterodera glycines
ataattagtggatggtcccaacttatttttgataatgccatttcccccgtcgaataaatgccgtgccatgtcaggccgattccgaagtgcacactgtgtacattgacgcgacgggccagcaaaaagtgaagcgcgaaccgcggcaaaacttttcatggctggtcatttgctcatccgacgttaacagaatagcgaaagcattggaacgagtggaggaattgttggaatttggcaacaaatcggagcattggacagtgccaatgggacggaggaacggcacgggaagcgaaggggcggaagagaacggcacgggacggacaatggccgtgcaaaaaatgcgcatcccagcagcggaactttttggcagggagcaaatgaggcgattcgagcaaatcagccactggggggtaattagagtgttaatagggttaattggacacgcctggggacattgggaggcataaaaactgaaggataccttttgcgatggactttttaaattcctagaaaaaatcccatggagtaagcatcgaattggacagcagcgaccccgggcaatcattccgtctggtgacactttccggcacagaaaatggcatttcatctgtcagaatggaattgaaaggactgatcgacgaagtaaaaggttcaatgccagcggaacatgaaaagaaggcaagacaaacg

SEQ ID NO: 28012 - DNA, 1069 bp, Heterodera glycines
  unsure (1)..(1069): unsure at all n locations
cgtaggaggcctccacccgggcactggtactgttcagcgggggctgaaatgggcaaggagagtgctttgattgatcggatcgaactgggagtgaaaaatcgattagttagtgatctggaataacattgatcgaataattatgaggtagtgagaaagattgatcggttcatgcaaaaaatatcgattgatcggttgaactggggtactagtgaagaccgataaatgaattaattatctacatattaattgagtaatgaatattgatcagcagctcaatcaagaaacgaagagtgaaacagagaagaatcaaagattgccaattgatagaccaattaattgtttgttgatatcgtaatattgtaattaagggatatactgtgtcagtcgatcgattctatcaaaaaatactgagaataaaaacaatcaaatactatcatttaacagatcaattaaaaaatagtgatcagatatcgtcagcttagcttatatacaaagttgatcagaccggtaattaactaatcacatagtaccgtcttcccattacagtaaactgaccaacaactgtagcattgctgtcccatgggcgtccaactccaacaccttgacctccttgtcctcctgttgttgttgcagcggttgctgttgctgtgcctgcgcaccacggtagaaggtggtcagctggacacggcgcggcagcgacgacttggccggcgtgtcgtccatttgcttcagtgccaccacaacgctgtagggaaggccgggcttgaacgtgtcgctctgcttgtccacctccaacttgacgtcccgcgagtaggcggtgatctgtgatcagacagaatgtcaggcatgggaaaattgacaaatttacgagaaaatttacaaattttgaaaattctcgaacaggttgactgttggaaaagattttttgatttgccgaggggtccagagccatatataaatcgacgatttttttaaaatataaatcatttttttgcggcatgtttttttcaaaaatttttttcgatacgataaccaatanatactcttgcttgcacccagtgcttctgct

SEQ ID NO: 28013 - DNA, 1889 bp, Heterodera glycines
  unsure (1)..(1889): unsure at all n locations
ttaaaaacgggaattttcaagttcactgtgcttgatctttattaagtccaatttcgaactccggacccgaaatttaaagccaaaattgtcgaaattctcattttttttccaaaatcacattttgataaaaatttggattttttacccgtgaaaaaatacaaaacgatcggaaaagcaattaaattttatgtgataccatcaacaaacagtatttatgtttattttaaatttaatttcaaataaattttaaaatgaaaattattaaaaataaaaccaaaattcatagaattaaaaaaaacaatgtttccaaggtgtttttctcttatgggcttggcgttggtgcacttgtggcattgggctcatacaacaaatatcacaacaatgtttacaagtgattaaaattagcatgcccggcggctaattcatttggattaattagcgttaattaattcattagcctaaaacaaacaacccccatttacagacaagcattgactgtttgctgtgtgaacagcgggacaagtgtttttgcgggtattacataatcccattaattaattgttggggtaacaaaaaaattgtttaattgattttttaattgtttcttgtgccttttgtatcaatttagctaatgatccctgattagggggatgacaaaaatctccgccgctcaaaaaatccgggaagaccaaaaataaattctttttatccctcatatgttttttttgccggccgaaatctcgccgcagaaatttcaaaaaaaaaatttcaaacttagaaatttttcaaggaaaaaattcttagaaaatttttttataagaaaatttaaagaaaaaaattgttgaaaaatttttcagcaatttttttttgaaattttatgaaaatttactgtttttttttttgaaaaattttcaaaaaaacttagcaaatagttttttttttggaattttcttataaaaaaaattttctaaaattttttcctgaaaaatttctaagtttgaatttttttttttgaaatttctgcggcgagatttcgtccccccccccccaggggatgacgaataaacaaacaaacaaattttataattacctaatacaatattgctaacttattgttagtttaggtgttgccgaagaaaagagaaacaagaaacaggaaaaattcctcggtaaatcccacaaaaaaacaattagcaaaaggcacacaattggaattggaggtgggaaacacacaaacaaacaatgaatgagttgaactgacaataaatgagacacggcacaataatcacacatcacattggatttaccgtttttgcggaaaacaaaaaattttttttgaaaattttaaacaaatttttcccctctccgtgtacagcaaagtcaggcggactcggacaatgatgatgcggcgccgaagggacgccgtggccctggaggcgggcccggaaagcgccaacgcgtcaccaaatcgccggccaaccccaaactgtacgccaagctgaacgcatgtttgaacacactgctcaactacaagacgaggtacgagggggagcggcgacggcgtgttttggttaccggtttcgagaaaatgggcaaattttctagaattatggacatacaattcagtatttcttacattaatgaccccggggttttcggtatccagacaattaattgcgatcggcttcaaatttatggatattttttcaattttaaatggcattaaataaatgccagaactgattacttattgccagagccatgaattttgaaaaagtattgatcccagatcgattttgccgtgatttagatcccgaacctggccattttncctaatcgatcctttgagttatccgaatatccnttcgatgttagcaatggcaaaaagt

SEQ ID NO: 28014 - DNA, 1260 bp, Heterodera glycines
ccgtgcccgtacgaggccgcgaagcggccgagcgagtgccttaagcgcggggacaaccgaatggcaccggctggccccggtgttgaaagcggccccggcgctttcacagggccccttggggccctggttctctatataagaggattctagcacttgaaatgactttttttgaataactctcttcaagttggtcggattggtttgaaaaaaaaacatatactttttttaaggattctctatcgaatggtgaaaaccgttttttgaaattttcacgtaaaaaaaagtttcttcagaaaatttatgaaaatttttggaaattttttgaacgggtcgcggttgtcggcctctagcgcgatggatgttaaagatagcgtcttgggcttggagaaagggcacaccttcacattttggcggttctaatgagctattaaattaaaaaattatattttataaaaatataattttttaatattaacttataaaaataacattactataaaataaaaagcatgcttttagcacaaatttaaattgagttatgctctggagtggaattcaaaaattttgaaaaattttttgcctgaagaattaggggtggtacgcagggattctgaggggttgttaagtatttctaacaatttttttgtgatagaaaggcttaaaataatgtgttaataagccctacgtgcattgcaacaataaaaatatatgttggaccaaactactactatgcacttttggcagaaccccggattctgggggtgaaaatttttttggattttttaacaaatttttcctgatagaaatgctttaaataaggtgttattacgccctacatgcattccggtattataagttcatccctgaccaaagcactgtgtgtcgaaaaaatgacatcaaaagctgaacaaatattacaactcttcaaacaactttacaactcctgcacaacttttgcatcaaatccctaacaactttggtacaaaattaaaaaaactattcagagcaatgataatttaattgagtacttttctatattctttttcgatagaaagtcttaaaataatgagttaagacgccctacgttcattccaataatataaatacatgttgaaccaaactactactatgcatttttgtcagaaccctggattctgggggtgaaaatttttttgaattttttaacaaatttttcctgatagaaatgcttaaaataaggtgttattacgctctacgtgcattccggcattataagttcat

SEQ ID NO: 28015 - DNA, 1671 bp, Heterodera glycines
gtgagccggtgccgaactctaggggtagccgcatagcttgttccgagtttatagtcgaaattattgtcccgagtgtagctaaaaattttaatttttggaaataaatgcataaatctaacaaacaatggttgcgggtgggtgaaaattgagtggattatctcaaaatgcgtcaacaccatccaacatctggcgctgtgtcaagccgatatatgttcgagagaagtaaaggaagaacattggcattccaggagaagatctcacccaaaattggtttttccgcgctcaaaggtcattgttgaaagttcagcctcgttcaaagtctgttgttcaacattgtcggaagttatcacggcatgcagttcgtcaatctccactccaaaatttacggcctcctcagttgggtttgaaatgctgacaaacaaagcttcttccgacttttttgtagactttcaagtttattacgaatcatttgttcaattaatgaatagcaaaatctgaagacaaaaaaagcacatatttttaatcaaatttggagatttttcttattcgggtgggtctagggttaggcaaggggctatataaatgtcgtattggtattcagcgaccccgaaaaccctaaaatagacccattttccggctttttatgagctttttagactttggacaattcgtgggtttttactcttttggacaattcgtggcttggacactttgtgggggcgcccctaaatcagaatctggtaaatcattttctcagatttggacccaccatattaaaacatttgataaaacaaaacagatataaggcctgatctaatatgttcaaaaattgtatttcatttaaatcgagtccgggcttcgcaattgtcaaaatgaatacaatattcgtgattagcgactcagaaaactgacgaatacatattttcatttattcaaacatagacaaaatttaaaaacctgaccctggcgccaaaacgtgggcgccaaaacgtcggcgccaaaacgaccttggcgccaaaacgtgggcgccaaaacgaccccgactcctaaaaaatccctatttttaagctcttgctgtatttaaaaatgtatctaatccgtccatattttcccgattttccggtggaacctgaacacattctttaccgcttatcttgttactatgccattccaaagattttagtcaatcatttgcagtctaactaattaacggaccactggcttgcgccagggacgtatccaaggggtaccgatccgaaaagtcaattcttaggggtgtattttttaaaatttttcgcccgattcttaggggtgtatttttgaaaattcttcgcccgattcttagggatgtatttttgaaaaactttcgcccgaacgaccttttttttttgctcataccagcgacgctgggaaaataggggtgtatttgaaacgataattagcatttttccatcgtttacacatggattttgaaaattagctattttgactgcttttgctccgcccctggcgaaaggaaatgaaaaattgaagacagaaaaaatgtttctttggatttggggttgaattaaaaataatatgttgctttcgttatgaaaatttggcggtaatttaaatttggctttcctttttctctctgggggggctggttgggcttgtgggggggggggg

SEQ ID NO: 28016 - DNA, 614 bp, Heterodera glycines
aggggggttggtaaaaattcagtgggggggttatattacaggaaatacggtacctatctcattaattttgttttcgaggattttggggtcctgatcagtgatcacgtaacatctattttgattaatttctaaaacctaacccgaaatatacaaaagtaaaattcaatttctcggtttttatttttttgttaaaatatttcattacaggattctcttctgtgcaatggctgattggaatgattttttcggatctttacgaaaatatttgaattattttcgcgcacaccattcacaaggactttcttataacgctttaacagcaagcagtaatactcagacaatttctgacgctgaacttgctggccttttgtcatggactcggtttgcttcagctgttgcaaaaaaagtaaagtgttaaaaaaaactaatttatgatgtaaaaaaataattgatgattaatagcctaaatgctgttttccgatttgccataaattgtgaccttgttactaatttcaaattaggatgccgagtcgcggagacaagtgtacgaagaaaggtcatggaattgcgttgaaacggcgactggtttattgacctgttcaattcccattgat

SEQ ID NO: 28017 - DNA, 1030 bp, Heterodera glycines
attttcttttgaatttaattgataaaacattttaatttcctacctaggatattttaaattatattaatcatttgatgatccttttgtctcattaggttgaaaaacggttctgaacatcccacagctcttctagtcacagacatcggtacgtaccagcctaagtcacgcgtaaggcgacaatgtgaagttcagcgccaaaatcgaggcttttccggcgcccgaagtgcaatggactttcaatggagagccaccgaaagcgacgtaattatttaattttcattgtttaattttcaactttcaatttttagtccattaattttaaagttctttgaaactcttttccggagatcgggtttccggaaagcttaagcaaacaaaaggtgcaagaaggagagtttggcgcgggcgcagcaaacggagagaaatcgatacaaaacaaaagattaaataataaataaaccatttaatggaaaaacatttcaaaagttatttcgaattcagcaacatcagaatcagcaacgaggggaacttgcacatgctggagatcaacaatgtacagctcgagcaggcaggcgagttggcatgcaccgtgaagaacagcgcggggtcaaagcgacagaacgctcatttgacggtcaaagaaagcggcggggcgccggcatttgagcgaagcattgaagtaaatggcacaaacgaagcaaatactgctcgaacttgttgctcgcaaatcggaattgtagacggaactgagaaacatttttgaaaataaggggggggggcggaattttcaaaattcaaaaaccgggactgaaaaacccaaaaaaattcggcaagtgtctttaggaccgtttggtggaggaaaatgagactttgataatggaggcgcaattggcacccggggcaaagccggcggcggaagtgcaatggctgaaggacgggcagcaattgcagaagacggacgaacacttcaagcagagtgaagaggcgaacagagtgcacaaactgaccattatacgggtggcacaggcgg

SEQ ID NO: 28018 - DNA, 876 bp, Heterodera glycines
agtcgacccattgcagtgaaggtgtgtgattgaatcccaaccaagattttggtcattccaaaaaaaatgggcattttcggtgaaaaatggctaaaaaaggcactcaaaatggagtaaaagaatttttggcctgaagagcagaaaaaaaagcttcttcggattccaccttcccaaattattttcttgctacgggcttgtccatgagaacaaaacaatttttcagcaagtttttgcaccgttacccaacatttgcgccccgacatttgcgcctttgtccaaaatagggttcaaacttacattttttcaatcccggagggcttaaacagctttaaataagcgattgaaagtgattgtatgggatactttgatcctcagcaaatttttgaaaaaacaattaatttttcaaacaacatttaattattgttcctaataaaccaaaaagaacaagttttcttaaatttaatgctgtttaagacctctaagattgaaaatgtatgtttgaacccaattttggacataggcgcaaatgtctggacacattttgcaaaatttggaacttttaaggatttgtgtggcaaatttgaaaaagaatcaatttcatgaataaacagttaattccctgctttgtttggctcgtttttgcgagaggagatttgcacaatttaccacaaaagtttttcacccttaatttctcaaatttttgggttacgcgttaaagaaaagcatttttacaattaacaaatttagggatcaatttttgagcaattaaaatgctttatcaattttattaaatattaaaaatcccttaaaactaattttaaaaatcctagggttgtcctccatttacaatattttcttagcaaaagaagcgcactg

SEQ ID NO: 28019 - DNA, 845 bp, Heterodera glycines
cctaattatatttaattaataataatctatttaccatttcgtaaaaaattgtttttggatttaaaataatagtaaaggattttttccattttgaaaggttttgaattcattacccaaaaaataccacagtatattgataatgaaaatttttttaacattaaaaacaaaatttcaagaaataaatttaagtaaaatttagtttaaaaataatataacttggatttggaagtagagaactttaactgccctctcaactgactccttatcaagagaattctcccgattaaatagttggacttaaggaacggaataaaaatggggaaagcggggataaatggtgtgggaaagagattgaacggataagtaaattgcgccttacagcacattatgaaaaaataataatgtaattcttttttttgatataattaatcattctattatcttggtcggtccaggtcaaatcgtggttttatgtttgcgttcataaagttgttcaaataaaattacataaaaaattaacaaatttaaaaataagtttttatttcggcataatgttgttctttaatattatcgaaaagtttacaaacaaattcttttataaaaaactattatttcgttcacgagtacaaaattttattttgtttatacatgaaaataatcgcggtgaataatttttatcttttcccataaaatataataaactttatcttgcatattttttatatttattaaatattgaagaagcaaaaagattttcgtttaaataattggtttcatcttatcttcttcttatttaattatgagtggagcattgtaaattttaatagaggcttgaataatgagca

SEQ ID NO: 28020 - DNA, 1459 bp, Heterodera glycines
  unsure (1)..(1459): unsure at all n locations
ttctcaattttttaatttttcgtgcttttggcattttagttgcttttttgtgttgtttcgtcattttgaggaattttccaatatatttttcagcgatttcaaaaaatttgaaaatatgcctaaaacacctaaaaactttaaatcggtatggcttaaggaatggattaaaataatttccgtgccaaaaccgaccccgacacttcagtatatccctcctatgtgaccaatactataatttcgtttattagggaagctcctctcttaagtggatggacccgcgcatcttcacggccattgacctaactcttgctgttccattcggttatgccgcccatcttgtctatcaaaacggaggaggttatgattaaaaaaaaatatatatatatatatatatatatatatatatatatatatatatatatatatatatatatatatatatatatatatatatagaatctgctttggtgtaattctgtggccggccattgattgtttatctttattagcctcagaaattaaaaaaaaaatttaatattttaaaagctgtggccaaaaatacattaaaacagttcaaaagcaacccactatgattgatggttttttgattaatgcctttttgatgatttttgactaacaccattaggtgtaccgacttttgagccgcaaacacttgcgccgcccagtaaaaataaaaatttgagccgggcgcaaatttcgtggcgcaaatttcggttttgctgaacggccgcaactgtccgtttttgctgcgtggcgaaaatgtcgcggcgcaaaagatataatacgcgatttttcgtcactaaaaattgagacactaattataacactattctcccgcgctgctttaggcttcgaaaatacagacactgcctgggctcttggctatttcggattgaatatgttcacctgtctcgcgaccaccttcaactcgaaaaagattggaacgtttgaagtttcgatttcttttcagcataggtaggtaccgtattttctctaattaattcccgtgtacattaatgtacccttctccaattatatccccctttgtgaggaggttgaaaaataaaatagccgggcatataattagaaaaatacggtaattcgttctggtaataattcaatttttacatcgaaaattatctccccatttctgaggaggataaaaaataatatatcagggcatataattagagaaaaaacggtaatttgttttaatattgatatattttttacatcaatacaaaaaaaacttgattttacaattttaagtttatattactctttatacatatatatgtatacatatattccatttagattttggtctacacctacatatgcagctcagctttagctacagccctagctttctacaaaattgatgaagtggcctgaggaggtaccgttccttataacgtatggaccgganttatacttt

SEQ ID NO: 28021 - DNA, 916 bp, Heterodera glycines
catacgcaagcgctttgtgaggtataaatttctcaaaaaaagagatagccatttttctgggatagagtataaatataaaaattccctctaaaataaaatggcgattgtgcacagccctccgtctcatgctcgagagcatttgtatgtgtataaaatttatcaaaaaaagagatagccatttttctgggatagagtataaatttaaaaattccctcaaaaataaaaggtctattgcgcaccgccctccctatcatgctcgagagcatttgtatgtgtataaaatttatcaaaaaaagagatagccatttttctgggatagagtataaatttaaaaattccctcaaaaataaaaggtctattgcgcaccgccctccctatcatgctcgagagcatttgtatgtgtataaaatttatcaaaaaaagagatagccatttttctgggataacctctaaatataaaaatcctctgtgaaataaaatggcgattgtgcacagccctccgtctcatacgcaagcgcttttgtgaggtataaaatttctcaaaaaaagagatagccatttttctgggatagagtataaatttaaaaattccctcaaaaataaaaggtctattgcgcaccgccctccctatcatgctcgagagcatttgtatgtgtataaaatttatcaaaaaaagagatagccatttttctgggataaactataaatataaaaattccctcaaaaataaaagggcgattgcgcacagccctccctatcatacgcaagagcatttgtaagtgtataaaatttctcaaaaaaagagatagccatttttctgggatagagtataaatttaaaaattccctcaaaaataaaaggtctattgcgcaccgccctccctatcatgctcgagagcatttgtatgtgtataaaa

SEQ ID NO: 28022 - DNA, 1504 bp, Heterodera glycines
ttttcccctaatttttcctttttcagttctttggaatgttcccattgttctctcaaattgattccgtcgaccattgaaccgcacaaattcaacgaattgcgcggcgctttggccaaagttttgtatgacggggcaacgaaaatgaaccgcgcgacatcggagcgtaagggttttttaaacaaaacaaaaaaacatcgtattccatggcaattaatgagaagaaattggttgtttttatcaaccgaacaaaatgaaatttggttgaatttgccgtaactgattcgtccgtcgttcccttcagaggttcttgcgttgatgaaaacgataaaggagatgaagcggaaaatcagcgagcaaccgcagcaatcgacgaggtgaacagctcaaaaagagacgtcggggattatttgtcccccattttggacaccttccccttgggtggtcctttcttttgcgctttttgtcccccaatgtttcccattttgtcaagtcgtcgtccgttggtggtggacgcgctcaatttggtggacggcaagccggagcagcaccagcttggctacgtgcgttccttcttcaattccttggaacgcaacggtttttcgcccattttggtggtcactcgctgcacctttccgtccgaattcattcactgttttcgcgaaaagggacacattttcgacttgcgcagcaaatcgacaaagtgagagaaagcaaattaaaataattaagaaattggcattttaaatcggagggcggggaattcggatggattaacaaatttattcccttttctcagaatccacgacgaccttttcactctgaacgcagcgcttctgttgggtccggacgcccatctgatgagcaacgacgggttccgcgattacgcgccggcgttggccgtcgacccgtcccttttctcgcgttgggtgaagacacggctggtccgattttggacgccaaaaatgacgaagaaagagtccgaatatttggtaaacaatggggaagaatttcaacaaattgcttgaccaattaattattcgttcagttgccaaatgcgtggcacagtcaaggggacccttcgaatggctatcacattttggcagagaggcgacaacgttcgcgtcaatttgtctattgtattcgtacgaattgatgtttttttggtcaataaattgtttgtttttggacgaattttttgttttctctgtgattaataaattttcgacaataccgctgaagctgagttatgctgatcaaaataaacaatacaagaaattagcgctcgaaaaattccggttatgttatagtctaccacccacaaaaagaatgaataaaattgatgcattcgttctctcgtgatggggcacttctaaccttttaaaatggtcaaacccggacaaatttggtataaaaaacatttctcattttatagcttatacattatttcatgagttataaaaaaaacaaattttcgcatgctcgtatctatgtttagtcggggaat

SEQ ID NO: 28023 - DNA, 1146 bp, Heterodera glycines
caaaaacaatgaagccatccgaagtgcgctttgatgcaaaaaccaatgtgtcggagtattgcctgttgttaggctccgtcgcctcttccctcgtccgctcttcagaacgttcccttcaagtgtttttatcccacccttcgcattcgcaattcactcacaaaactgtttccgccatttgctcctcagtgttctcatcgtcagtaacaccaaaaggaggcaaatcagtagggtaaaaagaacagcaaatgaatgtgacaagcgaactaagaagcgccaaaagttccggcacaaacaatcgtaaagtgatgggatcataaacggaactgggcactctaaacagcaaaaaattatacgagtcaataaatcctgaagatagcgagatgatgcaataaaatttacctgataaacccagtttgtcgaagccaaaaatcaatttccgaactgcttgaattacacgcttcctttatgtaatcttggtcgtccggatacttcaagtgttgataaagttggtaaccaaattgcgcaagagttgtaattaatgaaaatgcaacacaaaaaaaggtaaagaaccgcgtaatttcttaagttgagaattatgtttggaaaaaagagttaaaaagctaacttggaaaaggcgaatttgcatgtataaaaggaagatatgtacacaaaaaagcaagaataatataagcaagtgaaatgaaactgggccttagaatagcacctaaatgttaattatgattaaatgcggcttttatggtaaaggcgaaaaatgcccacctgataaaaggaacaatggtaataaaattttaatcagaaaatttttgactgtaatggaaaccatttcaccttaaaaaaatgtattaaacttcgcagctgctgaaagctgtggtaaaattatggcggtgggagtcaacttgaatataccagcgggacaatgtggccaacagggcaatgatcaactggtgacaggacccaaatcatgaccagctccacctatagtattttgcactatcttcttagaatttagtggcattttagttagcatgaaaactgccatgccgaaaaacgactgtttccaaatgcccagttgtccctctccgaaattatggagccagaaaagattttgaataatacgggcttggc

SEQ ID NO: 28024 - DNA, 1724 bp, Heterodera glycines
tcggggggcaattctccaaatccaatagccatttttttttgtattcaaattccaatcggcgttcccagtcgagaattccttttttcgaaaaaagttcgcccaatccgcatcctaaacataatggataatttgaattaataacacaatgaaaaatattacgacctttgttaagctcagatcacgaagtccgtgggttacaataacgaccaacttgcccttgcgttcatatcgacgaaggtcaacgtgttcaccaatagggtccagcaaacgacagacgatatcataagcggattcttcaccacaaagatgaatctgaatattgtaaaacaagcattttcctatggaaacaacgatgggtatagtcttggagaaaaccgaaaatatataaacccggtttgactgatttttgagaggccggacccggaaactgctgttttcaaccagtctggatccggcttctccaagccagtcaaacgagtttttcaatggcgggcagtttccacacaaaaatcagtaaattttaattaatgtataatataactaaataattaaaaaaatcattttttagattaaaaaatgaaggatagtttttcttataaaataggcaaaaaataaataaaggaaatctcggtctctagaaataatactgtttctatgttttttctttaaaaagctatgcagaaaaggaaatcgtcttttttaagtctttgaactaaaatctcgaaaatttttgtttaaaaaagaaatttattcttactgtaaataactaaaaaaaattgattaaacccgataaatcgcaaaggaaaaatgtttttaaaaacgattacgtcccaatttcttacctcatccgcaggcgctcccatcagtgctcttgtccaagcagcacctctttgtgggtctctgagcatttggatctcgtcgatgacacaaagttcaattctatgctctggggacattatctcgatggttgctgaagtgtgggcggatgggttgtccgagtcaacggcaaagagacgattttcacccgtaatcatgtcacaaggaattcctataaaatataaacatcgtttttcaattccttttactacgtttgttttgcctgcttcgttcatcttcatatacacttcgtatgccaacaaacgcaatggcccacaatacaaagcggatttggcctttttaaaatgttccaatgcctcgtaagttttgccactatttgttggtcctttaaaaatcaaaaaaaataaaattaatgcataatttataaacacctgcatgaaaaatgatctttctgttgatttctcgagcaagagggtaccaattgtgcggctgagtaagatcagaaatgacttgaagctctttaagacattccaagtgggggaacacacaacgagcatgttttacgaagaaagggtacaacgaatcgacgctctgttctatgataaagaaaaaacaaaacaaaacttatttgatgggaaaaaaataaattaggcccaaattaccctggttttttatgtcgctgaaagtaattctcaaagtcggctccatactttgtgggctcgcattctctgaacagcaaagcaacctaaacaaaaacatttaattttttggctaatttacatttgaataaaggatcaattcaatttcgacctgaagctctgaaaagccttgtcgaaagagacgccccgtgatgttttgctcttcagcaagcctcctgatatgctttt

SEQ ID NO: 28025 - DNA, 1382 bp, Heterodera glycines
  unsure (1)..(1382): unsure at all n locations
ttttcttttccccttttcttctctcctcccctccctccgtccaattcgtttggtttgccaatgtttgctatcacctcctccttcgcttgccgcctaaaagttgtccgccaatgtttggcacttttcgatgtgccaaagtccccttccctttcaatgtcttctcctctccccgccctcgtggccaatacgaaattcgatgccattcgaatagtgccctttgctgatgatgacaaagtctcccccctttcttattgctcatttccccctccgtttgtcccccaatttcaaatgcccccttttttccccaccgctcgtctcaactttcctttccgcttctttcccgcgtcaatttggcttgtccatgtcgaaatccctcctccatgaatgtccctggcccattttctcattctccccaaattcattggtccattccttgcgatgggatgcaatccaagtcggcacttccttccccggcatcccttccccccccctcactaagtgccattggtgaacagacaaacggagagttggcacttggcacacggcgaagagagttttttgaagatttttcataccgtaccaaacccgccgaaagaagggaatttgcaaattcatattataaagggtatgctttgccagttttgccgatggtttgactttctttttgcattttcccccttttttggccaactttcgtcggactttgccgtccaatggtccgtctctcaattggtgccttcggcggggattatcgccctccgggggtgccaggtgcgccccccccccaaattagcggtgccctccgctccttcgacaatatttccgatggacaaacagttgggcacatttcttccaaatttattttcgcactttttgcctcaaaaatggaaattcttttcggtttcccattttccaacctttccgttacggtattttccgaatttcgcccattttttgctgcttttccctttaattttctcttctcttccgtcgcgggggtcagccgccgcaatggaattacacatattaatatttataattcgcagatggcgaaggaattggccaaagggccgaaaaattggcctgcgcattattcacacaaattttaaaaggcaattcgagtgaaaagtgaggtaattttggcgagggaaagggaaatgatggggcaaaacgaaacgaaacgaaccctcgggggaaaagaaaggaattgggggggggggggagagggggggaaacattacacctttaaagcctaccaaacaaggcaaattactctctctattgtggtgacccattttggaagtttattccctatntgcggtcatcccatcgctcgtccatcaatcccctgggggggggggcagatgttgggttgggttggc

SEQ ID NO: 28026 - DNA, 918 bp, Heterodera glycines
tatgattttttgttcaatttaggttaagaaaataggaattggtcaaaatagttgacagattcgtgatcagggaccccaaaaacacccggggccaaattttcatgatcatagattaaaaaaattttgtaaaccaaaagggtcctccccccttttgtttttactttttgataaaattcaaaagagcgctctttgcaagtagcgccttgccgagctgacatttttggcgacatgttcaaaaaaaaattcaaaaatttttcactaaacaaatcagtcgaaatataatcccacagtctctattaatcacgcagtctctaattatcccctgtattctgaggaggttgaaaaataatcccccatgggctataattagagcatatacggtatttctgtgtttcaacaaaatttgaaagaattcaacatattgtgattataataaactaatgctggaataatcaatcaatcaatcaatcaatcatttatacgcaaaagtgtgacgccgaaaaataaagaaataatgaaacaatatcaaataaaacaaacaattggtcacttttggagctggggtggcaaagaaatcaataaataataatgttgcataaaattataaaatatgcaataataaagagtaaaaaaatgcgcacgaaaatgtcaaagtatgcattgcatatgcattatgtcagaaaagtggattatttttaaaggaaattaaggagtttttagggtccggcggcgcaataggcgaagccgggaaaatttgtgatttttagtccgcttttttaacaaatttttcaacaaatttgtgaatttttgagtccaatttaaaaattgaatgcaatttgttaacagattttgacccaaaaatattgataaaaagagaaaatatttcaaatttagcaaaaataagagagaatttttttt

SEQ ID NO: 28027 - DNA, 2016 bp, Heterodera glycines
agtacagtttaatttttccggcaaaagttgaacaggaccctcaaaattatttcaaatcttagaaaacacttaccagtttccgaacaaagtgccaaaatttccgtttatcgaaattttctgaaaatgggaattctgggctaagaattttgccggaaatcatcaattggaaatcggcattccttcacatccctggttagcaccacagacccatgaattttacaagcaattaagtaaaatcacgttcaaattttcagaaaatttactggcctgggtatttttctctcaaaagtctaagaataagtattaaatggctaacttatcaaatgaaaataaacgcaaaaataaatcaggcttttaataaattttttgtacgtggaatgaataagtgttttaacagacaaattaaataaaatggctagtcagcgattcatactttatggcaaatcctatttttattataatattgatgattatgataaggcagcacagatgattaatcaagtaagattctttaggaatcattaaaaattaaaatttaaaaataataataaagtaacttaaaaatacatgaaaattttataaaatattatttatttactattacagtttatgcgcgtgtcatgtgatgcgaaaaatcaatttcaataggtgaagctgatttatttgcaaatgcaaataaaaaagctatcaaaaaacggtcagaatttataaataaactcaacgactttgccagcatagaaatttggacgcagaaaaaaataaggtgatagataaatttttaaaaaattgctaattgattaattataattttatatgattaggttgccaatgaatgcaaaatggaattgcagaaagagcttgtttcaatttgtcgttccgcatgggtacgtttaatattttttacaaattttcggggtttttatttatacataattttattatagacctgcgaggcaaggggtcccgcgtgggattttgcgggtcccagtctgcaatcccgcatttttggaacatgcaagaaggaggggttaatccagcggagtcccggcagataaaatttttttagcttcattcccgcaacggacacgaaaatttgattttttgtacggtcccgcagggtcggagataaaacactaaatattttttgactaatttaataaagtcgaataatattgttaaactcatttttattgcaaatttcattcaaaacctgtttaccgcggagcataacggcaaaagttggacattttcctcattattaactctaaaaaaatagttcaacaaacgatatttagtctaacagatttgtccaaattatttttgatcaaattttgaaagtattaggggaatctatgtccgacaaagccaataaatcgagaaaaggaatttttagaaggtgaggagttcggatactccgtaaattgcggggtcagatttccctcgaaatcgccaaaatttttttggaccaaacttttttaatgtttgtaaattaagtccattatcgatgaaaaaatgttgccaaattgttcaacaaatgatgaacgaattttctatctcagtttaaaggttgatttgcttcgttacgcttgtaaacatgaaacattagagtcgtgtaagttaaaagatgaaaaatattactaataaacattttgcttaatacattatgttgcttcagaaaaacaaaatttacatattttcccgtttcagttaaaacccaagctgaagccgcatataatcttgccaaaactgaagctgtggccaaattgagacctgaaaatcccattcgcattgggattgccttaaattttggcattttttatgaaagcattctcaaaagcaatgcacttgcctacaaaattggaaaggaagtaagtttaaataaggtcgcgaagtttaacttttaatagaaaataacgttactttttttttattaaaggtaaaaaaagtttcttatccatttttacaatattttcaaacgaaattttgtaaaacccatttttttaaattaaaaattat

SEQ ID NO: 28028 - DNA, 1599 bp, Heterodera glycines
atatgtttagcacaaatttcacaccgactgtatcgataaatggtaaaataactaattttactgtgcatcatcagattatacattgttacagggttaaacaacacaataattgtccaatttgtcgcacacagacatttaaaatttcaattctcagaagaggtttttaagattacgtattattgtgaataaattgctttgttaagcaaagccaattgcgcaacaacaagaagagcaagacggacatcgtcaagttgaacaacaagcagatgagcaccaacaattagaacagcaagaagggcagcagcaagaacaaccgagacaagttgaacaccaagtagatgaaatccaagaagggcagcaagaacatcaagagggccagcaagaattaggacaacaactggaccaacagagacaagtcgaacaacaagaagggcataaaggggattggcaagaagaaaccgaacaagaagtagaacaacaaggggatcgccaagaagaacaaaacgtacagcaagaagaagaagggcatgttgaacaacgtaaagagcaaaacgaacagcaaggagaacaactgcaaggagaaagacagcaaatggagaaggaagaaatacaaacagaaaaacaggaaattgaagaaggagaggaggaagaaaagcaccaaatggaacaaaagagtggagacaatgaggaagaaggagaaggaggacagcaaaagaagagcagcaatgactatgaggacaacaacaacaaggagtaaaacatgaataatccaatcaaatgcaaaaattgcaatcgatgagaaagtcattgtgatacataatttattataataattaataatttttaaatagtgaagaggcttaacaatttcccatttctctcttccttgctccaaatatcgtactgtataatttttgtagtcattaaattgtgtaaacattaaaatgattattttcaaacattttgatatatccaacaaatgatacaattttcattaaatccccagacagcatttggaaatttattttcaaataaactaatgtgatgaaccatttttcgcttagatataaagattttttgcaactgtgaaaaacttagggtttgcacaaaacggagctcgcagatgaaatttttgaaaatcaacacaggctgacaaataagcaatattgggttcaaaacccaacattaaaaaaacttaattaattttgcaaaatattttcattatccatgatcgctttaatcgtttttgtaagaaataataatttcttaaattctaagcagtaaatatccggggcggagtgattatttaaaaaccgtctttataaataaaataatatccggaatccattatgtgaatattttcgcaacctacacattgacatatttttattatcatgatttcaattttgataaatttcatcaaatttttacaaaagaaaagaaattcataactacaggtcggacccctgttcttacatattatctcatttcacgataaactttctccaattattgtactctgcagtaccaatttcgcacctcttttttgcacttattttcataattttttataaaacaattttgagtaaatttttgatg

SEQ ID NO: 28029 - DNA, 1551 bp, Heterodera glycines
  unsure (1)..(1551): unsure at all n locations
ttttaaaagcacaaaaaaaagaaaataaatttaaaatacttatactgaaaatccgaaaaagtttgaaactaaaaatgctcaaaacacgaaaatgaaaagttttgcatattttttatatcgagctttgagcttnttctcgcactttaaaaaatgctatttatttattaatgactaagtatttgtctttttgttgtcaattgaagtggaaaattccgaaaattgacatgatttaatgagtttttctcattttgtttgggttttcattggcatatgacgacacgcaattcccatttttttcattatggtcaatgtgccatttagtgcaaacactttgctaaatagtacagctaattagtaaaatcttaacttatctaaaaagtaaagctaactcattctaatgggttgagaatttttataaaaatcaatgtgtgacttgatgagttttttcattttgtttacgttttcttggcatacgacgacattcctttataaggcagataaaaacctcctttaattttttctactatatcttaaggatttaggaaaaccttttaatccactatttaatttttagaaaaaatcttagtacttaactttgctaaaaggaagtggtggcggtaagcggcagacttttttttgtgtgacggacggacggaggaccaaaattatggcgccaaaatgaggtggccaatgaatggaaagtcaaaatggaaaagcaattgaattcgctaatgaaattaatttatggacgatgaaaataggacattaaaagcgaaaaataagagttatgtaatgacattgaaagaaaaaaagcaatgaaattttataatttttatttataaatagtgaagacaaattgaactggtaaattagttttattgtgagtttgggacttccccaaaacggaacgaattccaaaatttgcttgtatgttttttcttttcgaaattcttaattttgcctaattatacattaaatttttaatccgtttgtgaattaaaagagggagcatttgttggaaattcttttgagtatttctttcaaaattatgtctattttttgttgccatttctttttttgttttttcgaaataaaattaaaaaatggaattttaatgctaaaatcctaaattttcggcaagtagcaggttatgaatgtgggtaatccggccttgtccgctgccccattttaagcggtttttgtgctgtccgaatgcccccccccctcccaccgccctttcggtgtgtcacatttgtttgtcacccaaaaaggcgaattgcaacattatcagcaatttgttggccccgggggagggacgaacggtggcagcacgtaacaggacgaaaaggaggagaaaaggggtggggagaggggaaaaaagggggggggaaagggagtctgaggggatgaaataggacggacgaggagcacagctgaggcgggaggaggaggaggtggtaaatggggggtgaaaggtgacagaaaaaagtgcaaaataagcaaaaaagcgccggatattttagtgatagcattgacacgtaaaaactgatc

SEQ ID NO: 28030 - DNA, 567 bp, Heterodera glycines
aaaaaaaaaaaaaaaaaaaaaaaaaaaaaaaaaaaatattttgttgtgggtgtgggttgggggggtgggggagagaaacaacaaaaaaaaaaaacaaaaaaaaaatttttttttttttttttttttttgctggggggggggggggggagaaaaacaacaaaaaaaaaaaaaaaaaaaccaacaacccccctccttttggggtggggggggggcggggaagaattttatttttttttttttcccccccccgcccccccccgcccgcgccccccacaaaaaaaaaaaaaaaaaaaaaaaaaagaaaagagggggggggggggccttctttttttcttttttttttttttttttttaaaaaaaaaaaaaaaaaagagggggggggggggggggggggggggggtttttttttttttttttaaaaaaaaaaaaaaaaaaaaaaaaaaataaattttcaaaaaaaaaaagagggggagggggggggggggggagggggttttttttttttttcccccccccccccccccccccgccggccggcgggtttgtttttttttttttttttttttt

SEQ ID NO: 28031 - DNA, 922 bp, Heterodera glycines
actttctcatatgctcgtttatacatttctttcagcttttcatcaaatggcttcttgtctaaggtaatttttacgttttcctctgctgatttaaaaatttgctcaaaattaaaaagcgaataaaaagcatttttcaattcgtattttttttctttcgcgaaatttgaatcaaaataaaacttcgaaattttgttcaaatatttcacaacatcaattatggatccaagcttctcaatttttcggataaaaagtaagggatttgggttcatttcgaataaatcctcactcttaatggtgccctcagctaaaaaagtcaaaatatactactctattttaaataatatgccaaaaaaccttcggcgttcactgtgaataaatattcatagaaaatttcgaaatatttgcgaaatatttcacaatctgcacgattttgtcctgcattttcatcaacaattttggcacaatgccaattctctctcattaaatacaaaacgccaagatgggcctcatatttctgcgtcaaatattcttttctttgagcatcagtggattcttttggcaatttatcgcaaatttcatgcaatctctccttattttccatgcaaaatttgtcaaaattggacttgcccctcacaaatacaattaatgcttcattttccggctaaaattataattatatgaaatttttaaagaattaaatttgctgtcatggctaaaaaccatactgaacgagaaaattttttcttttctaatcaaaattttaagagatttgaaacaaatgaaataataaatgcttattttcaatgatttttattttatttttttcattattattttgttttcaccttaagaacgttgtcataaaagggataatcataaatggagaagtgctcaaataatttaaaatgaataacttttttct

SEQ ID NO: 28032 - DNA, 1780 bp, Heterodera glycines
tgatattttggggacgaagagaaaaggaagaaaaaaaatttgttgattaaaaatacaaaatttccaaaaacactgagcctaacaatgtttaacaattttcatttagtcgaacaaagaattctgaaaagcctcggcacgatcaattgatggaggacaaatgaaattggggagcaaatgacgaacagaattgagcagatgaagcgcaagttggacaaaaaggcggcacaaagcgcaaacgacgaggaggaggacgaagaagaggtgacggacccccagggggaggcctggattctgtcaaattattctagaattttttgtgccattttggggtaacgtctaacggcatccactcttgtacagcccggcatagaatctcattcaaaatttattacgattcaaaaaaaaaacgctgagggcgggggtgcagggacggtcccaggattttggcttggggggggggtacctcccccggcgacgacctttttttgcttttcacacccgttttttttgtggcgcggtttttccaaaaacattttttgggggacagggggtccgggccgggaaattttttgcggttttaaatgcggtttgttaacagattttgtccaaaaaatgaccaaattttgtgatttcgagccatttttagcatattttcatcaaaaatttgtgggttttttgaaaaatttagcgaaatttcttggaaaatttgggtgaggctaggtctgggggggggtaccagcaaggaaaattctcaatggatgggatgttcgggttccaaattttgcaaatacaatttaagacaaacgttggtaataatgtctagcttgtacccccttcctccttttttgtttaaagaaccaccaaaaacattttccggcgctttttaagggtcgatattgacctgactctgactatacgaattaccaaatttttgaaatttaagtagaatttttacagcaacaatcaaaaatgctcatcattttgaggtcaggcatgggattttaaaacaaattaggacgtaattcagaaattaaatattgcaaaaacgcacgtcaaagtattggtatttgtagatgatgccgccggtggtggtcaccgccggcgcaatgtttgccacgtccacaaaagcgttggggaacagaaacaagtcgacggcacagccccacttcacgcactcctcgcccagcttggcgtagaagtcgatggacggcgtcagcatggtctgtgcgtaaaatagaatataaattttgaattttcaatggtaaaactgttaatagtccaaaaattttgtcctgcaacttttcggctggcatttttcaccgatttttttgaaatttttgctaaattagtgttttttcaaaaacaaatttttcaaaaaacacaccttctccttgtccgtgcccaacagcttgcgctcctcccggttcttcagctggcccggcgcaccgtccagcacgggcaacgacgtgtggaaaatgaacagtttgccggcccggtccgcgctgcgcaacgcgtccagccccgcctggatggtcgggcccagcgcagtttcggtgatgcgtgtgtgcgcaaaattgttcacaatctcgcgcaagcaactgaaaattcaaattttgaataaatattttttggaatttttctttttcaaaaaaaaaactttggtgaggtccgtaaccagaaaaaattcggaggaggtttttcttgaaaaacaacattttttgcttttcggcccctaacattttcggacattttttcaaaagtctaattgtaagcaatatcg

SEQ ID NO: 28033 - DNA, 1352 bp, Heterodera glycines
  unsure (1)..(1352): unsure at all n locations
taattcatttaattgcttccatcattatttattattaccctcccctgtccgggtgtatgcatttaactttaattgtttgtcttttcgaacagttccttccgtctgttcttcgaggacatgaacaactcgagttcccccgcgctttccgtgctttacgttgcgcccagcgtgaccacttttgccgggctgaaccccgcctaccgcgtgtacgtcgccagcccaagcgacggacgcattctcgacattgaggcgagaatcgttcttttttaacatttaaaatacctcgcaaaatgaggacattttgaggaatattttgtacgagagtcaaagtcaaattttcgagaaattcgaattctanactttgtcccgcagaattgcttaatattaacgagtggttggaaaacaaaaactgctcaattggtcccaatttcagaactattttctgaatttgactggccctgatggggccgaaaaagaggaaaagccccgctggcagttgctgtacacggccaaaaccgagtacggcatggagcagctgaatgccgaggcatggaacgcggtggcacaacgcattgagcgggagccggcgatggcgcggaaattcaatcggtgggagctaatgaagccattacagggattaatattaactaattgttctttcttaattgatcatcagaaattacgcgcgaagggctgacgcggaatgcgacgcgcattgtgtcgcggaacgcgtgtgtgacattcgcgcggcgcacagtaacaaaacggcactgtgcgggggcggcagcaaaacgcgacgcaaattgaaagtgccgtcgtcgtcggcagaaaaaagaaaggcactttggaaatggatggcacacgcaattagacagcagagaaagagagcaatttgcaatcagccgaaatgagttgaaattgtgaaatgaacagcagaagaataaaatttgaaaaaatgttgaagaagttttattagttttaattgtttttggattttaaaaatgttggaaagcattcagtacagtagcaatcgagttaaagacatcaaaatatgtttgaatctttggcgtttcattttacgccacattttttttcatattcattttttttctttcactccatcaccaaataacacagatgggccatcgtgatcttatggtttgaatttgaaattaatccaaatgcatgtaaaacttgacaattgtttgaggctgaatattagtggcacggaaggcgttctctgatcactcggctgaatttgtgtgtcncaaagcaaagttttcccaatttgcgcaaaataaaattaaatggatgacacaaaagaaagctttttctccaattttttgctgatg

SEQ ID NO: 28034 - DNA, 1341 bp, Heterodera glycines
tgcaaataatgttggcaaataattcacatttttccccaccatcatgatagcatttgttttcaaagactaaattctcgtatttcaaagggattaacatcgtatttttgtaggtatttaaaaatggaatttcttccctttgaaatagcctttttctcaatttgcgagtgaaatttatttgtttgtatttttatgtgtaaactaatgctatcataaagcgctttttttgttgggtcagttttacattgcctatacagtctggctttctctttgatggaggccaataaatgcgttgggtatttaggggtcaaatcttttttggtaatttttttcattggaatacactcgtttaaggtttctagcaatgtattattaaaggatttgtatttatcgtggtaatgtgacattggcgccgcagacacttgcgccgcgacagctgcgccgcagacacttgcgtggaccagactatgagtgacatgagccatgaatatatgcgacgcgacattagaaccgacaatgcatgactgtgactctcatgggcaaaaaataaaatggtaattttaacaatttgggtgagttggcgaaacgtccaattggcttagttggcgaaatgtcatttggtgatatccagttggcattgtccgtacaccgtcgtagagacatacggtttttgtatttttgtaataaattttgtgctctctgtccgtgtatcattttccgtaaaaaaattttccagcctccctatggtttttttccgaaaatttcccgatttcaagccattttgagagagaggaagagagagggggaagaattggttgaaggagacagaaaagagatgcattcacatttctggaaagctctgcaattgaagtgctgctcactccgtcatactacccttacagtgtctcccctgctctgtttcttttccctctttcgtttctcttcctttccccaatgtctcccctgctctgtttctttgcctcttttctctctgttctattccttcgggtactttctgtcatctgtcgtgggcatggcttcgttcgctcatccctttggtcgtccgtctccctcccttttcccctcccccattctccacttcccatttctttccttccctctaaattaatgtgtatctttttgctccaaatgcattttctgctactttttcgtttttgagtcagcaaaagttaggaaagtccgattagaaattttccgtacttttcccgtgtccaattttcataatatcctcaccccagggttgcgactttgaaattcaaaatttttttttattattttcggttagacgtttccctgttttagacgccacgcccggtttttgtc

SEQ ID NO: 28035 - DNA, 1545 bp, Heterodera glycines
aatgaaagtaccaatagcaaccaaatagttgggccatcgctttggtggatccatgccttgctaaaagaggaccaagtcaaaaaacgacttcaaaaatctttgccttccataaatggcctccgagttaacattcatccattcgccaaattcgcgaagtctctgctcaaaaatgggcacaatgcgaccggtgtggtcggggccaacattaagcagcatattccctccacacgaaattgtacgcactaattgattgatcaattcggccaatgaaagaacatcggagggcttaatcagatttaaaccaaaaattaaaaacggaattgagtgccttcaaataacgacgatagccccacgaacgtttgtccaactgaaattgtcaaatacagtaacatattgcgaaggcttaaggtgaaatcaaacagtcaggcaattttcccatttccgtgctagcaaatggcctgggtctgcaattgtttttttttcattttctcgattctctgtccaaatcctaccgtaatgatcctggtaagtcaaaaaaccgccatgctttccggctattccactgccccaacggtcattgaccaccactttttccttcaccggactgaagcatttgaatattcctttattatggaaaaatcaaatccgaaagtgacctttcgttataaagccacgcaaggaattctttagagcgccaataagtgtcgggctgttcccaatccttcgcaaaaataggaagaaattccccaattaaaaaatggctcaatcaagcgaaccccgtcgctccaaatgacttcggggtgatatccgttaacaatttcaagtaattgaggataagaaaccgtctaaaaaaagaacgaagtcccaaattaattattttacaaattgcctgaacgaagtccgttctgtgccttaaacactttaataattaaccccccttaataattcaaaagcgttactttttaacatcgttcagaaagagaggatggaaccaatcgaaaagtgaaaaataaagtccgaaacgaatattttgggcacgaatcgaatcggagagtgccttcacaaggtcccgatgggggccgatcttgcaaaaatggcattaaggaaagaaaggaaaagtggaaacatcgacggcattccaattccacgaagtcgcgcttggccaaagcttcgaatcaacgaaaaaattgcaaaagatcgaccaaacagaaaacataccgtaaacccttcgtgatgctttgaagtcaaaacaaaatatctgaaaattggcattttatgccttatgacttcggtgacacgaaagggcaacgaatcagaacaaatcgcttttcctttctcaccgtgcgcccgaggactttacgatttcggcgaaattatttgcatcgaagtcaacggcggtgaacaaaaaaggtgtttttcaattcatgtgatttttatgcgtttggcttacggatttggcaaagtctgcataggtcgtgccatttgggtagtgtttttgaacaaatctttcgattttgcgtcacgttgtcccttccaataccacca

SEQ ID NO: 28036 - DNA, 548 bp, Heterodera glycines
ataacaaatggtcagcggaatgaataaacaattattttgggagattaaggagccaaataagaaaactattaattatatttatgtattgccaaaaaatcgcgaaaatagctaattttgcgttaagccatttttagtatttggcatcaaaaaatgggaaaaatagaaattgaagtcaaaattatagtaaaggcctaattgatgcggaatttcttcacctgcgttcatttgtcacttccaaaacttgttgaacgcctccattatctaaatttaatggcaatttgttactttttattggatagcttcttgataaaaatcatttctccttaagctaacaataagcacatatcgtttataaaaacagtaaactcaccgaatcataaatcatgaaggtaatggcaacgtcaagacacctaaaacgtttcgaaagcatgcttaaaagtacaaaaacaaatcaaatggcacttacactcggctgaggcgagggacagtgcccttgtaaaagctaaaaattgaaatcgttgaagggatttgtgggggggggggggggg

SEQ ID NO: 28037 - DNA, 1454 bp, Heterodera glycines
  unsure (1)..(1454): unsure at all n locations
tcactgttgaacctcttctaatcacntgttgcattacacttgatcacttagataccccttctaatcactgttgtactacttttaatcacttttgtacctcttctaatcactgttgcacctcttttaatcacttttgtacctcttctaatcacttttgtacgttttttaataacttttgtacctcttttaatcactgttgtaccacttttaatcactgatgtacctctttgaatcacttttgtatcactttttcactgttgtacctcttctaatcacttttctatcactttttcactgttgtacccctgctaatcactgtgtaacaatatttttctgtgcatttttgggttattttgactgtttttaattaatttgaagatttcttttaaattatttaaatttatttttttttaaattaaagaatttcattatttttttttgaatttgtaaaaaaaataatttaatttcaaattaaataattattcaattaataatttccaacgttgtttttaattaataactaccatttttttcgtgttttcgttgttttattcatttaaaatattttttattttattaataataaattacatttttttatttgaattaaatttttataaaaactttacattatttatttttttcgtcattttcaaagcttttacttaatttgaacctttttgttttattaaaaattaataaataattttaaatttaaattaaattatttttgatgaataaattttttgtttcaaattaattaattttattgtccataatttgtatttttttatatgccatctgtttattacattctcatgtttgagatggtgtgcgttattgatttactcaacttttacgtctattgaaaattgttcctcttctaatcacagtttgcacctcttctgatcactgttgtacctcttttaacaattttgtacctcttctaatgactgttgtacctcttctaatcacagttgtacctcttctaatcacttttgtacctcttctaatcacagttgtacctcttctaatcacttttgtacctcttctaacaattttgtacctcttctaatgactgttgtacctcttctaatcacagttgtacctcttctaatcacttttgtacctcttctaatcacagttgtacctcttctaatcacagttgtacctcttctaatcactgttgtacctcttctaatcacttttgtacctcttctaacaattttgtacctcttctaatgactgttgtacctcttctaatcacttttgtacctcttctaatcacagttgtacctcttctaatcactgttgtacctcttctaatcacttttgtacctcttctaacaattttgtacctcttctaatgactgttgtacctcttctaatcactgttgtacctcttctaacaatttgtacctcttctaatgactggtgtaccacttctaatcact

SEQ ID NO: 28038 - DNA, 1739 bp, Heterodera glycines
ttaattttttatctttttttttgtatttatagtaaaaccattaacattttaaaccgcgccaaaaattgtttgcgacgcaattctttgggctaatggtttaattaatcgcatttattggccactccccccccccccccccccggtaaagctcctcattttcgagcaatcgttgttttccgtcatcatcggctgtttacacaataattcttgtccctcccctcccaaatcgatcatttttctctctccaaaagtgccaactttttcctcgcttttccaaatttgcctatttccattgattatttatttggcttttcccgagggcattttccatttgttttgcttctcggttcattaatagcagttctcgaaaagaccaaaagcctaaaagcataggaaattggcgaggaatttgcaggacaagaaataaattaagtcgggtcagaagggggaaacaaatgtttatgaaatttattggtgcttcccctccccccgagggatgtgacagttttaggacgaaaattgggacaaattccaactcaaagtagcgctaacattgactaattgactcaaatcatttgtcagacacatttttcattgtccacgattctctctctcccgcctttccttttgggttaattaccaacaaattcctttctgatgaatgagagtcctaattactataattaacagctgaaggatagttgtggagatctcgagactggacactttcattttgactactaaatgaaaaataaaattcattttttaggttttgcaactgtttggggtgcatccccacacacattcactgcacatttcccaatttacgcgccgatctcatcgcctccctccctccgcccgctgcctttctcctgccaccatcccaattagtcattttttgttggatgttaacgagctcttccccctcctcttcctcctcctcctcccccgcttcttcctcagtccctccccctccgcttcctccgcccacgacttcctcctctccctccgcttcttcttcatttccttctgcagctcttccgccgtttgatcgttcccctcccgcttcttcttcctcttccgctgaagtcgtcgttgtgccgatttggcacgacggtgttggcacatcaatgaagcagcagccgacgacgatggagccaattccggaggatgaagaagaaaacggtaaataatataataaatagggtttaatataatggctatcatccaacaaaaattcaaaaattttcaatcgtgtatattttttttaccaaatactgcatgtttgtaaaacttgaaaatttcaagacgttgatatgatttttcagttttttaacatgcggatacaaaaaaagaatagtttggaagcctaacggagcaaaagaatatgaaaaaggctatccacttaaaaatgtcaagtttaattcagttatctctccaagcacctcctccttcatggatcattcggctgttaatgagtgccgaaatgcaacagcggcggcaacagctgatcagccgcccctttcggcacggtctccgtccccgccggtgtctccgccattcgaagatggtgctcatctcccacattccccttctcacactgctcatgatggcactgatggcggcatggacacggaaagcggcgtggccaaacgaataacggaatcgaaacggagactgagggaagtgtacacgacggaagagatcgacactttggtcaggtgagtgggggggggggg

SEQ ID NO: 28039 - DNA, 1347 bp, Heterodera glycines
  unsure (1)..(1347): unsure at all n locations
caggaaagtggccaatgccattgtcgaccacgtgtcggaggacgtcgctgtgataagccaattcaaaatcacttcttcccaacactttggcaccatcgggtgggtcatgaaaaaatattttcactatctttacggtacaaaagattacggtagcttatactgtataaagaaagcaaaaaatttattcggaatgtttcgggtaaaattgagaaaaatatatgaaaaaatgaaaattaaagagacaaattgcacacttttgtttatcacattatcgaatatatcagtcttttgttggcaaattcgctgatcactttgcaatgctggacctagggtttcaaaaatattttaaaaattaaaaaattttcaaaacaaaaaattcctcaactgaaaatcgaacgttgcctttctgttcaccttccgcttcacaatcaccacaacaaaaagcaccgcaaaactgatcagcagcacagcggcgatcactgagatgcaaaatgccactgccatggcgtgcagacagttttgtgccagccgaccctccgggtcgtcttgctcagtcagctgggtgatcatttcgcccttgagcaagtggcaaaatggtgtgccaaattttggtggcattttggaacgccgactttggcatttcgaatttgctttttgaatttctgaatgctcattggctcatggcacatccaaatgctaatcttatggtattcaaaattctgtttgctaattgtcatggtactcaacgctcactctctcttgctgtagctcaagtgccttctcaatggcactgtccatcattcgtcggtcaacacttccgccctcgtaaattgcatccatcatctccaagctggtcaccaaatccatctcaaaaaatatatttacaaaaacaggggatactgtacaaaatgctcttgtacactatgcaaccaatattcatcattcattttatcgcccaatgtcattcacaccatgtattaatctaatgttgtattgtaccaatatatacagtacgcctttgcctactatacttcttgataaaaatgatttccttcttaccgaattaatcgtaatattcttaaaccaacagccttcctgctattctagcaggtccttcctataaatttctcaccccctgtttctctcatttctatgactttgaataccatcttaccgtgtatacattgctaccgtattatcgcctcttatccatttanattttcaaaatttttagaaattcagggcctgcatcttctacttttttttttttgtatttttcaattttcccaccctgtcccctcctgttgctgctngtggtccccctgctttgttggtcccatttctctt

SEQ ID NO: 28040 - DNA, 1056 bp, Heterodera glycines
  unsure (1)..(1056): unsure at all n locations
catccattttacctaatgagatgtacgtaaactgtggcatgcatgcatgtacacacaacggcacattcattcaaaattgtgagcccccccnncaccatctaaaagctctctgcttctgttgatgggcgttcaatgacccgcttaacccctaccaaatccgtttccccctgggggaggaggcgattaatccgattaatccctctcccacccaaatcgccccaagccaaccaaaaatgggattagcggatcagcatacacacttccccaccttaatgcaaaacagaagtaggggggggggggctcatcacatcgacaaaattttgacgagcgtgaaatgagtggttcaaactgaggggggggggcgtacttgatctcgcataatcaatttaatgtcaaaaattttttaattttgaattagtcactgtaatttgttacataagttggatcaatatcaatgttcttccttttgaaactttattctgatcatctgtttcactgttctttgctttatgcaatcaatgtgtttgtctgctgttgatcagtctaattaggtacaaatcaaaatttgttttggattcgaatgatcagaaatgcctagataaaaaaattttttaaatttcttttcatttattcgaatcgccaaaaatagttgtttttttacggcattttccattatcgatgactaacattcatcagtcaattagtaatgtcaactcactggccgcccctctgctatcattaaacaatcaatgattatgattactaataaatgcacccaccgtacactttttcgccccttacccacggtttgcaaccccgagaatacggtagtttcagttatatatgtatatgtgatttaaaattcgctcccctccccccaagggatgatgatggtgggatgcttgcggggcggtcggctggtatgaagatgatgaataattcattagcgccagccgctgccccccttttggcttgcccaatctcgaagcacagcagcagcagctaactcacgcaaattattccttactttttgcgctccaatgcgaagactccccc

SEQ ID NO: 28041 - DNA, 323 bp, Heterodera glycines
aaataaatagttgttaaataaattggaagcttttaccccagaaaaatacatccttggaaaaaatcttatgtttttgttcgagttcgggtccggggttcggaattgggcaaatcgagttcagattcgtaatagcatattcaccctcgaggcacaaaaatcgcgaaataggcacttaaaaagggaaaaaatgcacaaaaataggcaaataaaattttttattaacactttttagcacaccatcccaaaaaacgagatgtgtaccaataaatagagagtgccagagaaaaacattatcttttttctcatattttttgtctcctttg

SEQ ID NO: 28042 - DNA, 964 bp, Heterodera glycines
aaaaaatcgattttttcaagtgtccgtttggggtactcaaacatttatggggagcaaaaatccaacgcagaattaaagtacaggctatagggaagctattcccgaaggattcggtctccccataaatctgggcgcatcggttcggggggactgccccgaaaacaaaaaaatcgattttttcaagtgtccgtttggggtactcaaacaattatggggagcaaaaatccaacgcagaattaaagtacaggctatagggaagctattcccgaaggattcggtctccccataaatctgggcgcatcggttcggggggactgcccgaaaacaaaaaaatcgattttttcaagtgtccgtttggggtactcaaacaattatggggagcaaaaatccaacgcagaattaaagtacaggctatagggaagctattcccgaaggattcggtctccccataaatctgggcgcatcggttgggggactgcccgaaaacaaaaaaatcgattttttcaagtgtccgtttggggtactcaaacaattatggggagcaaaaatccaacgcagaattaaagtacaggctatagggaagctattcccgaaggattcggtctcccataaatctgggcgcatcggtttggggggactgcccgaaaacaaaaaaatcgattttttcaagtgtccgtttggggtactcaaacaattatggggagcaaaaatccaacgcagaattaaagtacaggctatagggaagctattcccgaaggattcggtctccccataaatctgggcgcatcggtttggggggactgcccgaaaacaaaaaaatcgattttttcaagtgtccgtttggggtactcaaacaattatggggagcaaaaatccaacgcagaaattaaagtacaggctatagggaagctattcccgaagaattcggtctccccataaatctgagcgcatcggtaggggggac

SEQ ID NO: 28043 - DNA, 1078 bp, Heterodera glycines
tgggcacattactgaactgaaaatggggggaaaaattaaccccccggcccattttacatgaaaaacactcacagcatacgaattgccgctcgtttcgttgagtaaaatcgatttgtcaccgccgcggccgaccaaaaaataattgttggactgagaatcaacagcaaaagaatggttattttgttcagcgtcaatgtcaataatactcattttgtaccacttaaaatgagcaaaatgtcagttggaaaagcaaatggacgataattttggatgataaatcaatggcaataaaagagacaaaagtgtgggtattccgagagtcaaattgtgtgtcccaagtctcaaaatgaagacaacagatcgtttacccttcagtcagcagatttatgggtacttttcgcttttgtgcctacacctcaaaattcaaaggggcgcgctgaagggactttctactatttccatagcataaagcgataaagctccttttttaatcaattttgcttcataaaataccgtaattaccgtaatcattgtgactgtttcgagcattcggcgcgtttgggaacatcgcccgtccgtttggcgtttgttcgttggcattttttgtggccaaattagtgacggatgagcagagcaaaaaggcaaagtttaggaagaaaaaatgtgcgaagttaaaagccattttataaatcataaatttttatgaatcgtaaaagtaaatatattttttcgattatgctaaatgacaaaatcatatgctaataaagcatcgattgccaaacgatggcattggcattggcatcatgggaaggccatttccaagcaaagtgccttattgacggaagctattcattttttagaaacacatgtaaaatgatgaattaataatgaaatgttggtgattttaatatcaaatggcattggaatgatgtcattgaattagccaaatttaaaaaatattattcacacaaatttatgcgtagaaaaatggactgaaaaatcgttattttataattaataagcaactaaaaaggtaagtgggttttatcccaaagtcaattaaattcccaaaaaaaaa

SEQ ID NO: 28044 - DNA, 1006 bp, Heterodera glycines
aaagaaagacggaaataatgacaaattatgcgattgaccttttggcacgcgaaaaaaaggcatttgccattggggagagggaagagaatggcacgcctattaaaacacaacaaatcattggtggaggttaatgagtgtccccattaattatcagaagtgaaaacggagacaaaataaaacaatcaatggagagagatgaaaggaaacgccgacaaaaattaatcccattttgggccaaaaattattactttatttaaatccaacaaaaaaaagaaagcatttatttgcccagccgttcattcgtactttctgtgcactttatttaggaatgcttcagcgaaccaaaataaaacggggaaagacaaaacaatgtcaaaaaacatttacaaatcgaagccaaacgaattaaatttaaataatttttattttattaattcgtattttcctttttattttattctttgagagaaattcgcattcttagaaaaagaaaatttaaaaaaaccaagaaaatatctaattaaaatatttgaatgacccaaaggtaaaaaaaacattcaaaaataaaataaaataaaatggggtgagaataataacacttttgaacatttaaatgtttattcaattgcgtttcttttctttttttgctgtttttcacgtttttcttctgtgttctgtacattttcccacaccgctcactttgctcagtgtctgtctgtggccaacgcggccacaaaatggccattttttgttagcatgccctttataaataatatcctttttttctcttccattatttttattgtccgagtatctcaacttttaaatccctcaataaacttttttcttttggatatagcgttgacacagggaaaagttttcaaacaattcaaaacctaatacactaatgttgtttaattggaaattaggtaatggtgaataattcatagataaattacgaatttatgtggcctaaaaataggcataatttcacagaaacggttca

SEQ ID NO: 28045 - DNA, 639 bp, Heterodera glycines
tcagctgaacgattgggtaaattactaggatctaagagatcaatctcatccataagcgttccgaaaggaaaatactgtttgatttccgcaacaatattattaatcaatttttcccgaagggctttattgaattcaggaataggaggggaaattccaacaactagattctcttcggcagtcgatcgtgtatgtgcttgttgtcttaacatatattgagcatgttcatatcttttgccatcagttgcacacagaaaatcagcctcatagtctgagttttaattgccagtcataaacattcttatgacatgactgaaaaacgatgagcaaagcaatggattcccgtgagttttttatcatgatttatgaacttttctaaatgagcaaataaaccacctcgtgttccacgcattacagaagctccatcactgataaacccatataatttatgtttgattatttccgttaaaccgtcttcatcaaattctttttcgagctgttcaaacatatatactgccttttcagaacgaatatttattagtttgtatagcaaaacatgaggataatcgtcaaaaatgaagcggaaaagcacagttaaatacatattctgattattatcggatgcagtgtctaccaataaag

SEQ ID NO: 28046 - DNA, 1502 bp, Heterodera glycines
caaaaaatgttttattacggctaaaatggtcaatgcacattcatcactactgttgtgactgctgtttcttgtccgccgaaaaatttgaagaagtcagtgaagaagtggcactttgttgacgtgccaactgtcgacgacgttttgaccacatttcatgctaaatttagggcaaattgtcggctccaaaaaaatttgataaatcaatagcatcaaaagaagacaccaagaataatggcatgtaaaatgctttaaatgagaatgctttccaattaatttttggccaattccccaccccgtcaaattcaaaagcgtaatgcaatgtaataaatgtgtaaaatgtaatgcattgttgggttcgtacacagtcctgatcctgcggcagttccagcgtcggcaccaggcttggttccaccttgcttagccaactgtggttcaacgcctgtgacgcggttggtcgtttgccagggtccaactgcagcaacaggtcgagcaagtcgagcaccggatccggcatactgtaataaagaggaagttggtggaattgaaaaataaagcgttagtaaaaaaataatcatttggtcgaacaatgagaatttttcgcgcagcttccgcgggtaaattgtccgttgtcgcattgtcgaataattgggcaatttcaacactcctggccaaacctcgggcgaataggagccacaaaattgagaaattaattccagctgttggtgttcagattgtccttgaaagacgggctttttggtgaaaaattcggccaaaatgcatctaattgtaagtaaaaaaagaaaaatttaattaaaaaacaaataaaaatttacccggcactccaaatatccacgcctggtccataacttaaaaatactttgtttaacaataagatgaatggagctttcaaatgccgactgctgtcactgtaactcatcattcattcacctttcttcgcccagcaaaagttcaggtggtcggtaccaaagtgtgatcactcggtttgtgtaaagccgtttgttgttctcctgatacagtcgtgcaagcccaaaatcggccagtttcagttggccactaaattgtaaaataactaatttaagtcattaaagcgtcatttttacattcgactgatcaaaatgtttgaacatttgaggtcgcgatgtaaaaacccgcgcatatggcaataactgagagccaagagaagctgcttcatcagtgaggcaatttgcaactccgacggattgaccgattgggagtcgagcaggcccatcaggtcgtggtcaacatattcaaacaccaggaaaaaggaggaggcaactgaagggagaaaaacagatagaacgatgacagcggaaagcgacgacgaattaattttacaatagtaaaaagaataaacctacaatttagcaaggtaaattcatatttctgacaattagccggtactttcactcatttaagccggcactgtcataaattccatataattttaaaaaatcagtctc

SEQ ID NO: 28047 - DNA, 1448 bp, Heterodera glycines
  unsure (1)..(1448): unsure at all n locations
attcctntttggaccgcaaatatcacaatttttattttcattgtcacaatcgctgcacgtgaatcgagcagataaaaagacaactttatgctcgaattttccctcggaaaaagaattatccgtctaaattcaatttaaaaatttgtaaattagcttttttcgatgcttactgaacattcaatatcatagctaacaatacgatatcttggtaaattcttgggaatattaattttcttgatgtaacaactctctgatttggcgtgttttactttgcaaacgttacagaattttattcctaaacatgtgaaaaaaaacatttttaaaagaaacattttaccgcaaatatgtttgttacgagtgttgtattcgctatcacataatgtacaccttctgtataatttgcaagctaattttagatgattttgaaaacagaaatcgctaaagaaaagtcgattacattttaaacattcaatgggctcacgcccttctttttcacatggaaaatttaaacctaaaaatttttataaattattattacccgtccctaaaataataccccatccgccacaacgctgacatttaattacacagttgaccgtgtgtctaattttttctcggaatgtctgttcacaatatatacaataataatgttttatgttgaaaaattgttttacgctttttaatcctaaattttttttgtaataatctaattgaaaaacacgcttaccatcccagtgatcattctcatgaaaaacgcaaacaatgtatttttttggtccgtctcccttgtatattggttttatcccccattcctaaatatatttagggaaaaaataatcttaaaaatttacctttgtaaaagccgcaattaaaaattttccgggaaattcttggttcaaatactcttgaatttgtctcaactcgtcaattccatagtttttcttattcggttcaattttagcatttcggatcaaatcatccacataaattcgttgtcgtttagcgttactgagaattcttcgaaacattgagtacgaaatttcagtgcctattgtttgatatagttgactcaaaacaacactataaaaaagacagtatttgtctgaatttttgaccacaattcttccattttcttttacatcgaaaaatgttgatgtattgatttttgacccttaaaatgttaaaatttgttaatttaaaactgcctctatgcctgatcccattggaacggagtaagttgtaattatcattgttatttcctcattcaaaagatctatctcattaaaactctgctggatatggtaaaaggcctcaagaacaacatacgggctaaacttctaggtgggataataagagggtcagaaatagcctcacaanataaatcatatgaaattttttctatttcccatccattttcatttttttcattgctttttcccgtcagtaat

SEQ ID NO: 28048 - DNA, 1123 bp, Heterodera glycines
catgattttttcatgttttgcaggtgcccgacacaaattatttgtttcttggcgattttgtcgacagaggcttttactcggtggaaacatttctgctgttgttggcactaaaagttcggtatccggacaggtaaaaacaaatgttaggcattttgcatggtttccatctctgtagatgtgtcagccctacgcctaaaaaaacacggaaatcagggtttcaaccgagttcttaccccaaatttccaactttttttttgatcctaccttagaaaatttcggtccattacagtcccgacaattacactctcgaaacgcattatcgagtcaccctaatttcatttgcagaatgatgttgatccgaggcaaccacgagtcacgccaaatcacccaagtttatggtttgttggttgatttctgttttaattggaattgaaagaatttgtcccaaattttccaggcttttacgacgaatgctttcgcaaatatggctcagcggttgtttggtaaaaaaaaaaattttttttcgaaaaatactccccaaattaggcgttgctgtacggaggtgttcgactgtctgtcactgtccgcggtgatcaatggtcgcattttttgtgtgcacggcggtctctcaccgtccattgaaaccatcgatcagatcaggaccatagatcggaagcaggaagtgccgcacgatggtacggggaaaaaattacaattttttttgtgattcaaccaatttttctactatcgcataatcagagcaattctcgggagggactataaattgtttcagcctcggaaacgactcattgtcaatattcgtccgtttagcatatatttttttaaaaccttggccaaacaaatgattttagcgattaaaaaaacatttcggttgctcacataagtcaattttttaaaatatttttcaattttaaggcccaatgtgcgatttgttgtggtcggacccggaggtaatgtacataaaaaaaatgaatgtttgaattttatgtgccattgtttttaggagtcggttggctacggagtgagcccccggggcgccggctaattgttcggttcggacgttgtgaaaacgttttgtgaaaagaacggcattgacatgatt

SEQ ID NO: 28049 - DNA, 1270 bp, Heterodera glycines
aaatattaaaacaaggaatataaaagtaccttaatcctagcatataaaagttatataagaccccagctcaaatacgcatccgaagtatgggatatcgccgtaaaagaatcgagtaaaagaatagaaaagttcaaaaatatttcacaaaagcgcattagggcataactcatttagacacaaaaatatttcgaattttcatcaatatcacaacgaaaaacatttaatcttaaaaataatgatgcaataataattttctgcgataagtgcaattgttgccttgcgctatgctcaataaataaataaaagttaatttaaattcacatttaattaattaatttagcttattaaatacaaaagtttacctccaatgatgattattttgcaatttcgtaaaataagcgggatttacattttttttttattgttcagagaaaagaccgggaatgttggccaaaactgttgtttatttgttagttttggctttcctgagttggttttacgtgttgggatggcatatttcactaactcactaattggatgactgtttgtctccccctccgcagcaaatggtcattaattaattaattaaaggcaccactccctcttcagcagcagtcattccgccaaccccttaggacttcactatctttcgtttaattattcgtcggcttgccgaaatccaaactcaccagcagggaataatattttcacaatgggaaaaatacgggaatttaattttaaaataatgacttttcatttaattacattaattaattaattattgttttggccaatgggtctttttggcggcaaagtctcaatgtgctgacacaaaattattatcaaaatgattaatttacgaaattttctcccgcttctcttttgctctgctttgtgcttttctgcgacttttcgctgccgaaagtgacaaatgccttggcaaagtgtgccattcgtcgactggcaatttgctgactggcagaaattgcatttaaatttaacacttaattattttattccataattctaaagacataagctccacgcttcgtccacttgcggtacaaatggatttttgaagttttcgttcagtggtcaaatttatgtaatttttaaaggaattcacaaaccgcagcaatattgcattgcttcatcagaaaatgtacacaaaaagcacaaaaaacttttttaaatgtttgttttttaggtgaaatgcctttggtgtgattcgcgtcattctccggcggaaggcaaaaaattgcaaattatg

SEQ ID NO: 28050 - DNA, 2018 bp, Heterodera glycines
agaaagagcaagagagagactgtgcgagagaaagaaacatagagaagagagcgggagaaagaggagcgagaagagaaagagagagagcgagggcgagagagagagagagggcgagatgagaaattccccctcattatatatttttgaatttataaattctgtaaattttcagtttgaattcggtgaatttttaaaatttaattcgttatatttttcataaattccaatcacctgtgttcgatagttggccttgtattgcataatgtctccatcaacaaatggcgaaaatgccaacatttgtgaggcgccaatttggaacatttccagggaaaagggtcaaaaattaaaataaactatatttaaatagaattttcaaaaattttttggccaaccgatgcgcggccgatgaagcatcgccaagcaacagccaatgccggcctcggatgattagcccattgccgtcctcgcccggctcgtccaaagcttcttccacgccgaatccgtcatcccaaaaagcgcggcgatgaagctaatggaaaaaacaaaaaaattctgaatctttgggcctaattttgtcatttcaccccccccccccctctgattttcacgatccaaggacataacgcgaaaatttcattaaattcaaggacacttaaaatttatcatatgcaataaaaatagtatttttcgccagaatgaatttatccaatatttttttttgttcatttttcaaggacatctcgaattcaggaatatttttaaattttcaagtaagagtgtcctatttcaaggacgtccttgtcattcacggacgaatggcaacgccctgaacaaacccttttaaaaattgtttgttagtgcgctgcaactgttacagtttacggcatgtccaagaaaggcaaacagataaatgctctgccgaaaaagcatttaccgtatccccgcttcaaccatttccactaccgcccgcccctaccgtaccatcaattcgatttgtccgtccgccagtgaagcgccaccctgggaccggtctgtcaaaatgaccatccgcgttttgtcgtcatgtacataaattcggctaaattttggggaaagttttaaaaaaaaaattaattaggtaattaaattttgcctgttcactgggtaataattggctgccaccggttcggtgccctcaaagaatgacgaatcattgcggctgaaattcaaattttactagtacatttcataaaagtgccattccccacaaattttcaaaaatcatgaaaatttttaaaattaaaaaaataaagaatatttaattaatggaatactttaaaacgaaaagactcagatttagattttgaagaaatatatcaagcaaaattcccaaatattaaaaaattaaaaaaaaaatccttcgattcaaagtcttaggattccttttttgtcaaaaatttttccattaaaattctttgaaaaaattaaattttttcgaattaattaaagttttacatttctttaaatattttttagatttaaaaatttataatggcaaatttaagaaacacgtcaaaactaaaatttctctacttcattaaatactcaaataataaatttatttgtttatttaattaattcaaattatttcaagaaacgataaaatcatttaattaatgagctaattgttttctcaccgtcttttcatcatttgccgtccgtttgaatcagtccaaaaaattccttcagagtttagttcgctcattgtgtaacgtgtgatcacttcaattgttttaaggtcactaaattaagaccaaaataacataaatttgcccaatttaatatcaaattcattaattcattaattagtccacctcaaattttttggaagaggtcctactgtaaaatcgaattcaatgtacggttttccggcaacaagtcgaacaacttggcttatccatggcgaaacaatttgtcggacttcttggaccaacaaaatgtgtatttaattataaaatttaaaaaaaaaattcttaaat

SEQ ID NO: 28051 - DNA, 1488 bp, Heterodera glycines
tagagtcagttcgaatttctagttaaaaatcaatcaattttcattgaattcgaagcgatccaccgaaaatcggcttaattaattgagaaagacttcgtctgtgctgctgaccacatttgcccctccaaaacaaaatatatttttaacttttttggctttttgcatgaactaataaatcataaaacacatggccaagggaaaaatggagggggaaggggaagattaagcatgggacggtgaaatttgatcagccaaagtttggaggaggcgaagaaaaccgggggaaggcgaaaaagacagcagaaaataaagcaaaaaataaaaataaaaagataaagataattaaaattagaatttgaaaaaaaactttaaaataaacaaaaataaaaacactaaaaattactaaaaattcaaaatcataaaattatactgttgaaaagcattgtttttaatgtttttcattaattaacttatcattacttagtattttggacgaaactattcacagcgctggaagatttttttaaatatacgatttattaacagattttatactaaaataagcgattttaaaatttttcgggcctaaaaattacaatttttgtactaaaatcaacgaataagcacaaaataatatttcatgtcaaaataagtacagttggcagctattgtttatatatatatatatatattttttttaaatattaagtcacaaatcaaaaacgtacagaaatgcgtgcagaatgtcgtacagctcctcgtccagcgtcaatttggacgcggtccgatcgcccaattcgccggactccgtcttgcgcattggcatccgcttgttcagaatgatgctcgagcggcgacgacggtccgtcagcgggtgaaggtctttgctgaaaaggcaaaaaacgggcatcaaagtgagccaaattaagcaaagcaataaaattttgaagcaattagtgccacaattgcctggagtgtgccgagtcaaatggcgccgccaaagtgccgccaacgctcggactggaccgaattggccatacatcggcactcttttgcagcacgacagccgaaaggacagtgcaggcagaaggcgggttgccgtccagtcttaagccggttgaaaatcgccaattaaattattattaaatttgtacttttcatcggttgaggctgatgtttgccgctgtccgtctttgtcccgctgcttttcatctacgacgccgttttcggtaaaaacggcactttttgcccgaggcaatgaacgtgccgaagctgaagcggaactgttcgtataatccttcgtgttgcaacattcagacaaattcaacggctcaatcccttcacgttttccgggcgatgaatgaaatcgctgctgaagacggctcatttatttatttgtttatttattatcaattttctgaaattgtttttttttattaaaatataaatatttatttaaaaaatataaaatatattttttaaatttaa

SEQ ID NO: 28052 - DNA, 924 bp, Heterodera glycines
ctccccataaatctggacgcatcggttcggcgggacttgcccgaaaacaacaaaatcgatttttacaagtgtccgtttggggtactcaaacaattatggggagcaaaaatccatcgcagaattaaagtacaggctatagggaagctattcccgaaggattcggtctccccataaatctgggcgcatcggttcggggggactgccccgaaaacaaaaaaatcgattttttcaagtgtccgtttggggtactcaaacaattatggggagcaaaaatccaacgcagaattaaagtacaggctatagggaagctattcccgaaggattcggtctccccataaatctgggcgcatcggttcggggggactgccccgaaaacaaaaaaatcgattttttcaagtgtccgtttggggtactcaaacaattatggggagcaaaaatccaacgcagaattaaagtacaggctatagggaagctattcccgaaggattcggtctccccataaatctgggcgcatcggttcggggggactgccccgaaaacaaaaataaatcgattttttcaagtgtccgtttggggtactcaaacaattatggggagcaaaaatccaacgcagaattaaagtacaggctatagggaagctactcccgaaggattcggtctccccataaatctgggcgcatcggttcggggggactgccccgaaaacaaaaaaatcgattttttcaagtgtccgtttggggtactcaaacatttatggggagcaaaaatccaacgcagaattaaagtacagactatagggaagctattcccgaaggattcggtctccccataaatctgggcgcatcggttcagggggactgccccgaaaacccaaaaaaaaattttttggataaaaattatttaaatgaactgactagataatat

SEQ ID NO: 28053 - DNA, 1255 bp, Heterodera glycines
ttatatcatattttcaattcattaatttttttgtttatattatatttcgctctctcaccgcataaaaaactattgggtgggtatttgttccattcaaatcgaaaaattgtcgtctatactttatttttgattagggcatttataagttcaactacgtcatcattatcactgtgtattaattttattaattgatttagtttatcgttttaattaatatcagtaatttatttttacgtcgtgttccaatatttgcgttaatataaattgattttaattcagttttataagccaactgaataagcataaaatatacgttccattatccaaagtatcatagctattccagatgcaattttgttttggaatctgatcaaataatctattttgatttctttttattgttataaatttaaatggaaaaggtcagttttggcactaatcaaatcgggcaattctcatttgcttttttattttaaaatatctttttggtttcgcgcattctcccttgatttcttgtttgagctatttactaactctagtgcaagcggactggctaccaaaatttgctaagcggcaggtaaggcactcaattaaaaaaatgattttataaaattatagccgtgccaacatcttgctatgagctttttttaaaatttaattggaaataatgaattatttaagtattataatgcggctcgcggcatgacttacgaagtgaagttgcgagatttggtctaagtcaagagggcctacctaccccgtgaggtgcactgcgatgcgcataaattttagtaatttaataaatcttaaatatcagaataaaaactaaattgaaagttcacattttttattttaaataaaaattaatatataaatatataaaaaattaccgtgacaaatgtgattatattggtaaaatatattaaaaacaaaattaatcaaaaaattaatttcttttctttaaaatgatttaaaatttcaaaattgcattgtttttcaaaaagcttttaatacaaaacccgagcattgagtagactcttcagaaattctaatttaaaaaataaaagtcaaaaaacattttaatcaataagataagtttatgtgtattaaaaaaaagagctaaaagatgtttcgaaataaggactcataaaaattaatggtaaagtaaaaataataaaaaatttgcattaaaccagcgacgaatacaattaaaaaaagaagttacattaaaaatgtaattaaataaaatttttgt

SEQ ID NO: 28054 - DNA, 1655 bp, Heterodera glycines
  unsure (1)..(1655): unsure at all n locations
ttaaaatttttgaccgatttcattaaataaggcaatgaaagccgcgccctcgtaacactgggccaaaaggggtgcctgatttgtgctccaatttcttcaatagaagctccaaatacntgcattcaagttgtttttctaaataaaacatcattaatttaattaattgggtaattaataagtcacttttttaataattggtattggattacaatgaatgtcttattagtagggctgggaatttaagtcacgaaataacaccaaaaagtcataaaaacgccaaaaagtcacaaaaatccaaaaaaaaggatggaaattagctgatatccataaaaccaagagaccagaatttttaaactaccgggaccgaggctcaggcttagacaattgaccgggcccaagtcgaccggttcaaaaaaagcctttaaccgtgaggtacgtggcttttttcaaaatttgttgaatattgttttaaaataaatcttttattttagctaggaattcattaatttaaaagagttagaatatatacccatatttttaagctttacctcaagctaattattaggaacaatccttttttgattaacattaaggtttccattttttgtatgaaagatttttttaagaattcggtacaattagagttcgtaagttatttttcgaaattcaaggcaaacataaaattagattttcttaaaagtcaaaagtttggctttttttcttctttgatattcaaaacatttttaggcattttttaaatttttcttctcaataattgcggaaatttctgtcggattttaattgctttttcaccggtcagaccgtttatttcttcgcttaaattcaaattttgcctcaaaaagtaaaaaaaaagacatgaaatagtcgtaaaagtgccatgtttgaagcttttaaaagtgaaaatatttttaagtcattttaaggccattttgagtcagcagaaaaaaagtcattggacttaaattgaaagtcctaattattaggggagaaaatggtttttattatttcgtactgaaaattcgccaacttttttcccttctcaaccgacggacctaacttttgtaaaggattttgtcattaataatttttgcttcaaatgagccttttgggcaattaatagggctttaaaaaatttttcgtaaaccctaaaaaataactcatttttcatatttactttttattcattctttgattttccccaatttttcttaccaaaatgcaaaatttcgggaaatgttcgttcaatggcgtgtaaaacatttgtctgcacaattacgttgagtttggcctttatgtgaaagaaatcagcagtgggcgttccgtagcaaaaaatgccttgaaaatacgcaaattttgggattaattttgaaagtgcgtcgaaatgaactcggtcagcccaatttggaatttttctgatgctttccataaatttggctgccaattttgggtcggcgcagtcggcactggcccaattgatgccatcttcatgattcaacaacagaattaatttcttaattttaattaatttaaaattgcatagatacatttcaaaatgccaatatgtattcatatgtaaaacgaaaacatataagaatttttttaaatacttaaatgatttttgaatttctattttt

SEQ ID NO: 28055 - DNA, 1053 bp, Heterodera glycines
  unsure (1)..(1053): unsure at all n locations
taaaatagataaaaaaaaataaaacaaaaagcgttcaatattaatagacttattttgaagcataaaagcaacaatttccgccaaaatttactcaaatgcatcgacgttacgtcgctaactcgcttcagcagccaagcaccataacgtgacactttctccaatgtcagtttgtctttgatccgttcattcaccaattcaaatggatcggttgatccttgcagtataaattgaataatgtaactggcagaagaagcagtggcacagagaaatgcctaaacaaaagaaaaggaaaagctcaatcaattagtagattaacggaatgtggtcacaccttcttcaaattgttgacccattccaaatttgttggagaacaataacaaaaacaacgcaatcgcttcggctgtccgtcgttggtcggagaatgcaaccatttggtccaaaaaatcctcttcgaccctctaaaagaccacaaaatgaggaaaaatcctcagatatcgaagccatgcatttatcgaattagaagaaattttaagaaattataccctcaattttgagaaattatagcctcaattttgaaaaatttatgtccatcgatttttggtccatattttatggccatatttcgcaattaatccatatttttggaagccttgttataaaagtgccaaaaattcataaaatcccaaaaagtagaaaaaaaaagtcaaagaaaatgcatgttagaagcttcaaacaaagtgtagaacactttgttatttaaaggtcatttaaagtcagcaaaaaaagatttaaagtcagcaaaaaaagatcattcgacttaattcccatcccgattaataaagaaacgtatttaatttgttttcatagaaaaaacgctttgcgcaccaaacttataaatgttgttttcttttgacataaataatataaattaaagcgtaattctatgcgtattaccttcgttttgtttctcatgctanatcttatttacaatttcgagtaaaccaaatcagatttttttaggactaacatnntaagaaatgattgatgaactgc

SEQ ID NO: 28056 - DNA, 1183 bp, Heterodera glycines
  unsure (1)..(1183): unsure at all n locations
ttgggaaaaatttgaaaaatggctattcttttttgctcancagtataggattccaaccgcatctcagaatattacgccgatactatcgttctggaattgtttctctgcgcgtttgttgggaaaaatttggaaaattggctatctcttttctgctcaacagtaataggaattccaaccgcattctcagaataattacgccgatactaattgttctggaatttgtttctctgcgcgtttgtttgggaaaaatttggaaaattggctatctctttttctgctcaacagtaataggaattccaaccgcattctcagaataattacgccgatactaattgttctggaatttgtttctctgcgcgtttgtttgggaaaaatttggaaaattggctatctctttttctgctcaacagtaataggaattccaaccgcattctcagaataattacgccgatactaattgttctggaatttgtttctcggcgcgtttgttttggaaaaatttggaaaattggctatctctttttctgctcaacagtaataggaattccaaccgcattctcagaataattacgccgatactaattgttctggaatttgtttctctgcgcgtttgtttgggaaaaatttggaaaattggctatctctttttctgctcaacagtaataggaattccaaccgcattctcagaataattacgccgatactaattgttctggaatttgtttctctgcgcgtttgtttgggaaaaatttggaaaattggctatctctttttctgctcaacagtaataggaattccaaccgcattctcagaataattacgccgatactaattgttctggaatttgtttctctgcgcgtttgtttgggaaaaatttggaaaattggctatctctttttctgctcaacagtaataggaattccaaccgcattctcagaataattacgccgatactaattgttctggaatttgtttctcggcgcgtttgtttgggaaaaatttggaaaattggctatctctttttctgctcaacagtaataggaattccaaccgcattctcagaataattacgccgatactaattgttctggaatttgtttctctgcgcgtttgtttgggaaaatttggaaaattggctatctctttttctgctcacagtaatangaattccaaccgcattctc

SEQ ID NO: 28057 - DNA, 999 bp, Heterodera glycines
tttatatagttattcaaaataaatcactcctaagtagaaatgtgtgtgcttattagtgaaattactcaagaaatggacaaaattaaagcatattttatttcgttctgtatgcacttaaaaatgaaaaaagaaaaaacaacctacaattttatggagaggaattgctagtttttattattatcgacgcttaatgtaaatattatctccatgcggatatcatgttttataattccaatccatttgctaaatttgaaaaagttgttaagcatttgaaagcttctgggccaataattaaaacaagccgatatttatatagttattcaaaataaatcactcctaaatagaaatgtgtgtgcttattagtgaaattactcaagaaatggacaaaattaaagcatattttatttcgttctgtatgcacttaaaaatgaaaaaagaaaaaacaacctacaattttatggagaggaattgctagtttttattattatcgacgcttaatgtaaatattattccatgcggatatcatgttttataactagcgggtgtgtgcatgcgagggtggcgcttgggaaagcgctgcgcgcttcttgagcttcgctacctaggcgcgttttagtctgttagggtctttgcgtcagccgacatgcacttggtttcctccaataattggagttgacacatcgcataatgcaatggaaaccggaagtgccctaacgttgcacatcatggccctcctccctcccttagtccaggcgttggcacgttattgggttgagcgctaaatggcaattcacctgtaggccctaaagagggctgaccggtccatgtcccggatccaagcttctcaccattttcgcacccaacatagtgcagatgggaatgggattggcatctctccaaaaaccatgtgcccaactgctctggactaagccatttattgtaacttgagcatattagtagctacaatattcagcactttggctcggccttgggcatcaa

SEQ ID NO: 28058 - DNA, 1016 bp, Heterodera glycines
  unsure (1)..(1016): unsure at all n locations
ataaggcatcggttctgctgcaaaaggcatctttttcgcgtttctgcatctgtcactttgttgcactccgaggcgcaatgctggccagggcagaacaggcaggaaggaactcgcttgtcatcagaatttctgactgactgagcaacggaaaaaactcgcgcattttcatgccgttctggtcgctgaggtcgatttggccttgcttcgtgccgaaatcgtgtttgtctgtcggcatttgttccgcgcagacaccgttcaacctcttctctgactccgagaactttggcgagtccagctctgagctgaggagtaccccatgggatgcctgccgcacgttccattttgacgagttccagtggacggcagtttgctgcggatgatttggtacatgaatgggctgtcatccggcatgttgaggttcgaaagttggcggcacacacgttccaaagtctcgaggaagtgttgcagtgatccaacgctatcgtccaccgaccgaagattgatcagttcggactgaagtgcctcggcaattttccgtggatccccgaagagtcgcctcagtgcggcgatggcatggacgtaattttcccctccacggtaggctgtaacggcgcgagcagcctcaccacgtaagcacccgtggaggtaattaagtttgtcgacgggctcgagggtggcacgatcgacagcactctcaaaactttgccaaaaggaaggccattccatcggttcgcccgaaaaaatgggaagactaagctgcggaagccgagcagtggcatgaggagcagctgccggcggcattggcatattaagagcattggcgaccggtactggaggtggctgataagcatgattcgcagcagccggctgctgaatattggcaccagcagcagcattgatcgccacaggtatggctggcacttgtgcaatggcttgggtcacagcagctgctggctgctgtcctcccgctggcatgacttggnntaggtggatttgcgagctctgctgctatgtga

SEQ ID NO: 28059 - DNA, 1076 bp, Heterodera glycines
aatttagtatttctatcaacatttcttttcaattcaatataaatttagattagttttaattctttttcttcaaatatcatttttaataatttttaatttaatcgatgcattgaacgcgttaagacgagctatacaaattagtagttgaacctttaatttctcaaataattaagaaaaacttttaattataaaggggcattgtaatacattattttgactttaattattggattaaaaattatctaattactcctccttaaattaatactttttttgttttgttttaagagtagtatttattttttgtaaattttaaatttacaacttattttcttattttagaataaattgcatttattaatatttatttatttatttttaatggctaagtataaaaaaaaccctcaagaatttggccagcaaataatttgggttaaaaaaaaattcttgacactaatgaagattgtgaatttaaaaattttaaagatcaaaatatttttatttttttttgtttttgttcttttgtccttccagaaaatttttatttttattttaattccttttaatttcttgtttggttttttcttttgtttgatttttttaataatattttgtgtaaatttaaaaaattgttcaaatgttctataaaatagcctaattttgaagacattgtccaaataattttctaaaaatcaataaaaaacgtaaagaaaattttattcattatgcatttataatatttaaatgaagcattcaaattttttaaaataagattataataaaataaaattaaattattaattatatattattatttttatttatttttttaatattgtcataagagctctacgaacctcagagttatcttgctggaaaatattaatgttgttagttttttaaattttcttgtttacttcaaagtttcttttttagtgaggatgaattagtttttctcaggccaaaataatacaacattttatggttattccattatacaaaacttttaaatacatttttagcctattattttaatgaaaaattatactcgaatttaattattttatttttattat

SEQ ID NO: 28060 - DNA, 818 bp, Heterodera glycines
ttttgtccttgccattttcctcctcctttttgtccttgccattttcctcctcctcctttttgtccttgccattttcctcctcctcctttttgtccttgccattttcctcattcttctttttgtccttgagcgatgggaatttaagtcatgaaaaatcgccaatgtcacgaaaaagtcatacagtgatggaaaaaagtcttgactcaaagtgataaatttgtaaaatttaaaattttgcttgtttaagtcgacttattatttttctttttgtataattattaccctcaactacacacaacaagaaaatttatttgactcattcattcccgagattgattcacttgatcagacttgactcaaaaaaagggcagaaaaaagtcttgattcaaacatgaaaaaccaccttatagttcacttaaaaccctgaaataattcaggctagcttaccttttgatactgatcaaaaaaggcttttacatcaacttgatcagatcactccttcatggtgatctggaaagttaaaaatggcttgaaatcgggaacattttagaaaaaaaattcctaattggctgggaaaatttttctggaattttttgattgagctgacagaaagagcacaaaattctctaccgaattgccttttgaatggtagggctacgtcttgtataccagggttaccctttgtccttatttgtaagatttgtccttatttaagcactttgtccttattttagtctttttttggattcagagagcaatttagattttaaatgataatttttgaaagaaatattttttgaagcgaattaatatgcaaa

SEQ ID NO: 28061 - DNA, 1011 bp, Heterodera glycines
aatcgtcctcttggatgatgacattcatgtccactggatgattaatgccattaactgtgccattctgtgaatattgccaaaattcggcctttttgttggcccacggacgcggcatttttggctccgcgtgtttcgtattgggcacgtagtgggccacccaaagtgggaattgcccgaaaaagtcgtcatatttggtgtcgaccaaattgttccaaccgtccctatttgtgtagatgtacaattttgctggcactttttccttcagtagtttgaccaattcgaccaatttttcactgaattcgcttttcacagctcctttgttacagtctaaataaattttgaaattataaattgtcaaattcgaatttccaaaatccattgttaattattgctcgcctttctcgacatcaatcacgatgaagtccttgcccgggtcaaatcccgccttatcaagcgttctaatgaagtgctccgcttgctctttggcgcttgcactatttggcccccctctgagtaattaaaaaataaattaattttaaattccaaagttttgttacgaagtgcgtcaatgattattgaaatgtttgctaattactcaaaataatgataagcgagacgcgttagaatgttcgcctctttcatccctttgaaattttctacaaatcgagaatcggcaagtttgttcccttgagtggccttcgcagcgtccatcctcaatcgatccgcattttgtatcatcgctttgttacaaataaaagaaccgcgataaccaagaacatcaatgaaaattttattagattctgtgcgaaaaaataagaaatgaatcttaattacaaaatcaaaattttttcccccagaaatctacaccccccccccccccccgtaccttctcagtcggtgggctgaatcccccgagggaggggggggggcatttctccggtcgtttacgcctcgtttccggaattgatgaatgccttcccaatcttccgttctctgctctgggcagatggg

SEQ ID NO: 28062 - DNA, 1508 bp, Heterodera glycines
  unsure (1)..(1508): unsure at all n locations
agggatatcggtacgatcagaaaatgctttgattttgatcccttttatgggtgggacttcttcgttcgccacttctgatttcaattgctcactggtgggcgagaacttgcgcgggtcactcgtttcactgaagtattttggaatttttttttttgtttattggtttgcttgtttggtntaattgggcttggtgacccgtgtgttttttttttgattgatttggtttatttttgtttgattttgtcaactgtttcagctcactcgtgttttgttgttaggttgaatgtttgacggacgtttggtcaggttttgatgagcaaatggacgaatttctgttggtcccggcggtcgtggcaccacttttgtcgttctgatgacggcaaaaaagtttgaatgggctgggcggacgtattcagagcgagttgacaaaatttaaagacccaaggcgccaaaaattcactttattttgtaccctcaaacttgggtaattaaaccataattaattaatgaacaaatataatccgacatgataaaatgggcacaaaggggaatggtaaggggaaggcgcagggcacggcacagggaagacgcagggcacggcacgggaaatgagcagggcacggggcaggcgcacgggcacggcacgggaaaggcgcacgggcacggcacagggaagacgcagggcacggcacgagaaaggagcagggcacggggcaggcgcagggcacggcacagggaaggaatggaaacttcggagggaaccaatgagcgatctgaaatcactgaaaacccagctccttttatacggcttttttgaaaccatagtacgctccaatttataatttttaattaaaatctgtttttgttatatccgtttgggttttgccattttcccattaattgtttgttttccactttttcctttacaattccaattcctttaatatattcaattaattattaataatttgtttacgaacgcaatccttaacagaattcgccatttaatattaattaattttcgttcctttcattcctgaggaaatgcacttttccttttcaaacaattttccgttattcatttcaaaaggtttttccatttttatgtaattatattttcgatagttttttataatattatttttccaaaataaatgtaaaaatattttttattatttatgttttatttttccccattttattttctattgttttttatttttccccttttttattttgggttttatcttaggatttcgcgttgtcgcgacactcccgcgcgttagaggaaggcaacgacacataattctatatagaataggtagtagacatggaattaggaaaatcataatgagtatgaatatgataataataaatatattgaaaaaattggctttaataagggaatagacaaaatttaatatatcagttacttggtcaaatgaaattccaatagtggggttggcgatgagtattgttagtgggaataatttttgtatcttgttggt

SEQ ID NO: 28063 - DNA, 1327 bp, Heterodera glycines
agataaaggccatcaaattcgcgtttgtatcgtttctccctttttggcaatttcatcatcagtgccgtacccatcatcagcagaggacaacaaatgctgagaatgtaaatcattgctaattctggtgaataattattttctattaattgggaggaggtttcagccaaatggacgacttaagttatatccaaaaattgtaattaataaaaatctaaatagaatttaaaacaatttaaaggtttgctcagggagatgagctagttgggtattcaaataaatgatgggtatgacattggaaaaatgaaatgtccttttttcaattacgtcctttgaagggacatactgagctagggattgggtttggtaactatgactggccctagtttcttgttgtttaaataatttgaaaaaaagttcgtcgtagaatttttagaaggttttcaagcttttgttaattattattcggggttttattttctaataagaatttcttgtattagttggtaaaatagtacctataaaaagcattgtttaaaaaggtgtaaaaaactgaatattatttttttcttttattttttatttttttctaatggaacgaattatttgtaatatttccttaaatattcatggaaaattcggtataattgacacataatacccaacttttgaaactcctcaccaaaactgtcttaaaaattaatcatttgtcctgaattgtgttatttgtggtaatacccttttattaggtgtttctggtgcgacacattttgtgttttcagaacagaaacttttggacggagccaaaaagccgaaaattatcagtagcaaatcaaccatactctgctctacatgaccaaagcaatttttttaatgtgattgggcagcggacattgttcatcagttagaattcgaagagaataatcacgaaaataaaaaatatattaaaagcattttaacaacacttagaatataatacaataaagcattctctttttatcatctctcaaaaagttcgttcagctttgttctcgaccgaagatcactctggattttacaattttaactgatcaattattgatcgatcacccaccaatctgatcggattttgatcaatgcattccagcgcaatatttgcggccagatcgaactcaattgcccacccggaagaaacaaacaatggcacatgggaagtgctcgaacgcagaatggccaaatcgggaagttgttgttggtcagcattttgcatgacaaacattgccgccccgtccactgttttgcattgctcttccgccgatttcaatgcctaaggcaattttcatttttaaac

SEQ ID NO: 28064 - DNA, 1101 bp, Heterodera glycines
ttgacttaatacattttcgaggtcactgacttttgcttgtacggatgggtttctacctgagaagaggcgacggtcaatcgcaacaatatcttcgtaaggcaaattctctaagggattgaccatgataggggaagtgggatgtatcagagagggtactggacttgcgcaccgtaaagggaaagaaataaagtaaaagttaattgtgtataatcactggatatcgcacaataaccaggatttaacttgctttgctgtatttaattggggtgattccggggcagatataaatggttcaatgcaccaaatatattaaacgagatttgaatgttagaaccaaaagaaacaaatatttaattgtcttaaatcactggatactgtacttcgtaaccagaggtttacttggtttactgatttaattggggtgggacctgagctgggaggtaattggttcaatgcgcaaaatgtgttaggtgttaaaatgtgcgtagatgtgatcaaaacgtaaatgtgatcaaaaggtatgttgtgacatttgtgaattgttaaatgtcagttttttttttgtgttattttccgccacacctttcggcttggaggggtgagttgaggctgagttggtgtgaaatggcaccacgggagaaggactgagtgtttggtgagggagagcaagttgagccaaatgaacaaagggctggtagagatgtcgaggacgaggacgtgttctgaatttgctttgagttttaacccaaatcaacgcaaccgtactccgagaatttacaaaatttaaaagaatttgcgatttttgaaaattgtgcgaacctaggaaggagataagtagggatcgtgtacgactagctacatgatgatatccgtacttaaaatgtgattatgtataaaatatattttatttgtacctcggcacatacgagactggacgattggaggcgtgactgagcataacagtctaaagggcgactaagattgaaattgtccatcgatttgattgggtcctcatgaaacaaatttggtactatgaacatatagtaagcggaacatatgtaatatcccgagacattgatcataatgatgataaacaacgac

SEQ ID NO: 28065 - DNA, 1638 bp, Heterodera glycines
accagtcattacatgaagaactacgacctccatgaggagcacattcctctcaggtgaagtgttaatccaatgcgtaaaaaaagggtttttatttgtataagctaaatcgtttcagactcacgcgtagcaaaaaacttcttgccacaatcaacaagaacttcgggactttggcattttgtcgccggtggttggaccgactgggcgaaaccaaatatttgatgtcactcagagacctttgcggtttgtaatagcttctattgcacactttggcaacaaaaacttttcagagaaggacattgttgcgccttatcctccgctctgtgatcaggtccaaagcccatggcaaattaacgcctttttcacatgtttcacttttctacagaaaggctgttacacggctcaatgggagcacaccattctcttacggccgacatgtaaagaagtggtgagccgtggcgaagattattgatggatgagttggtgaattggcggatggaggcaaagaattggccaaaatggcgtaaaaagatgatgttggcatcgttactataatgctaatttttattgtttgctctagtatttttatggttggaattaaagaagagaaacagtgtgtttttacattttatatcggttgtttgaatggaaattctgggcgaatgcattttcatattccttaagttggttcccatttttagattttattctcagagtccttttaaaacaacaataacagatcctgtaaatgtcttctttttttgtcacctttgacacagcgtttcaatttttgctttcaagttccaaaaaaagatttgcatgtgtgcggaattctttttgtaagatagtagtaaagggacaaagagcggccgttgcgcaatattaattttttttttttgtccaaaacattaaaaaagtgtacgccaaaataagaaatgtatttttctcctctgcactctcttacaattagtgctttttagaaaccaaaaatttagggttgttgaaataaacaaattagcacacaataaataaggtttgtcagttgattgaattcataaaatgcaacagaaacactcgtgttgttagtttctttccacactcaatctttaagcttctggaactgctttatacgtatttatattcgacattgcgatttgcagactccaaatgccgagcctcgaatctgtgcctgaacgcattaactttgacgaggaggaggaaaagaccttgcagaaatggcgagacgaaaacacttttcagacatcgcttgagtaagtttcgaatttgattttttcgacaaattgagagccctttcggctatgttttggtcattgaccgtttcgttaagcatgagtcgtggtcgacctcattacactttctacgatgggccaccatttgccaccggacttcctcattacggacatattttggccggtccttagttttttccaatgtgaaaaattggcgcatattcgttacattttagggaccatcaaagacattgtcacgcgctgggctcatcagagcggcttttatgtcgaacggcgttttggttgggacacccacggacttcccgtggagtacgaagtggacaaaattgagggcatcaaaggacctgacgacgtgctgaagatgggaatt

SEQ ID NO: 28066 - DNA, 1059 bp, Heterodera glycines
tgctctgaggctgcgttggcattggtgcgcatggactttggcaacaccattcgctttctgttggtcggctcggaaaagagtggggacaaagcaagcggcgctgttgctgaaggcgcggatgcgccacgccaaagcttttcgggcacaaaactgaacgtggatttgatgctgcgaccaccgcaacagttgcgcgagatcatcagccttgtggggtaagaacagcgaagagggacaaaacagagcaaaatggataaaagataaccaaaatcaataacacaatccgaccattgaattgggctcgaggacccccccccccaaatgaaattcgtttaatcaaaaatgtgaaaatttattaaaattgtttttttttctcttttaagaatatgaaaatctgttaaaaatcggccaaaaatttcaaatttttcatacgatgcataaaatcattaaaacatttatttatttttccccttttcaagccaaattgtgcaaaagttgccgtgcgacagtgtcgaggttgtgtcactgctccatctctttccgctgttcgtcgaaattggcaccaattcaacgtgtgcccagctgcggcacgagtcgctgaatgtgatgatgaaaatgtgctgtgcggtggacagcgctgaacaactcgagcccgttatccgtaacattttttaaaaatttctttgattactgttaaattgcttaccaacaaaaaccattaattagatttgtctaaaaattggaaatcgctgtcagattaaatcttgaacatttttagtgaaagtttagaaattaaactataagaatgtctcgggttggtaaatttcgagttgttttaattgcgctttttctaattgaatttgcacacttttttgttttgtttttcaggtgacattccgcttgccgtttacattgccgcaatgctcagttcaaatcgcaatttgggtgtgctgttgtccgcacttcaattggccaaagtgttgctggagaaactgccgatgctctacattccattgtttgagattgaaggtactctctttacaattatttgttttaactttc

SEQ ID NO: 28067 - DNA, 1147 bp, Heterodera glycines
cgacttttccgctgtttcgtcagtagtatgttgagctttcttctcctctctgtccggtgccgttttcactgccttttcgccgcgtttttcccccgcgggctccgccgctttgtccccaaatttggcccttctcgccgccactcccgactcgacgcccgtctcgcgcagtctctgcgacagaagtaccttttccgccgtgttcgtctccttcggcttcatcgcctccctttccatgtcgcgcgctttctctcgcagcatcggctaaatttggccaaatcgctttgtcgtccaattggcatgcttttctcgccttttctgccgatgatgagcccgcctttggctgttccgttgcgcccgccaccgccaatttcgaagcgttcgctttccgtgccaattcgctgatcttctaaactggcacaatgtccgctccgttcgtcggtctgttcgtttgttcattaattacccttttcgcctccgcttccttcggtggccgcgtcgtcagcggtcccttcgctttttccgcggccgccgcttgcgccgccgcttcttgccttcgcaatattctccctttttgagcataattacattcattttcttaatgagtccactcactgatctcctggttcctaatcgttgctttttcgattttaaatcgcccctcgggcaatctcaaattgatgctcacctgaaaagcagtgagtgtcctttttcatgtgctcatttgtctgctgatcagcagtgcccaccccttcccactttggtcagccctctgttctgagtgatcgcctcgattatttcgcgctccgaagttgtggagaatgcgacgccctaaaaaataagtgcacgcttactttctgatctatgatcagtaattcttcctttttatctccccgccccttctccctctctccttttacctcactctcattccctctctccctcttttccttctctctctacttactttctttcacctccccctttctctctccccccgcttttcctctctttctcacctcctttccctctcatcccttctctctctttttcacttcctctcttttccctctttcccttctctctgctgatcacctgattgactgctttgacctcctccaatgtctgattggtcagcgccgctttgaaa

SEQ ID NO: 28068 - DNA, 457 bp, Heterodera glycines
tttttcatcccttccccttctcattcttcaaacacttttatcttttcccctcttcctcttttcacttccatttctttctttctctctcttcttctttgtcaccctctcttttttatcctcatctctttctctcttctttttcctcccctcttccatctcgtccccatcttccttatcttctttccactattattttatcttctcttccatccaacccattttctccccccccctcgggcgcctcagtgtccctaattaaaagagtgtccgcccgccgctaattcgcttagttttggcccgttggggttgccaaaacatgtgaaattggacctggcgacctcttatgtattggatgagagtgaaaagcatggaagaagcgcggaagaggaagggaggaaaaaagatgagttttggtgggttgtctgtgtgccaacgtttcccctcccccccaaccctt

SEQ ID NO: 28069 - DNA, 1422 bp, Heterodera glycines
  unsure (1)..(1422): unsure at all n locations
gttttttcaagatttttatattaaattttgcaatgaatggttttttttcattgttaaatttacttttatatgaattttttgaaagaaaaactttctaaactacctaaaagaagcggatcactaacgcaggatcgatctcgattttttaaaacagaagtataccataacttttaaatcaaaaaacagatttatatttacgttccgaaatatttaaatataaatatttacaaaaaaatgaaatatgccttgtaataaatccaaaatattttcaattatattttatttatgaaggtcaaaaaaaaaattttttttttaatctttagtacatacccataaaaaattaattataagattatttggaaaaagtaagtaaatcaaatgtttaccctttcaatcaataaatcaagtttaaaaaaccatatcaagaattgtacggatagttccaagtccaacatggaatccttggtccaggcttttttcaaaatgccaatttttggaatatacaaaagaaacaaagttattcaaattaataatatgtatttaaaatgtcatttttcatctcctttcacgtaagttcaaccacttttggataagatgcgaaagagcgacaatgttaacagaattcgcgtccgtgttgggtgaatatccgttgacaaggatatacggcacttcaacgatcggattttccttggcggtcattgttctttgtgccgcttgtcgttgcaatagaaatccacgctctcccatatagcaaagcctgaaaccatcaaaaattggaataaatcacaaattgcacgtctcccactttatgcgtttgtagctgttgcggacaaagctggaacactgaagcagtgactgttcaacaccggaaccaacggacagtgaacgctcgaagcaaatgacgaaatggacggcctgatcagcggacacttcgtcaagtacgcaggacatcagccgattggcatcgcattccttaggcccgtggttacaactgaaatgtgcaaaatgtacagagaaaggagcaaaaaataattacgaaatttggccattccgcagcaaaatgctgttgccccaagggaccaagtccaatttgatgcgacttccgaaacgattgagcaaagcgcccaaattattggcaataaaacgctgacaataaggacacaacgcctcataccttaaatagaaaccaatcaatgacagcaaaggtgtggccagatcagcagcagctgatcgagcaattcatttaatttaaaatatttaaatttaattattatttaattttatcttagaaaaattanataataattanattaaatatttctaacattgataattttgtaacttcgtcacacacttaatttaatacccaaagggtcaaacggagcgaatgccgtttaaatttggagagacttactatataca

SEQ ID NO: 28070 - DNA, 850 bp, Heterodera glycines
gtatttttcattttcttgtatttttattgcaatttttctcaaaaatgccaaaatatgtgcaaaatatgtgccaaaccccaaaatatgtgctaacatattttatgtgccaaaacgccaaaatatgtgtttttatgtttttataagtcgctctaaaccaaaaattgttcggagaaaatgctatttttgggcttctctcgccataactaagccgcaaaaaaaatatgttaaaacataaaaatcctagccctaataatttgtgatattcactttgttcgaaaaatgagtggataaattttttactattattaaataaagagaataaaatggacttgagtgtaacggagaacctgggaacaaaaaaacacagattatcacacttttggcaaatgcagaaacacaaaaataattaaacataattttaccagcttctatggaaacagtttcgaaaattttgatttttaaaaatcgtgaaaacatatttaaggggttttctaattaaattcttttttttcgaccgaataaaatgttaccttcaatgtcaaaaaagcaaagaaagccagaacagaataaccggcaactacgcataattgaagtccaattgttcactccaactgcccgacggtacccacactttgattacgaagaaatgtgcaaggaattgggagtgaattggaagaaatgattccctcataaacatttttcaattttagctcgaaatttcgaagcaaaaggaaactgcggagagcaattcttttcacgaccaagacgcagaagaaattgtgcgaagattggaggcgaaatatgtgtgtttgagaaattgtaaaatcagataattaagaaaatacttaat

SEQ ID NO: 28071 - DNA, 707 bp, Heterodera glycines
aaagcgaaatgcgaaaagcgaaatttgcgaaactgaaaaatgcgaaatgaaaaaaaagcgaaatgcgaaaagccaaaatatgcgaaaatgcgaaaagcgaaattttttctacaaatttttaatagttaaaatcataaagcaaaaatcattttttaaaattttattccaaatttaaaaatcaataaaacgcttttttgatgcgcgctttttccaaaaaactttttgggaagagggggcaggcggcgccgggaaaatttttgaaaatttgattaaaatttgttgaagattttcaccaaaaaatcatcaaattttgtgatttttgtatcatttttctaatgagaaataagagttttggcgcgccgctgagaacagtttttcatcaaattaccaaattttgcgattttggagaaaaaataggagttttgggggcgcggcggtgccgataggcgccgccggggaaaaaaactggaaattttaatcatttataaacagtttttcactgaaaattagccaatttataggtaaaattttgaaaaattttatgggaatttaatccaattcttaggggtgtaaaagtcgcatttcgcgccaaaaagcgaaatgcgaaacgccaaaaaatgcgaataatgcgaaaggcgaaatgcgaaacctcggcccatccctggtcccaatgtccctgcttctcaaggggacagccccgggggggg

SEQ ID NO: 28072 - DNA, 1421 bp, Heterodera glycines
  unsure (1)..(1421): unsure at all n locations
tagccttacaaaaaacaaacaaaaattttagcttctaaaaaagttattaagaaaaaaactcaaaaatttcgacttttttggaatttcatgttataacttttttggtaattgtctaatcgcgaagcactagctttgaaatatcttctaaacatgttaagctttcgattgataccaagattgctggatttggttaacaacaaaaaaagttataacccaaaaacttgggctggcgccaaaacgtcggcgccaaaacgatacggacccctaaaaaataaatacctggaaaattggttctaaaaactcgaaagtagcttaacaacgtcaaaaaaactcattttccgtgttttttagaccactaagagtgtaatggctgagaaaatagctgtgggagttgccaaaatgaagtcaatcctccagtggtggatttggtctagtggttcagacaacggatccacgtaaggggctccgagcggcggttcaaatccggccttccgccccaaaagaaattaaactgtaaaatttagaacaaataattctctgaagttttattttaaacttggcttttcaatgtttttaagtcccaccgtgaggcggggcagttctgttgtatttctctgtggtgcggaagtgtaaaagatcagcccacggtgggactcgaacccacgacacctcccataacgcgggatgctctaaccactgagctacgcaggtctcattcccccacactcatctcatccctctgagatgcactcttctcggcccgagatagagcgtccaaacaccacagatctcttctctcctcggcccgagtgagagagagacgtcgttctccaacaacttttatagattgttatttattttaacctatatttttccccaaaaaaacctttctatggtctttgatcatcccatctaaactctaaaagtgcccaggtgattggatttatttttggatagctgctttctagctcattttcaaaccaagagggggttttcacctttctgatgggctctttgaaaacagctttttgattgaaccacgtcgctccgcttccgcccattgggccaaaattcgtcgaatgcaccgccgcgcataagtcacttcagaatcgcttaaatgggcggtcgactcactgagaaatgaacgcatttcgggcgacaacgctaaacaaccaagtcaaataaatggcatgttagtatattcaaatgtgttatgttcaccttcctcttcctcctcttcgttcccatgtccgttaaatgtcgttaaattgtgataatctgatggcggtatgttttccttgtcgtccccctcatctcccttcttcaattcgctgtcccaagtgtgtcgtctttttgtagtgcctcttacagttttgcacattttctanaaaataaataaaacacatcaaatttaaaatttt

SEQ ID NO: 28073 - DNA, 1622 bp, Heterodera glycines
tgtagtgggaaaacctattagccctcgcacataaaatagctaaacaatgaagtctcacaaattgtcgctcatatgtcgcataaatagttagcgcacactgttttgttttgttactccgcgcgctcctttgttgcatttttttttaaatttggccctgtgtacgcatatccgaaaagtaccaaagtttttgaaaagcaaaaaaaaaggtcatcaaaaaaatcagcggccgaccccacttcgcaaaaaatttggccgacttttgaattatactgttttttcaggaatctgttcacccaatttacaatgtgcatatcgacgcatattccaaagcgcaacgatatttcaaagcatgatcaatgggcttttcaaatgtaataaaaagcgagtcgaaaaactgacaaacggtggaaggttaagcattcgaaatgagaggaggaaaagcaccgggaaaagcaaacaaatcatattgacaaatgctttcattttgtttgttaatgagtggttaccggtagataaagtcgaagcaagcgaaggaaagagtgggcggggaaagcgccgaggggcgacggcgttgggattttcttttctcaacggaaacgaaatgtattccttcacttgtgcaacaatctcgcatttccgttttatttcttaatcggactccataaaatgtatggcacgtcaaatgtctacggattaactgttgacaatgggaaggatgctcatggaaggcaattctcctctggtcatcccaattcatcccagaaatggtcgccgttttaccagcgaagaaatcacgacggattcggtggattgtatgcaccattttaataaactttttgttctaatcacaaaaacattaagcgaaatgggagagataagagaagaccaaaacaattcaaactattccccaaatattgttcataaacaaaaaatgtcgcagcaacaaatgcagtcgaaaatgtgcaaagataaaacgagcaaaccattaacaaaggttggacaggaggaattagcgaaaaaatgtgtcagtgatacagtatttgtagaaagcaatatactgtaatggactattaatcttacaatttgtttttacgcctccaatgactataaagtcgataggacttttgtctaacaaaattatggattaaacgttggaagataacacacaataagcatatgcatactaagaaaaaggaggggcttcaaaaattagcaaactttcctttgaaagagataatgatgatttattggggggggggggggagagggggcatacccaaaatatcctttggtgatacgttctgtggttacaaaaaccgaaaatattgaaatataatttttagcaaaatgtttttatagcaggttgaccaacttctttatgaacttccacaacaaaacaaattctcaataaattcgctttgtcaaccgccagagtttcttaaagtgttcagtgatgtgcgttgtttggtgggcgaaaagcagtttttgattgtgtgcttttgggttctccacgcccgagggtgattttcaatttatatctgaggcattatgcctaattatgcttaacttccaggtttgttggctggttaatgatgacaaattgttatttgacgatattttac

SEQ ID NO: 28074 - DNA, 1238 bp, Heterodera glycines
aaaaagcggtgggccataatttcgaaagtagatttttttaaacttttgcacaattttcaaaaaaacatttcgtttcattaatttttttttttgtcttttcggtgtattttcagaaggttttagtacatcccatttggacatccttaccatgatgccggactccctttccaccgcaatgtccttcagcatggaaaaggcgaacacaaacaaaagcatggtcagaaaaaggggcaccgttatggtggccatttgcttgttcatgtacgacggaatgggcaaacggtggagacggagcgaaacatttgccaaagcatcgtcacctttggccttaaaagcacgtaaaaaagtgaaatctctatatatttttttaattgggcacactgtgaaaaacgacaaactaacaataagtccattttcaaaaatatatatattgatacggaccaattcgatgaacgccttttcgattgcgtactgaatcgacaggaaaccgctggaccaatagggcggagattcgggaatttggtagtcttcaaactgcttttcgctatcatcgcgccagaattggttaatgagttccatgtcccaactaaacaatggacaatttgaaatgaatcagtttttaattaaaccctctaaatatcattagttttcaaccatgtccgaaaaatatatggaattaaaaaaaaaatttcgttggaaacaatccgccgatgggagaaattgggtaactttttgaatattttaagcaactcttaacaaacccggcggtgtctcattgttagcactgccggaccacatcatattttgccatatttttgaaacatagtccaaaatggcaaaaatactcatttttggcgaaaaactactataaaagccagtaaaacacacccatcctaattcgagattaaaaaaaacaaaaaatacaccccaaaaatcgatttttgaattcagcccccccccccccgaagccaagggtctggctcatttcagaaataagaaaacaaagattttggtgtgtctttatgatggaataatttagatgaaatttttgcacacacatataaaacatagttgaaggggggggggggggatcatactcgggggagaaagggtccctcgacggaaacaattgggcgatgcccaactgggcaggcaacaacctgttttttgggcatgttcatagttgtccgtagttaaagaaagcccctaaaattttgagtaaactttgttgagtattt

SEQ ID NO: 28075 - DNA, 1507 bp, Heterodera glycines
ttcggtcgattcttaggggtgtatttttttgaattttttagggccgattcttaggggtttccgttttattgaattttttttaacaaattttccaaaatatgcaaaaaatctgaaaatatgtacaaaaaatgtcaaaatatgcatgaaatatgcagaaaaaccctaaatatgcaaatatgcacaaaaatcccgaaatatgcaaaaatatgcaaataaaagtcccgatttttatacgcaaacacaaaaaataaagtgtttttcctgctatttagagcatggagaagccaggaaaaaaaaaatgcatttgcatattttttgcagccctgcttaccaataattaatttattaatatttatttgccaatcttttcatattttagaaatttgcaaaaccttctacttccgtcagtttcattgttgtcatttggtttccggcgttttttgcttactcctttgagccctttaatgagaacaacgaattgactcgggaacaattgacatttaaaaagactaacaatagcagatgttttctgcttgtccgttgtccaattgcgcgagaagaaagcaaatggatcgaatgggaggaggaagcgattggctgggaatttcttcatcagccgaacagaatcaatattcaaattgatgatgaggagaacattggggacgggtcagtgagtattttttattcaaaaaattcaaatttattcgtttccatttttaggcttctcgacgcaactcccggcccaagtgatcagcagcagaagtgaatgaatgaattgttgcgaagtgatcgaccaatttgaattgcggaatcgaagaatgaatttgagcccatttgacgtgctcataaaaatatattctaattttttggagttttcacaaaaaaaaatttagtgttaaatgttgtggattcaaatttgataaacgaattttaaaattcggaacaaatttaattttgtttgcaacgaaatgaaaaaatggtttcggcagtgaaactcgctgttgacccactcgcgcatcaattcagatttggatttaattttaggcattttcaatattttatcctaagagatatatattcaaatcggaacatatttgacgaaaaatggcaaaatatgcaaaaaaaaatctaaaaaaatatgtacaaaaaatggctaaatatgcaaaaaatctgaaaatatgtacaaaaatggcaaaatatgcattaaatttcaaaaaaacccaaaatattcaaaaaaacccaaaatatgcaaaaatatgcaaataaaagtctcgacttttacacgcaaacacaaaaaagaaagtgtttttcctactatttagagcatggagaagccaggaaaaaatatgcatttgcatatttttggcatccctactaattagactacgtagaacccaggaaacatattttgacagtcctggtaattggcatacctaacatgtttttggcatttatttttattttaatataaaagtaaaatgtgaaatataaaagtaaaatgtgaact

SEQ ID NO: 28076 - DNA, 1617 bp, Heterodera glycines
  unsure (1)..(1617): unsure at all n locations
taatttgccagttttacccacctgttcatgatcctttttctacaaatgnagcattccacattttcggtgatcgaaatgcgttgccgcttcaattcgtcaaggcgattctttgttcgtctaatcaccaaatttgtgaaagagacaatcaaattggtctgaaatataatgggattgaggagcaaatttgctaaaatcaacaaactgaggccaattgattgttcagagactcaaacaaagctttaaccgcttcgcaaattctgttgaatgcagttgtcggcggaatgagagcaaaagcgcccactataagcaaaggtcggttcaattggcttttcctcttgcgcttgcctgtgtctattttggtcggatgccttttgaacaacttcagcgcctccgaaatgtttggtttgcgccgaatttcgtaatcactttcaacttgaatgacctctttttgaggcatttcgccttttatataataatggaaaaggtcgaagaaaatctaaatttcattaaatcgttctgtttgtccgtttgatttacgttgcgagtcgatgcatttctttcatcgtaataagtttggcagtgtctttctgcgccattgaaatccatcaaaatttccgtataaattttcaatgcgtttaaatgctgtcctaatttccccataatgatcgctctctcctccattaaatcttaaacaattaattgtaaataataagtgttccaaagccaagattacttaattcgaacaaaaagattagattttatttggagcgaagtgcgacattctcggctcaatccttttagaccatataaaattcaaaaaattttccaggctattaaaaaaaaatatttttttccctacaaaaataagaagctaaaatcagttatttccacccgccgacccctcggagtcgcatgctaacccatatgagctttttaaacgtgcaaatgcttactttggtcttccccaattagatctcttgcactttcaatcgaataatgctggtcggtcgccaaaaaatattgtaatttccttctcaatatagataattcatcatcttcggcgacaaaagatggaacaccaatcgacggagaggagagcgaatggaggaactgaccgagcaacgtattgcacctgagcacgtattgctccaacaattccccgtgaaagtggggactctcatcactccattcgtaaataacgtgttcctaaacagggagggggttcggtggtaacaaaaagaaacatacgacgaatgagagaagttgtcttatttattgtcaggtgaagtgttggaaataaacttttttttaataaacctcaaagttcagaaatagtgcatttttctgttcatgtttattttgaatttgtccatttcactcaccaaataaggaatggctgccgttatgcactcctttttgaggaagtgcagcaccatctcccggtcaaatttcacgcttggttcttcgcccctttgttttgggtctgtttctttgtcatccatagaagtgaatatatgaaaagaaactgataaaaattaaattttcccatccccttttttgtacctgaacacccgagtcgatattggcagacaaaatgggagcagaaactccaaatca

SEQ ID NO: 28077 - DNA, 1570 bp, Heterodera glycines
ttgtgaccttgcacgaggcagttgaggcagcgctgttgttctgtcagccgttttcggcgagctcccggtgttgggaacgccgggcactcactgggaagatgatcagttcccgagcagagcgagcagggacgaccccattttcttgctgtggttttggccctttccggatttttgttaatcgcggagaacgccctatattctggttggtgcgttactccacgattaaatggccttggtggttggctctgtcggttgttggagtgacggttgtcacccctttgatcccaggcacccctctgttgaggtggggaattgaaggtggatgaacgtggtcgttcatcgcctcggaggacatgtgcacatctctgcacttcctcttttacttccactattgcttgaagtgcctttcggatgtcaaggcacgaaaatgtccttcctgaggaaagctctttctccaccacgtgggtgaggatggagaacggaagcttcgacttgatcgtcgaagccatgaacatgttttcctcagattcgacgaagtccattagttggaaacagattcgttccacggactccgcgaagttgcggagcgagagcactgactctcccggcttggagaggtgcagtagctctgcctgcaaagactcagtgatagttttactatcaccaaatcgcttcttcaagatgtcgacaaccctcggataattttcgtccgagggtgggtacaagtcgactgcccgcctagctggcgagttgtggggaaggcaccccaacaaatagatgtgcttcttgaagtcgtcgattggaaggttgtccactgaggaacggaagagcctccaaaacattggccactcccttggctctcccgtgaattttgggagagagatgggaggtaggtacacctcatggcgaggtgggggaggctgaacatgttgaatttgtggaggattggcgggctgagagataatgctcccagttatttcgtcgtcatcctctggaccgatcactccatcgatcgtgtccacttcacctcgggctttgtccgcccattccatgaagtgctttcccgatggcttaaagtcatcgtagcgttgctcctcttgttggcggtcggctccattgaatttgagcaggagggattgccatttgtcattgcaatcctccaaaagccgaatcgctcggcggagtccacggcgctccgctgtgaggtctgcttgaatgctcacgtctgtcgtgtcctttccgaggttgacagtggccgcctcaatgtaggccttggtacgggcggcacaaggcccgattgaagactcgaagattcggctgctggtggccggttgtgtctccctttgttgggtgagacttgggtcggcggtgatggccgaatgtgtcttgcctcttgttgggcaagacgaagaagtcggcgactggtggccgaatgtgcctaccctttgatgggttaggcgaatgagcggcggcgatggccgaatgagccttccctttgttgggttaggctaaatgagtcggctgctgatggccgagtgtcttgccactggttgggcaagacgaagagtcg

SEQ ID NO: 28078 - DNA, 1081 bp, Heterodera glycines
tttttacagcttaactaggccctattaagcttatttccagataatcccgcatgaattctcatttttaaattttttatagatttttaaatatttggattttttttggcttaccaaaacttcatcgaacctggttctttctattctctttcaaatcgccccaaattttttttacagcttaactaggccctattaagcttatttccagaaaatctcgcatgaattctcatttttaaattttttatagatttttaaatgtttgcattttttttggcttaccaaaacttcatcgaacctggttctttctattctctttcaaatcgccccaaattttttttacagccacgaggccgcgaagcggccgagtgagtaccttgggcgcaggaaaattattaaggaggagggttcattatttatttatttttgcaaaattaattcataaatttttttcagaaactgctctgaaacgcaccaaaatttatttacaagttgaataaggcactctgactcttatattatcaaaaagggagatgaataaatattttaaaaatttctaattcctttttaaacaggccgaaaaagtttaggcttaactttttcagcgggtttaaaaaatctagaaaaattagtaagcatttgtagtgctccgatacgtatctctgcaaaatttggtgagccgctgatcaattacaaattatttatggacgatcaaattttttgaaattttttaagtgcaaaagtggtgggtgtctgcaaaaaattttcaccgggtttaataaatctaggaaaattagtaagcatttgtagtgctccgatacgtatctctgcaaaatttggtgagccgctgatcaattacaaattatttatggacgatcaaattttttgaaatttttttaagtgcaaaagtggtgggtgtctgcaaaaaattttcaccgggtttaaaaaatctaggaaaattagtaagcatttgtagtgctccgatacgtatctctgcaaaatttggtgagccgctgatcaattacaaattatttatggacgatcaaattttttgaaatttttttaagtgcaaaagtggtgggtgtct

SEQ ID NO: 28079 - DNA, 1098 bp, Heterodera glycines
attttaaaaaatacacgaacttgtcgtttttaggtacaatagtgcataattaaacacattaacatgtatgcagaattaagcaatggaagatacaatttgaaaattattaagcaattgggaatgtcgtttttaggtagaaatatgcaaaattaagagaaataagttacaagaagatacaattttattatgtgcacgaacttgtcatttttaggtagaaaagtgtataattaaacacattaacatgtatgcagaattaagcaacggaagacacaatttgaaaattattaagcatttgggaacgtcatttttaggtagaaatatgcagaattaagagaaagaagacacaatttgtaaattattaaggaatagaagatacaattttaaaaaagtacacgaacctgtcatttttaggtagaaaagtgcataattaaacacattaacatgtatgcagaattaagcaacggaagacacaatttgaaaattattaaacaattgggaacgtcatttttaggtagaaaagtgcataattaagagaaagaagacacaatttgtaaattattaaggaatagaagatacaatttagcaaaaattaagaaaaataatgattaaatgaaggaattactcaaaaatgtgtaaaaattacacacatggggtgtgtgtgtatgcgtatgtatgcatgtgcgtgtgtatgcgtatgtatgcatgtgcgcgtgtgtgcgtgtctatgcgtgtgcgtatgtgtgtattgtatgttttttcgagggtgaggataaaatgtgtttgaaagttttgcataatatttattaacttatataaaacttgttaattttaatcataaacacaaacaatgctccttgcctaattcaacgtaaaataattctaattataataaggaacatttacaattccattgaataagtaatattcaaaggaaacaagagaaatagacaattttgaatctaagattgaaccgagaatagaaagtaggtttgacaaacagttgactgactgtatgtgacgagaaagggtagataagggctaaatgtatgcgcggactaggtcttgcaataggattaaatgattaaatcatatgatgat

SEQ ID NO: 28080 - DNA, 1580 bp, Heterodera glycines
acctccgtaaggactaacttatatttacgtagcaagtaattattgcaattcaacaattgtatttgttttaaccatttttgtatcatttttatgactttcaatcaaaacagcatatcaaatttatcaaaatgtgacatcaaaacagcatatcaaatttatcaaaatgtgacaagtctatgcatcaaattaaaactataaatttgggaaagcaaccgctaacttagcatgttttttagttatatatatttaatgaaaggcggataatgttgtggtgccaaagccggtgaatttatagaatcggtaagatttttttggtttagcaccacactaaagtgaaggcagagggattagaattttagaaatggggggggggggggaaagaaaagtcggacggttgggaacagcagcaattcacagatggacaatcatcgcccggagagactaatttttgtcagattaattaaaacggaacacccatccatcacaacgaatgatcgtcattcaattcattcgccagttttctaaattctttcagaagatttgaatgccggtgatttcgacgtccccgccaatttggagtccgtggaggtcgtgcggctccactcggtgtgcgtaagtgcagtagcgttcatcgttgatgaaaatctgaaactcggtcagtatgagaaagcattgccattgcgctggtcggtcacttggaaggcgtactcctcgttgatcactttcaggtcaaagccaatgcctttctccagtggaattttgccctcgcgttcttcgtttccccactcattggctataaataatcactttttggtaaatttaaagataaacatttctctgataaactgacctatcaaagaattccgtataattgcctaaaaataaaattatgttttattttaattgtttttggctttgccttttcgtcaaaacgggggttcaaatgcagggcaatgtccccgtttttcttcagctaaaatttaaaagtaaattcagttttaaattttccgcagaccaaatttatgtggaaacgtttgccctttttctcgggcgttccgaaaatcaacagagtttttccgggtgcaaaaccatcgccggtgattccgctctcataaggaacgggctgaaaaacgctgacgaaaataatcgcatttcattttccgataattacgtaatatttccctccccaatggatttgcgtgatgagaacatcgccgtcgatggaaaagtgtgtgacatgactgaacaaatggaggctgttgaggaaatgaatcatccgaattgcccaccttaacggaacgcgatgctcaaactccttcaattctttttggtccgcataaacagtgaatttgctgtcgtgggcacgaatctgaagggagtccaatgggtggatgagtcattcattcggtgccaccccggggcaactcactcggagatcgatgtcgtccccctttttatatggattgctcttgcgctcctccttgacccattcaccctttattaaacaaacaacacatgtttaattagcattaggttgcaaagatgattcaattacttttaattaccttcgaaaaagtgtt

SEQ ID NO: 28081 - DNA, 1064 bp, Heterodera glycines
attctggcgacgaatccatcgtttgggaaagttgccgatcaagtcgttcgtcgcttcttctccgaatttgtcggggtcaaacagcaaaagcctttcgactgatccgtcgcaatttggcggtgtatgccatggcttaagaaagtcatgaataacttatgacaaagtgttcggtcacttttaggcggggcattctctcaagacaaaccgcacgaacggcggagagcaaacggactctgtcgatgcatttgacagggacggagacgaagggaatttggatagacttgctaaagaaaaacaaagcgatgaagttcccttaaacagaatcagaaaactttcagtatgagtcagtttattgtcattagggattcctcaaaatcataattgggcaccgaaaatttgtcccaaacaacgcttattggcatcagcggaccatatccccttaaaacttttcacacggcgagtcaattttggtctcccagtgcaaataagtttattttttatttagtaatcagaacgccaaaacttttcaaaatttaaaatttttgtggaattttcccttgtaagaaacgcaagagccgatctcgagttaaaaacttaaagtttcataaaataaacttgcgatcgatagagggggtcaaaatatgggcctatgcaaaatttcaagaaaagttacccacagcaaaaaaaaattttcccagggcaaagttttttctttttctctcagtttgacgcactatttccatgtctctaacatataaaataacacatggttcattttttaccaataaacaatttttttaaacttttgactaattaagaaatattcttcagaattttcccttcaaaatgagcataaaatggttttatttggtctattattgaaaaagttataagctaaaaaaatttcataaaatcaagggtaaaataaaatgtctactgtttgtatttgttgttttggcgttctgtttttattattattttatttatttgctttaaaaaatgaaatttaataccccaacacaaagaaggatttgaacctgaaacccccttttttggtgactaac

SEQ ID NO: 28082 - DNA, 1026 bp, Heterodera glycines
ctcattttttattagcctaagttaataaagaaattgtttcatctttattattatatttaaaattataaaattgttgacaattaattaattggtcgccattttgactgaatgactgtttaaatcataaaaatttggttcatctgttggattaaatgtatttagaagtgattttatgaacataaatatttattaagtgctcaagtactaagattttgtcattaatgttaattaaaaattatattaacttataaatagtttactgctttttcctttttttaaatattatattttaaaaactattaattttaattaaatgattttcaaataaaaaaaataaaagcgttttcttaatttttaaaaaaactaaaaccaaatctgatcactttcatggcccaaagctaggtggtctttatttgatatcctgcatatgaactgcccattaaattataaataatttatggttagtattaaactcttattttaattttatctaatttaaattatctaattaattctcttggtgtcctcgtttttattaatttttatcacgttaaattgtttcggcctatgattggcatttaaattgcatagtttaaaataattcattttttaatttagaaagaaaagtatatttatagaaaaaattatagataattaaataagttctcattgatttaaacttttatattcaaaaatccaaaattattattttttgatttacattccacttcaattccccacaaatttagttttttgatttctcttcttatcagtccattttagagctgtttgaaatatcttcatgggtcaaaaaaatctcatatttttgggtgtatggtaatttttaaattttgatcaaaatcataaattcaaaaattttatgaacctgtaagcctttttgtattttcatttaatttcctcatttttttctttctttttgtttctcatattcatctgttatttagggcggttcgaacatatcaatattagcaagacaaataaattttggggttttgtgtatacggc

SEQ ID NO: 28083 - DNA, 1649 bp, Heterodera glycines
  unsure (1)..(1649): unsure at all n locations
tgtaggcttaacttttttagtgaaaattcgatcactcatattttttgctaattgagcagaagcgtaccaaactatgcagggatactccccggtaaaggactaacttacactgaaatgagcgccgagctagctggctcaaaaaaaattttcgaaaatctgagtctttcgtttttatttattttttgcaaaattaattcataaatattttttcagaaagggttctgaaacgcaccaaattttatttacaagttaataaggctctctgatgctttttctatcaataatggaggtgaataaaattttaaaaattttttaattgctttttaaatatgccaaaaaatttaggcttaactttttagtgaaagtttgatcactcatattttttgctaattgagcagaagcataccaaactttgcagggatactccccggtaaaggactaacttacactgaaatgagcgccgagctagcttgctctaaaaaatttttcgaaaatctgagtctttcgtttttatttattttttgcaaaattaattcttaaatattttttcagaaagggttctgaaacgcaccaaattttatttacatgttagtttaggcactctgatgctttttctatcaaaaagggagatgaataaaatttttaaaaatttttatttctttttaaacaggccaaaaagtttaggcttacttttttttcagaaactgatcagaagcgcaccaaactttgcagggatactgaaaggaagagaaataacctattttaaatattatctagtcagttcatttaaattatttttatccaaaaaattttttttttggatttcggggcagtccccctgaaccgatgcgcccagatttatggggagaccgaatccttcgggaatagcttcccgatagtctgtactttaattctgcgttggatttttgctccccataattgtttgagtaccccaaacggacacttgaaaaaatcgatttttttgttttcggggcagtccccccgaaccgatgcgcccagatttatggggagaccgaatccttccggaatagcttccctatagcctgtactttaattctgcgttggatttttgctccccataattgtttgagtaccccaaacggacacttgaaaaaatcgatttttttgttttcggggcagtccccccgaaccgatgcgcccagatttatggggagaccgaatccttccggaatagcttccctatagcctgtactttaattctgcgttggatttttgctccccataattgtttgagtaccccaaacggacacttgaaaaaatcgatttttttatttcataaatattttttcagaaaatgctctgaaacggaccaaattttatttacatgttagtttaggcactctgatgctttttctatcgaaaagggagatgaataaaatttttaaaaatttttaattcctttttaaacaggccaaaaagtttaggcttaacttttttttcagaaactgatcagaagcgccccaaactttgcagggatactgaaaggaaaagaattaacctgttttatcacattagcttgtcatcagtttttataaaaaattttcaaaattctgcgtctcctattattttatttttttttcaaaanttttgaagggcggggggggggg

SEQ ID NO: 28084 - DNA, 1841 bp, Heterodera glycines
  unsure (1)..(1841): unsure at all n locations
ttttaaatttatttaaatttccaatttttttggctttttgaaaaaatgttgtctatttttcggcaggcactgcctctgtcattgttttttatttatntagaaaaataaatttattttttttctttttgattattttaattgtatttcatcctgaaattttttaataaacattttcaaactttcaccttattaatttaaggcgaattttgccttttttaataaattctcttgtgaaaaggcaaaaaaaggctcttttaaatatgcctatttaaatgactttaattgctgtcctttcgcttacgaccataccacgttgaaagcacgccatcccgtccgatctggcaagttaagcaacgttgggccttcttagtacttggaacggagacgtcctgggaatcgaaggtgttgtaaactttttacttttttcacttttaaatttatttaaattttcaattttttttggcttttttgaaaaaatttttgtctattttttcggcaggcactgcctctgacaatgttttttatttatttagaaaaataaatttttttttttctttttgattattttaattgtatttcatcctgaaattttttaataaacattttcaaactttcaccttattaatttaaggcgaattttgccttttttaataaattctcttgtgaaaaggcaaaaaaataggctcttttaaatatgcctatttaaatgactttaattgctgtcctttcgcttacgaccataccacgttgaaattttgtttctttttgattattttaattttatttcatcctgaaattttttaataaacattttcaaactttcaccttattaatttaaggcgaattttgccttttttaataaattctcttgtgaaaaggcaaaaaaatacgctcttttaaatatgcctatttaaatgactttaatttttttcacttttaaatttatttaaattttcaattttttttggcttttttcaaaaaattttgtctattttttcggcaggcactgcctctgacaatgttttttatttatttagaaaaataaatttattttttttctttttaattattttaattgtatttcatcctgaaattttttaataaacattttcaaaactttcaccttattaatttaaggcgaattttgccttttttaataaattctcttgtgaaaaggcaaaaaaataggctcttttaaatatgcctatttaaatgactttaattgctgtcctttcgcttacgaccataccacgttgaaagcacgccatcccgtccgatctggcaagttaagcaacgttgggccttcttagtacttggaacggagacgtcctgggaatcgaaggtgttgtaagcttttttacttttttcacttttaaatttatttaaattttcaatttttttttggcttttttgaaaaaaattttttgtcttttttttcggcaggcactgcctctgacaatgttttttatttatttagaaaaataaatttattttttttctttttgattattttaattgtatttcatcctgaaattttttaataaacattttcaaaactttcaccttattaatttaaggcgaattttgccttttttaataaattctcttgtgaaaaggcaaaaaaataggctcttttaaatatgcctatttaaatgactttaattgctgtcctttcgcttacgaccataccacgttgaaagcacgccatcccgtccgatctgcaagttaagcaacgttgggccttcttagtacttggaacggagacgtcctgggaatcgaaggtgttgtaagcttttttacttttttcacttttaaatttatttaaattttcaatttttttt

SEQ ID NO: 28085 - DNA, 1497 bp, Heterodera glycines
  unsure (1)..(1497): unsure at all n locations
ggacttacaaaaaactgtattggactcataaagggtcattgggactcataaatatttgattggactcaaaagcataattcgatgctcatttttgaacgtagccgcattattcaaaaggcaaatccgtagattattttgtcggctggcacatttgttccttttctttcgtcggtttttcctatgtctcgttaaaaatggtcggctggatggcaaaaaagcttattctgcaataatatgctcagattgtaaaatataagaagtacaaatatgaataaaaataaaagtacaagcattgaatgggtaaaaaatattattgattggttttattgccttccaatactatttaaaaatattaaaaaataataatttaaaacaattaaattattaattaattaaattcatttattccgtactgaaatgagcttttaatgaattcatttcgttattaaataatttttaaatgttagttttagtgaaaaaaaataaatatttttcgaattaatcgatacaatgaaactcattaaatttaaaaaaaaaataatgagatttccaatagattattttaagtccttcaaaatattttttttcttttataattaagtttatactttaattattaattttgatcgtcatgataaaattaatatttaaaataaatatttatcatttaatgaaatagcttgctaagaaaaagaaaaatgttgataagataaaaagtattgccaagtatttactgacaggacaaagttgcgcaggacaactgccgcatttctttttatgacgcatgaaaagtaattattatttaatgaactaagaattaacgcttcgatgattggtaaacaatttaaaatttgcggtcgacaaaatccagcatttaatgaatccaatttctcgagttttagctaatgaagtgctttggcttagtcctttagattacatagtaattaattggtctcattaacggaaatatttatctcacgcaccgatggcgcaacatatttgagtcattaaaaaagattcacaatttatttagttcctctcgtcagttctcattgagttgcccttttatgttgcatagaaaacaactttttttaccttttgagcattttatgatcagattcactcttgatctgttgataaaagcattcttcatcgaatttaacacattttgcaatagttggcagcaaaattttttgaaatactaatttagttagagttttttacaggagtttcatcttatatttcgaaaaatacttttttaatgacaataatatttttgggattcgcagaatttttaggaaaaaatgggggaagaaaattgttttcccaagtgaatttattcaaacggccgttaattatgttttgtccattagtaaaaacatatttaatcatttagaggcacaaattttttaaaatgattaatttataatactttcacttaaaaaataaataattcanaaattaaaaaaaaatcaaaatttttcataaaaaaatatt

SEQ ID NO: 28086 - DNA, 588 bp, Heterodera glycines
caccagacaccctttcccccctttagggtttcactgcagtctaagcggcttccggcagtaaaagtgaatgaattgtcgagaatggctgaattactcgttgcgagagactcagagtgctgctactcctttttatttgttgattcatttcgctcgaataaattatttggcggttgtgtttggtccagatcgatttgtcgactttttactctcgattcgggttcctaaaacaccgatagattatacagagaacaatttgcacaagatttaaaaaaatacacattgttagaaaagatttttaatacgaaaatttaaagaaaaacagtttttgaaaaataattacttactcataaactttccaattctcaaaaaaaaggtaatttggtttgtggttcgtaaccgaatataactttcggcacaaaaattaaatttccttatggagaaatggccttttttgctttcgattgtaagctgacgaatttaaaaatctttttgctgcagcccgacccagccccgaagcgtaacgaaggaaactcgaacgtttcgacgaaacggacctgggggacaaatcagtgcaattttcacaccccc

SEQ ID NO: 28087 - DNA, 1154 bp, Heterodera glycines
ccaataacccccaaattacaatttcctactgtaaacttatacagattacatttggatataagaaattgaaatattgagaatatcacaaaagtgatcatgaaaattgtaaattggagattattgggacttatcagctcggtcctccgcaaacactgattcagtttatatttagaggataaggagttgaaatggtggaattccaaaaaggtgaccaagaaaattgtaatcgaagattattggcgattatcagctcggtcattccgcaaacactgattcagtttatatttcgcgaagaatgagctgtaattttgcgaattagacaaaaatgatcataaagtaacaaatgagagaatttcacattctgctaattaggctttaaatataagctgtttaagtgttgcagacggatcaggttgataagcgccaataacctcagatttactattttcgcgaccccactttttgaattctgacattttcagctcattacgctctaaatataaacagcatcagtgttccggaaggatcgatttgaaatcgccaataacccccaaattacaatttcctactgtaaacttatacagattacatttggatataagaaattgaaatattgagaatatcacaaaagtgatcatgaaaattgtaaattggagattattgggacttatcagctcggtcctccgcaaacactgattcagttcatatttagaggataaggagttgaaatggtggaattccaaaaaggtgaccaagaaaattgtaatcgaagattattggcgattatcagctcggtcattccgcaaacactgattcagtttatatttcgcgacgaatgagctgtaattttgcgaattagacaaaaatgatcataaagtaacaaatgatgtcgcgacaacgcgaaatcctaagataaaacccaaaataaaaaagaggaaaaataaaaaacaatagaaaataaaatggggaaaaataaaacataaataataaaaaatatttttacatttagtttggaaaaataatattataaaaaactatcgaaaatataattacataaaaatgaaaaaaccttttgaaatgaataacggaaaattgttgaaaaggaaaagtgcatttcctcaggaatgaaaggaacgaaaattaattaatattaa

SEQ ID NO: 28088 - DNA, 1422 bp, Heterodera glycines
ccttccttttccatccgttgtccgtcgctttacgtttatattcactcgtcccagtgaaaggtgttcgtcccgaactcccgtctcgccatatgctttattcgtcgtcaaatagcggtgaattgttttctcgcgtatcctttcgtcctccgtctccaaataatccgcttggtcagtgggctcaaaatacaccaatttcgttagcgttccgccgatgtcgatgccgaaccaaggcatggcttaatttggtcaagttatttcgaattgaatggacagcgaaattggcacccaatcttacgacagtcgaggaaagtggaaatggaaaaagcccttcggcggccctgttgaaagcggtcaaaaagtgactcaatgtcctccagagaaatcattacagaaaggaggaaaggtaagtgaatggaaaaagattattttgatatgcaatctgaaggtggaggatggaactgagtgacagacagattgaattgattcgttggaatgtttcgctcacatttttagttatgcgagaattttaaactttggattttaaatttggaaagttttgggtaatttttatgcattcgtccattttatgacggcaattaactaacaacattgttgttaattaagacataaaaacacttttttgggagtgggctgatcatttgcgatttgatgagaagacggctgagaaacgaatgaaatgaaaggaaatgtttgactgtggagccatcgcattgagaagaaatggacggaccatttgggaaacgaacagccaaacgaggaaaagacagaagcgaaacggatgaaattcacattttgaacttgtgaagaaatggaaagtggaaaaagggagagaagaacattacaaaaagaaaagtcggacggaaaagcgaaaggaatgcaattcacatgaacggactgataagagcaatctgaggaaggaaatccgaggataaagcgaaggaaaggtaatgggtccaagttttaaaaattacaaaacaacatttaatagggaattaacaagaaataattgagagtgaaattgctttaaacgacttacgcggaagtgaaattgacggaagtcgctttctgccgctggacgcatttgtttcttctgatgttgccgtagcacaatccatccgagaagaaattgagcaaaaataaaaaatagaaatatgcaaggaaaagtaattaattcaacaagagatcccacaaatggaaaaccaaaatcaaaaaggaaaaaagattgaaaaattaaaaacatttcgccaatattaattaaatttgaatgaatggtggtcagtgggttaaactgtaaaaagatataacgattttcatttttctacagtatatgttcaaaaaatacaaattcttttttgtgtatagatgaaagcattggctaaaaccataaaatgttgcccatta

SEQ ID NO: 28089 - DNA, 1375 bp, Heterodera glycines
ttgaatatcgaatttggtttctgaaaacaaatgctatcataatgaccaagaaaaatgtgaattatttgccaatttatttgtaaattcgtttaacaattctgaagttgatccaggctttctaagcttggacaacacttttgttaatcaaagctttatatcagatatagaatttaacatcattgagacccaaaaacttttaagaaaacttccgaataaaaatggaacttctccggataatattagctataaaacattgaaaaattgccatccttcattagcaactgttattactgaccttttcaggatttcattagactctggttctcttccagatatctggaaggaatcaattgtttttccccttttcaaaaaaggggataaatttaattctgaaaattataggcctatttctataacctgctcactttgcagggttatggaaagaattcttagccaaaatatttacaactttctcctaaaaaacaataaaatttcggaataccaatttggttttgttagaaataggtctacgacaagtcaactaataacagttgtggaagattggtacgaggcaattataaatggaaaaaatgttgactgtatttatattgattttcaaaaagcatttgactcagtgccccataatttactattatacaaattggaaaaaattggtataaagggcaaacttttgatgtggataaagggctttttgagtaataggacttttcgagttaaaataggggattctttatcctcaagtaaaaaagttacctctggcgtcccccagggctctgtcctgggccctttattatttttgatttatattaacgatcttcctgatgctttgccatcaggagtgaaaataaaattatatgctgatgatgttaaattgtatatatgctataaagcaagagcagatacagaaattatgcataaagcattgcataatttattcgaatgggcaaataaatggcaaataaaagtttcagttcaaaaaacttttgtattatatttgggttcaaaaaacccaaaagaaacatataaatttgatggaaatacaataaatgctgtggatacaattaggaatttaggagtaaacattgataataaattacaattttccgatcatgtaaacaaaataacaaggaatgcgtatttacgtatgcgttccttgtttcgaataattaaatccaaatcatctaagatttggattacgttatataaaacttatattaggccgttattggaatacgctccggaggtttggaatccgtctcttcaaaaaaatattaaaaaaatagaaaagtgtcaaaaatatttcaccaaacgggtattttttaaatgcagccttccaccaattccataccaaaat

SEQ ID NO: 28090 - DNA, 1284 bp, Heterodera glycines
  unsure (1)..(1284): unsure at all n locations
catcatcagatgagcagaagcgaatgctcacaaaagatttttaaaaaactcaaaattcgaccgccaaagtctggaaatacgcccctcctccctgggcccgtaccgtactaaaagaaggtggtcatggacaaaagaccacgaaaatggtggtaaaacccgttgaagaagaagccagttcgtggtcatttgacgatagttggtgttaaaaatggcatttcgtggtcattttttatattctaactggttcaccaccgacttcgtcgtcattgtgaccaggtcattaaccatggtcgtttgatcagcaggtcattaacggttttagtgcactttcggcgtccaatcttcatttttaggccatagctttttccttacttggtcaatgctttacattcttggtataaactgaaagcctaaagtcccgggaatttattaaaaaaagaaaatactaccattaagaaaaaataattacaatgagtaaacacgaaacgcagctttttcgagtatattcatgaataattttttgttttagcgccgatttaagtctacaaaaaattctatagactttaggcttttgtttgatacaaagaatgtaggcattgaccaagttggaaaaaagttatggccaaagaaactgaacattggacgtctaaaatgcattagggcctacgggccattggcatcaagaaaaaaaaagatttcgaacagttttggttcagcagcaggacattaacaaagacaaaattaaaatttccaaaaatcagaaagaagggcactaattaaatgagacgagtaattagttaattgttcgctcaaaccttttatcgtttcttaaaaaagtaaaaatcgagaacaaaaaaattcaaaattcatttttaaagtttgtcttgcctattattctattattcaattaaaattcaaaatttattttatccaaaattctacttccaaaaatcccttaattaggtaacttattggatgaatggggaagcaaagaattgtgatcccttaaattgggttgatcagattttggctcctttctttacactgtgaatgcctcgtaaatcggcttccccccccccggggaattcccaaaaaattttctgttgcccaaccctcggggcggggctgtgcttttcgtctcacaaatcagttctcccccaccattcgtcgtattgcaaaaagatttgcttcatcctttctttcgctgcttttgcttcttctcttgttgataaaaaatgtaggaagaagacaaataaatgggaacagantgtgtggcgacctgca

SEQ ID NO: 28091 - DNA, 1816 bp, Heterodera glycines
  unsure (1)..(1816): unsure at all n locations
atttccgttggttcaaatcttcaagtcgaattatgtagctggccgaagaagtggtggcatggagaaatgcctaaacacaatggaaatgaaaaacaaatgacggtaatactaccgatggtacccccccccattttttttggtagaaaaatttatttcttataaaaaaccgggaaaacatgattctgaggcgtattgtcgacgtgcgcatcacaaaagaataaagtttcctgtactagataagatatttctctctaactttttgtgctaaattaggaataccgagaacggcagattttgttcgcaaacaaaaaagaagttagtatttattcaagccttacgaaaggaacctcgtaatattggacagagaaaggcatgtagactaaatgaaaacaatattaattaagtcaaattaagggatacacaaggcaaagtgccaccaaatgtcttaaaataatttacaatttgcttcgtcgaaaagtacataaaaacaatttgtttttcgggtctttttattgtaaaatataatttccggacattttaactgattggcacattacgtcaaagtgtttcatggtgaaatttttgtactttaaattgttttcaacacaattagtaatttaaaaaataaatttaattttcttttctttttcattataaatgaagtcttacattttcacactcagaagacaaatattttttaaatactctgaataaactttttcaatttttttaattgtaaaattgccaagaaaatatttattctgctttgttatttcgtaattttttttaatgttttcaaattaattaagctaaatgttgtccgtcctttcttttgtgtgttattccatttatgaactcgtctccattttggtaataatttcaatttatgggtcagataatttatttttttataaatttaattgtttttttaaataaatgtaaggaaattgcccattttgtggtcaatgttgtgttctatcggttgcccatttttgctcccacttgcccatggttcggcacgtcgccctcggcactttacaccattggcacatttttggtgtattttttcgaatatctaatttatgtgcttcatattgccatcacccttaatcgttgctcgtgcgtttgggccccaatccggcacaaagaagtaaaacaaacacataaacaatttacaccattacattttctcagttttggtgccgtgcttgtgagccgacaattgcgtttgcttttgctctttctttggcattttctgcccaccgtttggtcactattgcccagttggtccaactcgacaaaacggacccgtccaagggctcaattccgctcattgtcacctaccaactttattttgtatgttcaaatttttgcgaattcatttgaaatttttgtggcacttcgtatcgctctttgattttcttgggattttcagaaattgaacctaacttttttttaatcaaaaacaggaaaatcgcgttttctaatattttattgtgaaaaaaataaaaataaatacaaagaaatagaatatgatacaaaaatttatttaatattttttgaagcctattatttaaaaaaaagagttcttgaatttttttttgtcctgtctgtgcacattattatttaaaaatattcactanattaaatattatcaaaatgcatagcatttggaaagtcgaaaaaataattttaaatttacattgtcaatataatgcaaattgattaatgattaaagtattatttcaatttaaaattttaaatttatctttaattattaaaattttgaagctattatccgattgattccaatttg

SEQ ID NO: 28092 - DNA, 866 bp, Heterodera glycines
ggaagatgaatatagggaacagaaagagcacaaaatttgctacaaaatgcaaaaaaccaccatgtccctatgacttctgtacgctgagaaattacttgttcaatttcgaagtgtaaaaaagtactgtaattcctaggaaaacagtgcaaaaaattcgtgccggaagacacgttcgtttgcgtaaaattcgtcgtatttcgcttcatttaggaacctttccctgactgttgtaagggtttccgccgttttgcagctgctgatcagtgatagcttctccagtggccaattcgcgagaccgaactgttccaggcccataatttggccccgaaatgatagccaatcgtttgttccattacctgttttacgaattttttcttaccgaaaatttgtagacttaataataatttattagtgaagcccaagagaattcaatggccaactcgaaaaaatggaaaagccaagaaaaaaaggccaaatgagttccaaaggtggcattgacaaatgagttgcaaaagtgcatgccaaacacacagaaaagccaattaaatgctcacattgcataaaaaaagggcgggggagggctaattaaacaaacagtacccgggggttattatggaaactgaaaagccaaaaagaaaaacaaaaataagaaaataaaatattaaaattagagttgtaagggaccgggaaattttgccaaaaaattgtgtcaattaaaaaaaactatgaggaatcaaattttgtcgataggtaaccaatgagtaaacaaaaaaaaatcaaaatattttaattcctgcagaggaattgaaccatggaaaagaagaagggaaagacaaggagactagccactaggccatccgcacaat

SEQ ID NO: 28093 - DNA, 1042 bp, Heterodera glycines
ttcctttccatggccaaccggacttggttggccagggtggccaatcacctggcttggactggccacattttggtccgcggaaatccctggaaaaaatatttatttgctttattatcaaataattagtttttttttgcctttgcttgggtttccaatgtgcacatccgtaacttcaatgttcttttcttggccaattgctttgattgcttggctttcctgtacaaatttgcttttcatgttttgccattctgtgtcgttgcccgcatggccatcagcagcagcggccaagtcgaacatggcacgggcaaagcccaaattgtagggacactcatcctcataattgatttccatttttgcaatatctttatcaggtaattaggaaaatttcatattaattagtttatgtcttacaatgatctgattatagtattgtaattactagtactgacttacgtgtcgatgtgagtcacacgttgtgctgattcgagcctggggtgtagcagtacacggttctctgttacccgatctcacacctccgcgtcattcacaaaaatgccattttccctttttaaatgttggcagtccttttaccccatccttccacgaatgcccccccccgttttatgaactttactcacccctcctttccattgctgcggtccgctgaacactgccacaggctgaacaaatgtcgccattggccagccgcactgctgtacactgcttctgctgctgcttttgatcagtcttcgcgcctgtgacggcgcccagcgaatggcaacagcgaatgttgctgctgctgctgccatttttgccaaaaaaaaatcagaaatagaatgaagacctgtagaaaaaaattgatatgacgccgcgggggggagaagggggaacaaaaaatgtgttggatgtgagtgggggggggggggaatttctcttccaaaaatatgtgaaaagagagtgagagagcaagacaaaaaaaaagagataacattaatgttgaaatagtggaaggtagagaaacagacagaataggaaagaagag

SEQ ID NO: 28094 - DNA, 1076 bp, Heterodera glycines
  unsure (1)..(1076): unsure at all n locations
gccaaattggcaattttgggccccggaaatgtctgtccaccaaaaggtcaaatcggtcggagagaagtgccaatttgagcccaagctgggcacggtcaacaaacggcagaatgtgcagccaaacgtcgtagcaaatcgttctgaaatatgcggggggaaatgataaaaaaataattcatccgaaaatttcaagtcgcttttcaaaaatttttcctttaaattttctctaaaattttttccgaagatttataaaatttaaaaaaaatcggggggggggggattttaaattattacttaaaaatcagggctggagcgcgaccgcgatgcgcgattcacggcgttttttgcgcgatccgcggtcgcggcaatttgaatgcgcggtgcgcggccgcggttttttttttttgcgcgatgcgcggcgtgccgcgcattttttggttgtaaaatttttataaagaaaatttttttaagcgattgtttttttgaatattcaaaatttaaataatttttttttgaaaattggattattttcataaaaaaagttcgtttcaaaatttcaatttttccccgtcagagctgacaaaacctttaatttttctttaaaaaaaattgactcgaaattacaaaataggtcattttttacaaaactttaaccaaatcgcactcaaattttcaaaaatttttcccggcggcgcctatcggcaccgccggatccagccccctcccatcagtccccaaaattttttagaaaaatcgcgccgaaaaaagctgtctgaaaaacaaaaaatcatagggtttccatgactggaactctttcgcaaatttgaacactgactcaccccctcccccattcagtcccttcccaaattttatatgcatcgggattttaattaattttttatataagaaaattttttaaaaaaagttttaaaaagtggtttaaaaattagaaaatttgagtttttaaatgcgcgatccgcggccgcggcaatttgaatgcgcgatgcgcggcgcgcggttttttttttgcgcgatgcgcggccgcggggccgccctttttttctgtgcgcncccca

SEQ ID NO: 28095 - DNA, 558 bp, Heterodera glycines
agactttgtgtttataaatcatcggatttacttcgttgatcctaatgacccaagagttcacactcaaggcattgaggcgacatggagagcactcaaaaatggattgcggcacttacacggaactaactctcacatgttacccacctatctttgtcagtatatgttccgtcggttccatggaaattcaaaaattttccaaaatattctggaagaaattcgataccaatatccactatgattgtggctttactttgtgtattggctattttaggctgacaatttgaaaaaaataaaaattggattcaaaacaaatcattggactaataaaaaaattattggactcataaattttcataggactcataaatatttaattggactcatatactctgattggactcataaaaatcagattggactcataaagtgcactagagccgaaaatcctttcccttttagtaaggctaatagagcatgttaagagctttcgaatgataccaaaattgttggatgccaaagaaaaaagcttaagtggaaaaacgtgctggcgccgaaacg

SEQ ID NO: 28096 - DNA, 1073 bp, Heterodera glycines
attcgggtgtatgccccgaataagccaactgacgcagacggaaatgtttttggtgaggaacattgttgccgacggaattcgatttgactgaacttaatgttcttgtgaaaaaaaggacgaatgattttaattttacgaaaggaggatgccaaacaatttaaaggattattttgaatgctattctgtaattatttaatgttttgtcccttatttttttttgttggccagcacgaaaagttaaccatgatctgagcgcctgtcgttaggtttgtttaatatttcgtgttatgccatattgtaaaatattcttttattaaatcattgattcactaaatttaattgtatctctctctctgtatttagtgatcttaatcatttaatctgtcatcataattgtaaacattttttgccatttctgaataaataacaaaaaaggggacccaaggtttttcgctgtttttgcctccatgcggcttcacgtggcgggtccctgtacgtctttcgcgcaccaacagcagcagctgctgctgtaggcaaagatgtcggagatgcggaacataaaacagccatacccaagaaacaaacggcggatagtcctagagacgcggcgcagccgcgtccctgagcgcgaagcgctttcccctcagcaccagaagccgactgtccaccctagttatatatacgttatataggttttgagtttcgtttcaaaaactaattccggccggccgaaggccggcctgggtctgaaagtagtggaagggtcttacaactttttgaggagaatccgggaaaactataggttttttgatccgagcgccaactgagtaccagggaccgatttctcacttttgtttgtatttcagggaccgtaactttttttctaaaactcgaatcaaaaagtgcccgctgtgagggcactccgcctaagggtcctctacaaggtggtattttttatttttttattagagccaccccctgacctgcaaaaaagggcaactgaagcgtgctcaaaaatgccacttcagttcaaggggaatgccgcgccagggtttgatctgagcggggggtgg

SEQ ID NO: 28097 - DNA, 835 bp, Heterodera glycines
aaaaattttcgaaaatctgagtctttcgtttttatttattttttgcaaaattaattcttaaatattttttcagaaagggttctgaaacgcaccaaattttatttacatgttagtttaggcactctgatgctttttctatcaaaaagggagatgaataaaatttttaaaaatttttaattcctttttaaacaggccaaaaagtttaggcttaacttttttttcagaaactgatcagaagcgcaccaaactttgcagggatactgaaaggaagagaaataacctattttaaatattatctagtcagttcatttaaataatttttatccaaaaaatttttttttgggttttcggggcagtccccctgaaccgatgcgcccagatttatggggagaccgaatccttcgggaatagcttccctatagtctgtactttaattctgcgttggatttttgctccccataaatgtttgagtaccccaaacggacacttgaaaaaatcgatttttttgttttcggggcagtccccccgaaccgatgcgcccagatttatggggagaccgaatccttcgggaatagcttccctatagcctgtactttaattctgcgttggatttttgctccccataaatgtttgagtaccccaaacggacacttgaaaaaatcgatttttttgttttcggggcagtccccccgaaccgatgcgcccagatttatggggagaccgaatccctcggaatagcttccctatagcctgtactttattctgcgttggatttttgctcccataattgtttgagtaccccaaacgacacttgaaaaaatcgatttttttgttt

SEQ ID NO: 28098 - DNA, 1133 bp, Heterodera glycines
tttttatttatttagaaaaataaatttattttttttctctttattattttaattgtatttcatcctgaaattttttaataaacattttcaaactttcaccttattaatttaagcgaattttgccttttttaataaattctcttgtgaaaaggcaaaaaaaggctcttttaaatatgcctatttaaatgactttaattgctgtcctttcgcttacgaccataccacgttgaaagcacgccatcccgtccgatctggcaagttaagcaacgttgggccttcttagtacttggaacggagacgtcctgggaatcgaaggtgttgtaagcttttttacttatttcacttttaaatttatttaaattttcaattttttttggcttttatcaaaaaattttgtctattttttcggcaggcactgcctctgacaatgttttttatttatttagaaaaataaatttattttttttctttttaattattttaattgtatttcatcctgaaattttttaataaacattttcaaactttcaccttattaatttaaggcgaattttgccttttttaataaattctcttgtgaaaaggcaaaaaaaggctcttttaaatatgcctatttaaatgactttaattgctgtcctttcgcttacgaccataccacgttgaaagcacgccatcccgtccgatctggcaagttaagcaacgttgggccttcttagtacttggaacggagacgtcctgggaatcgaaggtgttgtaagcttttttacttttttcacttttaaatttatttaaattttcaatttttttaggcttttttcaaaaaattttgtctattttttcggcaggcactgcctctgacaatgttttttatttatttagaaaaataaatttattttttttctttttattattttaaatgtatttcatcctgaaattttttaataaacattttcaaactttcaccttattaatttaaggcgaattttgccttttttaataaattctcttgtgaaaaggaaaaaaaataggctcttttaaatatgcctatttaaatgactttaattgctgtcctttcgcttacgaccataccacgttgaaagcacgccatcccgtccgatctggcagttaagcaa

SEQ ID NO: 28099 - DNA, 679 bp, Heterodera glycines
aaaaaaaaaatttttcttgtatttttcttacagaaaaattgcctaagacttttttcttgacaaatttttaggtttagaaatttttttaaaaaattttgggaggggaaatgtagtgcaccccccccccccccctaaaaaaggaacaagaagaggaaaggaaaagccaattccaaaattttgcgttttttcaaattttattgttaattccaaaaaaaaaaaaaatttcccggcggtgtcttcagcaccgcaacggtttgccaagaattgcagaaaatgtttttttttcgttttctgtctgacatcataaggccaaggagcaaacaatgaaattaaagaaaatcgcccaaatttttcagaatttttcctctttttacctactacatccacctcttttacaccggcccccctacgacaaggggggggggggggtaagtgtaggcaccaaaaagtttatatatatttcattacatgccaaacaaaatgacccatcctcggtcaatcccccttttttttgatttggcatttttcaacacggtattataatgactgatttgttttttctgtatagatgatgagtttttccgaccgcacgattcgggcatcagcacaacaacgacgggggaggcggacgatgatgggacggaggagcgggagcagtacatggacaaaaacaacggat

SEQ ID NO: 28100 - DNA, 1386 bp, Heterodera glycines
  unsure (1)..(1386): unsure at all n locations
tgcacttccatcatgctcatcatcatcgtcttccaattcgccgttgtcgtgtaaatttcgactgaaattaaacaaaaatttaattttattttagttttgaaataattatctaaattatattatgaattgttttgtttgaaacttccgagtcaattttgcccggatcaggacagcccagattcatacaaatcactaaactcagtgaccatttaccaacctaattaattaattggtttttcaaaattcaataaaaatataccgagagcgcacaatcagctctatttcgcccaaattgctcgcctgaatcacccgttccacttcttcaaacgtttttccgctcaacaaaacgccgttccattcgagaatcttttcaaggtaaacattttcaaaataattttggcaaaaaattttgaaccaataaaaaataagtattaaaatatactttatctaattatttaattttaatttttacttgatctccttctcttaattcacccaacatttcttgagctttgctgctaaaaattggaaattaaaatattatttaaattaacaaagcaaaagtaattaaataattgattaaataaattatttataatttacttaatgtttatttgatttacctgtcaatctttgttataaaagcacctaaacagcgtaaaatcattcaaaaaccttaaattatttcgaagaattgccaaaacgtcgccggaagattttttggacaataattttgttcattttcaaccaaattaagcattctttcttggtgttgttaaaaaagttattgtccaaaaattcgtctggcgacgttttgccttctccgatttcacttacccaaatcgccgtttgatagctaaattagaacacaaaaaatataaatttaaaattgcattgtttttgcttaccttttttcctccaacaattcgaatgcccaaatctgaaatcacaaattaattagaccaattaattaattgattgatttttgaatacctttaaaaatgttttcatgtttgtagtgccgagttagcagaattcgtttcgtttcggctgatgttcgattgcgcgaccaattctctgtcgatggcattaaccgcggagtctaaagaaaagcgatacgcaaagaatttttataaaataaataaaaattgcgaaaaattttattatttctcataaaataatttttcctttttaagattctcattcaccttaatgtttgaagaagaatgcgctcttctgttggtgttgttcatctcctcataagtcaatgaattgtctgaattcattttgagtaattaattaatgaattaattaattcttccaatttttaattaaattaaaataaatatttaattgaaatgcccanaaaatggcggtagcacctct

SEQ ID NO: 28101 - DNA, 777 bp, Heterodera glycines
tcaatcgggtacttcagcgtcagaataccacgcttggactgcgcctcgtctcccacgtacgagtccttctgtcccatgccgaccatgacgccctgatgacgggggcggcccacaatggacggaaacaccgcgcggggcgcgtcatcgcccgcgaaaccggcctgaattcttgcaattagactatgggattaaatagtgccacaaattagaattttttatgtcaatttgcaaatggcattttgccctccttgttttctttcctgtctctccctcactcatcttttcccttctctctctctttcatcttttcctcttacctctccctcccccacccttttccccttttcacacactctctttctctctctctctctctcgttcgctctttctttctctctccctctcttctctccctccctcactctctctctttcgccctttctttctctctctatctctcttctctccctccctcactctctccctcccccacccttttccccttttcacacactctctttctctctctctctcttctctttcgctctttctttctctctccctctcttctctccctccctcactctctctctttcgccctttctttctctctctatctctcttctctccctccctcactctcaccctcccgctcccttttcccctccctctcttctctccctccctcactctctccctcccgctcccttttcccctccctctctcttttcacactcactctctccactctctttaaccctctttctctcccctccc

SEQ ID NO: 28102 - DNA, 1007 bp, Heterodera glycines
aatttcaatttgcggatcctgttgcaggattggaatccaaaattttttacaggaccggatccggccggattaatcctgcaaatcctgcaatcctgcaaatcctgcatttaaaatttgccggatcctgcgcaggattgcggatttttggaaattttgaaaaaatttcaattaaatttaaaaaatttccaaaacgataaataagtgttccgatatatttttagacaaaaactggtgaaaattaatatgaaaaattgacatcaggaatagaatgaacaagcgcgtcctcatacctaatccatatgtatattataaaaacaaagtttctgtatatttgtcattctgtcttagaaatttttttaaaaaatcaataaaatcccgcataatcctgcacaaacattcaaatttgcggatcctgttgcaggattggaattcaaaaatgtttgcaggaccggatctggccggattaatcctgcaaatcctgcaaatcctgttttttccaaaaaatgcaggattgcggactgggatcctgcaaaatcctgtgcaggatccggtcctgcgccgggctctaaataaaacctaaaatttatacgatttgaagtttagagatttttaaaattatctttcccattttaatacctccaatttattaacatgtacttttatatttgcggtttttcttcataaaatacattcttatcacagataattatcattattcctcatttaattgattcatttcttccgctgatcacagtttttgttgttcttttgtccctcactcatcattgtcagaattcattcacttgggtcggaagtgccatcgataagactaaaaattgaaaatggaaatttgcaattaaattgtattctcaatttactgacccgtctccgatttcttcctcattaatagcaatttgaattgtgttccaagggtccttaaaattcaactcaatcgcttccttctcctcaataggtcccatttgttctcatcccgcgaaatcggacaa

SEQ ID NO: 28103 - DNA, 984 bp, Heterodera glycines
  unsure (1)..(984): unsure at all n locations
aaaaagtgtgaaaaattttggaaaaaaaattcctttaacttttaaaaaaaaacccattttttgctttcctatcctttttaagggtaggattggcctctttaaccaacataaaacggttaatgagtttccggcacacggccacgaggaggcctgcgattggtaatggtaccttagtgcgccttttgtttttttgaaaaataaaaagcgaaattaccgaaataaaaataatttttgatccgaaagaaaaaaaacgaagggtgtaatcgcagcactgaagcaaagaaaatttaaataaaaagaaccaaaccaaagggcacaataaacctccaaagaggtgctcccagtggcttaaaaggaaaacagcaattattgatccatattaaaattgtgtgccaacccacgcaaatattcaatgtttgtacgttgctcattccccccttgaacaatctccaaaattcgctcatctattttgattcaaaggaagcgaaaaatggttttttttaagtttaaggaattttttttcgaaatttttcgacgctttttgtcccgacgatgttttgtctcgacgacgttttgtctcgacgacgttttgtcccgacgacgtttcggcgacgacgttttgtcctgctccggagcggaaacgagggtattttcaaattcgagaatggcaccgaatgagtgaaatcaaaaaagagattgaatttgttggaacaccatcacactttgttcatggcgtccaacaacaccagcgggttcatgtggccatccgccggccgttgggccattcgtttcgcatttttggcctcagtctcagcctcacgctcccgcaacaattcggcccacccgcacggcgatttccatccgcgcgcgaccatttcagtgcgaaggccgaccaaagtgagcgccacgtccgcctgcacagcgacggcactttgccaaaacacgtcatggttctgtgngaaagcaaagcatcagaattttgaa

SEQ ID NO: 28104 - DNA, 1057 bp, Heterodera glycines
cgaaattaatggcaagattcggattcacccggcccttaaaacccttaatacgatcttttctcgacaaaaaatttcaaaattttgattttttgaaaaagggggactaccatcggtactattaccgaaaaatgcataaaaataagaacattgcagggtctttttgtgatggtgtagggtcagttccgtattgctaacataagcaattatataatttatacaaaaaagttgcatcatgaatttatatcgcaaaaaaaaaaaaactcgaaaattttgcatattttaatgaaatttaatatttttttttaattaataaactaattaaagagtggcaaaacaataccttgtaataacaaacaataataataaaacaaaaacaggagaacaataataaaaagcgatatgaaccgggacttgatgaaaaattaaattcgctttttggatgacttttagaccttggattattccgtagtaacaatggaaattggacaaaatctcggtttcagtgtctatttcaaggcatttctttttgaaaaaacggcttccgggtcctagaaaaatccaaaatgccaatgaaataaatcccagtccatccgccggtctcgaattgtcaccaagaaaatggattactcttcccaatcgccttccaatttgtgcctgattctgagcccgtgcagcgccaccaaagcggccaccttcaaaaattctcggatcacaaatattcattcagagaaatttcgtatgaagtgtacttgttccgccattttgacgttcggttgtgtcactgatgagcaaaacttttggccgttcacacaaacagtgccggaaaaccggtggtcaaggccaagttttcgctaaaaaaaaacaaaaattattaaaataaaattgttggtccaaatctccaaatggcatctcctcactgtctgaaaaagtggcacgtccaactgttgctgagtgcaatgccttttgagcacacattttggtgtctgtttgccgttgacaccgcactttaggcttcgtctaaattttttttaaaaacccggttaaaaatttgtctaat

SEQ ID NO: 28105 - DNA, 1080 bp, Heterodera glycines
agtagagaccggacaactggggtcggagggatcccgagtcgggatcccgactgaatcccgatcccgatcaatcccgaacattttgaaaaaacgatcgggacggatcccgggtcgggatcccgaccgaatcccgatcaatcccgaagatttttttcgggatcccgcgggattatcgggatttgctcaaacccatttttttttacttaatatcaatttttgtattttcgcctcagatgatcatttttcataattttgagaaacggaatcaaaaaatcagagtccgatcttcactttctttggccattttagggcgtttgtttgatgcaaagaatgttggcattgaccaagtaagaaaaaagtacaaagttatggccaagaaactgaagattgtaattataaaagtcggttggacttataaaaagcaatagaaccaaattatctttcatacattcaatatcgaaatttatagagttcattttaaaattcaaatcttccaaccaattcctcatcaaaatgctttctcgcttctcctacgatccgttctatcgccgttcgttgttgcctatgaccactgttggcaacggacgacaccagggatgttgatcgtttcgtgtttttagggtgtttcgtgttcgtatttcgtattttggcacgaaacatgaaatttttaagcactggtaaggatgggtgaggggtgagagaaaatattttttgaaaattggagaaggaaaatttatttgaaaaaaaataatttgttcagttcttttacaccataaaaagaaataaatatatagccgggtggctaaacctcctgtctttctttgatttttgccttagttcgaaccccacacataattgaattttttcattgttccttttaaatatttgttgaagtaagtaaatgtaagatatttttaatttaattactagggagtgtaattatatggatataaaattgcgaagtatggccataaaatatcgaccaaaaatcgcgaaatatggacatataatggcaaaaatatggacataaattttccgaattgagcgctaaattttcaaaaatttctcaaattcattaaa

SEQ ID NO: 28106 - DNA, 2238 bp, Heterodera glycines
tcatacatacattttcagattcctataaatgtactcattttatagcgaattgacaacttccagtactaagggtatcctcatgggcatattcccatgagggtattatctttaaaaattttagtatttctacatgtatgactcaaagtgcgttaaaatacgcttttattgcagtttagatgactttaagcttttttcgtgtattttaatctgattcgacccaaaaacacggaattcgaaaatttaatttctcgactttttgttcgaatttagttcaggggtatggaattggtcgaaaactaatgccgcattttatgatcagcgacctcgaaaagcccttgagttcaagttccattaagtcggctcggatatattaaattttttatttcctttaatttagattttgtgaaaggcattctgtcccccaccccactccggtacagtaagaaggtgccctcctcccccgttgttgccttaagggataaaacatagggatggcgggaaaatccaattccggtttgattttgggtgggcttgcccccttaaaaccccaaaaatggaaaaaccatccccccaggaaaacaaatttttaaaaaattaatttttttttttttaaaggggcttttaatagaatttttttaaaaaaaaatttcccccctttcgaaagttttttgcttttaatttttttttttttttggccccaaaaatttttgaaaaaaatttttaaaaaaattttttgcccctctttaaaaaaaattaaaaaaaaggggggtttttctttttaaaaaaaaaaaaaaaagggggggccccccgagggccgttaaaaatttttttaaaaaaaaaaccccccccacaaaaaaattttttataaaaattttttttaaaaaaaaaaaaaaccccccccccccaacacaaaccctttttttggggggggaaaaaaaaaaaaattttttgggggggttttaaatattcttctccctccccccaaaaaaaaaaaaaaaaatatttttttttttttttttttttttttttttttttttttttgtgtggggggaaagaaaaaaaaaaaatttttttttttctccccccccacacaaaaaaaaaaaaaaaaaactcccccccatttttttttttttttccacaaaataaagaggggggggggggggacacaaaaaaaaaaaaaaaattatcttctccccttttcctccccccacccaaaaaaaaaaaaaaaacctttctttcgcccaaaaatttttttttcttccataaaaaaatattggggggggttgtgggaacccacaagaaaaaaaaaaaatttttttcccattttttgttctaaccccccggaaaaaaaaaaaaaaaccctttttttgcgaaaaaaattttttttgaaccccctaaaaaaaaggggggaggttggggaacacccccataaaaaaaaaaaattttttccccatttttgggtaaaatcccccgaggaaaaaagaaaataccattttttcggcaaaaaatttttttcgttaggcattttcaatttcggggtgagtgtttgggagagccagactagagaaggcaaaatttgggaccaaagtttgcggtcaaatccccaagagaaaaaagagatagccattttttgggcaagaatttttttcgttagcatttcaaatatcgtgtgagtgtttggtagagccagactagagaaggcaaatgttggtaccaagtttgcggtcaaatccccaagagaaaaaagagatagccattttttcggcaagaatttttttcgttagcatttcaaatatcgtgtgagtgtttggtagagccagactagagaaggaaaatgttggtaccaagtttgcggtcaaatccccaagagaaaaaagagatagccattttttcggcaagaatttttttcgttagcatttcaaatatcgtgtgagtgtttggtagagccagactagagaaggaaaatgttggtaccaagtttgcggtcaaatccccaagagaaaaaagagatagccattttttcggcaagaatttttttcgttagcatttcaaatatcgtgtgagtgtttggtagagccagactagagaaggcaaatgttggtaccaagtttgcggtcaaatccccaagagaaaaaagagatagccattttttcggcaagaatttttttcgtttgcatttcaaatatcgtgtgagtgtaaaggagagccagactagagaaggcaaatgttggtaccaag

SEQ ID NO: 28107 - DNA, 797 bp, Heterodera glycines
  unsure (1)..(797): unsure at all n locations
aagaggctctccggaacggattagcatcnggggttacgagatagaaaattgtcctaaaaagagatagccatttttctgagaattaattcacaatttctgcagctcttagggtaatggaaaaaattttgaagaggctctccggaacggattagcatcggggttacgagatagaaaattgtcctaaaaagagatagccatttttctgagaattaattcacaatttccgcagctcttagggtaatggaaaaaattttgaagaggctctccggaacggattagcatcggggttacgagatagaaaattgtcctaaaaagagatagccatttttctgagaattaattcacaatttccgcagctcttacggtaatggaaaaaattttgaagaggctctccggaacggattagcatcggggttacgagatagaaaattgtcctaaaaagagataaccatttttctgagaattaattcacaatttccgcagctcttagggtaatggaaaaaattttgaagaggctctccggaacggattagcatcggggttacgagaaagaaaattgtcctaaaaagagatagccatttttctgagaattaattcacaatttctgcagctcttagggtaatggaaaaaattttgaagaggctctccggaacggattagcatcggggttacgagatagaaaattgtcctaaaaagagatagccatttttctgagaattattcacaatttctgcagctcttangggtatggaaaaaatttttgagaggctctccggaaacggatagcatcggggtta

SEQ ID NO: 28108 - DNA, 885 bp, Heterodera glycines
cttcgttttacaattttaaatctcataagtccatcgtaatctcttaattgttcatcggaccagaccacacggcacggcaaattgtaaagaatcgggtgaattaccggcatatttggccactctttttaagaaatgaatacgccttggtaaattttgaaaaaagtataagagtcaagcagcagaaatccaagttagagaaagacaatgtgcgaaaaagagatagtcagttagacagcaggggagagagagagacaggaggagagagaaaaagagagaaaatgagagagaattagagagagagaaggaggaggagacagggagagagagagagagagggagacggggtgagaaagagagacacggggaagggggaaagagaaagagagagagatagggagagagagagaggagacagggagagagagagagaggagacagggagagagagagagggaaacgggtgagaaagagagacacggggaagggggaaagagaaagagagggagagagagatagggagagagagagagggatacggggtgagaaagagagacacggggaagggggaaagagaaagagagggagagagagatagggagagagagagaggagacagggagagagaggagacagggagagagagcagacagggagagagagagagtgacggaccaactcttccgtcgtcgtcccttttcgcatctcatccccagtgttcttccattcattccgtcacctccttcctcatcatcttccctccatcccctcaccgctaattcttcctcccctatttgtccgtttgtccgtttcactttattggtaaaggaaatgggccaaaggggggggggggggcaattcatttcccttggggtggggattaatcgg

SEQ ID NO: 28109 - DNA, 1121 bp, Heterodera glycines
atttatttattctgttgaactgtggaaatgcagctgatgcggtcggaaaagctccgattttttggggaagttttttcttcagttttcaccactgatgttgaggcaattttttcgccaatttcttttgtctacaaacattatttattgcgtttcatcctgtagtgtgtaaaaaattttcagtaaaaaaaacttgttatctgaatatttacaagcaaaatttaagaccatttccaaagaggaaggaacaaaaatttttgcctaaattttatattatattgttgaattgtttgaaatgcatctgttgtctgccgttttgaaatttttcaacttttcgcgaaaagatttcccagaaaatgcatgggacaaataaaaattaaacttctattatgatcaatttaaatttcctatcagtttcgggtttgctttaaacacgctggccgatgaaaaaatggagttttatggatgtcaaattttgggacttttcttcgacgtggccatcagcgggttgtttcgtgacaaaaacaaaccagtttgatgttattcgaatgagctagacgcgctctacattttcaaatgtatcaacaaagggtctaccgccactccctggcgagatatggcctgtcaaagcagaacggggccaataaatttgaatttttgttaatcttcggcagttgcctttatttcgagcctactctacttgtgcatcttttcccaatatggcactgcttccgaattattgaactgtttcacgactgattgttgagataatttttttttccgattcctttatctccaagcatgagccttataagtgattgttcatatccttctcttgaaaaaaattgtcactaaaaaaaacacgttttctgaatattaacaacaaaaatttttagacagtttctaaagaggaagaaaaaaaatttttcatttgcctaatatttatttatactgttgaactgttggaaatgcagctgatgccgtcggaaaagctccgattttttggggaagtttttttctttcagtttcaccactgattgttgaggcaattttttcgccaatttcttttgtctacaaacattatttattgcgtttcatcctgtagtgtgtaaaaaattttcagt

SEQ ID NO: 28110 - DNA, 589 bp, Heterodera glycines
atcggtggggtaaacgcgccgtttcgacacatcaatgacacctaaaaaggacaacaaggaattttggcattttatcgtaaacagtgcaatcttctgacctttttccactcgaacgacgacaacgcattcgctcctccccactttgatcaatttgttgacagaacgaattcgacgccgggaaagttccgaaagttggagcattccttctgaaaaagcaaacatttgacaaaacgtaaataaaaataacattttgcatcttttgtacctttattgtcgtactccgaaagtgtcacatatgcgccgacctcctcgattttatcaattttaaccattacggggtcgtcaatttccgggaattcgtccgcataaaaacggcacgaaagagtagccattataagtgttttaaaaggaagttattcaaataacataaaaaggataaaaaggcaattatgtagaattgtggtcccgaaaaaaatatgaacttagattcataaaaaataatccgcagccaagcggattcgaaccccagaatttgtaaaattattcatgaaatttttatggccttatgtcattacctaatttaatattt

SEQ ID NO: 28111 - DNA, 1446 bp, Heterodera glycines
  unsure (1)..(1446): unsure at all n locations
actatttcgtttcaaattgaatcattttttttggctttttgaaataaatntgtgaaaaatatacgaaaattattttagcttttaattatgcagtacaatgcttttaagccccgccgtgaggcgggacagttacaaaattttgtaccacattttactgtggaaagtccaagtaccttattggacaactacgtgtcaatgagcacagtcgcctttggccagttgtggaacggaaaaatgggaatatcagatggggtgcgctcttttctaaaaattcctcttttcgtctaaccatccctcccttttgtgcactatttcgtttcaaaattgaataattttttttggctttttgaaataaattgtgaaaaatatacgaaaattattttagcttttaattatgcagtacaatgcttttaagccccgccgtgaggcgggacagttccaaaattttgtaccacattttactgtgnaaagtccaagtaccctaattggacaactacgtgtcaatgagcacagtcgcctttggccagttgtggaaacgaaaaaatgggaatattaaaggggggggctctttttctaaaaatccctcttttcggcttaaccatcccctcccttttgggcccaattttcgtttaaaattgaaaacatttttttttgctttttttaaaaaaaattgggaaaaaaataacaaaaaatttttttcgggtttaaattttgcgggaaaaaggtttttaaagcccccccccggcggggggccccccctttttgggcctattttttattttttaaaaaagtggtcccgggattttttttgttttttttaaaaaaaaattgggaaaaaaaaaaaaaaaaaaaaattttttttttttttttttttttcttttttaaaaatgtttttttttacccccccccccgggggggggggggaaaagatcccccaaaattttttttttcccctttttttttttttgggggggaaagaaaccaaacacacctcttttttttttttaaaaaaccctcttcttttttttaaaaagaaaaacacccccccccccccttctttttttttgctttagggggggggggaaaaaaaaaaaaaaaaaaaaaaaaaaaaaaaaaaaaaaaaaaaaaaaaaaaaggggggggggggggggggggggggcgccaaaaaaaaaaaaaaaaaaaaaatttttttctttctcgggggggggggggggaaaaaaaaannnnntaaatttcccccccccccctccccccgggcggggcggggggttttttttttttttttttttttcttctcctccaaagggggggggggggggggggggggggggggggcgcccaaaannnnnaaaaaaaaaattttttttttttttttttttttttttttttctccccccccccccccccccccccccaaaaaaaaaaaaaaaaagaaaaaaaaaaaaa

SEQ ID NO: 28112 - DNA, 1040 bp, Heterodera glycines
tgaagaaaaaaattgctaaactcattaaaaacaacaactccgttcgagttgctgtgaggtttgtacaaaagacatgtccataattttttttttaattttaaaaaattaggatcagaccgcaaagtggcaaagaaaaagaagagcccatttgcctgagcgtaattcctggcgaaccacaacttactattgggcgcgataaatcttttacatacggttctaagcttaaaagttttatttgtaaaagttggctgattttttagatttcgtcttcgaccaactgactccgcaaaagaccgtttacgacaaatgtgtgagggaactcgttgatggtgccttcgaaggatacaatgccacagtttttgcatatggacaggtttttgtttaatttgaacaaagttcaaaaaagtttgtcggccgttcacagactggcagcggtaaaacatttacatgggcactagcttggagggcgacccggctaaaagaggcatcataccaaatgcggcacaacaaatctacgatgaaattgaggaaaggcgtgaacaggcccgcagatctggcaaagtgatcccctcttttgaggtttccgctcagtttattgaggttcgttggtggttgtgacaaacaaaaagtattgccccaaaaatcacgatttggcatttggaatctattgcattttaggcgtcataccaaactaaattctaggctaaatgcaacaagcagaaaattatgaccaactaagaaaaagagttgatcaatgacgcttactgtggtcattgattgggcatctgaaagtcgagtcgatgtgcgcctaaagagtacaatagagccaaaaaaaaattctcagaaaattgagtcaaagttactcatttctctagaaaaaagcagcgatatttaaggcagtgagagaggtagaaaaccaatttccattttttttttttgttctatcaatttaagcccgaaatttactttttaccattattgcccattttttaactcatgaagatattctggcatttgccaaccttcttgatgtatccaaa

SEQ ID NO: 28113 - DNA, 856 bp, Heterodera glycines
ccccccgttcagtttccaatgcccacaattggccccgctgtcgttggcatttgccgtccccagtgaccatgaccaatccgtgtgcggaccgggcgcatttcccaccaatttgcagccaatcttcagcgccgaaacgggccaaattgttgcctacgaggagcggtggacgaacatggaggaccagcagcaaagccagcactccatgtccatacggaggtccaaactccaatttatccatcgttcctccatccgaaaattcaaatttttcgatttttaaaaaattagggggagggtgaggttaaatttttccacttcaaattgcgaggcgctgaatttgatgctattttgaagcattttaattttgatctattccaggagatttttttgaatttttttcactaaatcctaataaaatgcaccaaaattggaaaaactgtgccaaactttcttaaaaacatagtattagagggtctaattttttaaatagtttttatagaatacatagcaaattttcctctattttgcataaggaacaatcttaggttgtattttaaaaaaattgtattggcatttttccaaaatttcatccatttttagggcgcccgacccccgcgcgttcagccaattgctgggtaattccgctaatgtgccttttctgccggccggctttgacgacgtggagctggaggagttgttgcgcttttcgaacaccgccggcacaattacggcgaccagcgctgccggtgaactgcccgaaaaggacggcgatgcggaaacggcaaaggcggaggaagagcgctttttaaattttgaaggtgcctttttcatcgtttaaaacaaaaaaaataatttagga

SEQ ID NO: 28114 - DNA, 1220 bp, Heterodera glycines
gacggaagaggaggcggagccccggcgccgaatggacgaccccttttgcgcgctcgactcgtcgcccaactgctgctgctggactcccttctggtcagcgccggcgccaaccttctccgccgtggggctgagcagtgcgcgtgaaatgcccgagatcagtttcgtcgcctgcggtgctccgctgccgacggcgatcagttggggcgacgacggcgcacgacagcgacgtgccactgccgctgaacttgttgcttttgttgttgttgttgccgctgctgtcagttcggtagtcgccgatggcgacggtgccgacggggcgggcgaacaacacaatccgctggcgacaggcacccctttgtgctgctgctgccgttgttgttgttgctgataaagttggtggttgtactgatgatgggtgttgctgctgctctgtcgatgatggacgacggcaccgccgccgaacagcgcagcggcgatcagatgactcccgcggcgatgttgcgcttgttggagccgagcggagtttggctgactgatgctgctggtggtggtgatggtgctgttctgttgttcttcttccgctctgtcccgttttactttaaaagaaaaggggcacaattagaagagatcagcaaagagaatagcgaggccaaacaatgtaggtcaatataaaaccaattttaggggggggggaggaggtaaagccggaggagcaaaactccaatttatatgaaatcggatttaggctaatttagaaagagacatggaaaaaaggggaaagaaacattttccgattgtaaattgggggggggggttaagccgattttggaaaaaaatggaggacaacagcagcagcagaagagcaccactcaattcattcactcactgtgtttattaagagcacactcattacaattataatttaaaaggaaggagggatgaacggaggacggacatcgaactgagagaatgggggggggatcaaaagagggggggggggattattttcgcttttaattatgatgtacaatgcttttaagccccgccgtgaggcggctcctttttgtgcactattttcgtttttaaaattggatccggatgttatggcttttttaaataaattgtgaaaaatgcaaaacaaaaaacttttattgcgctacaaatgcttttaagccccgccgtgaggtgggacaggtccaaaatttgcaccacgttttact

SEQ ID NO: 28115 - DNA, 1641 bp, Heterodera glycines
  unsure (1)..(1641): unsure at all n locations
cccccccccccccccccatccccgaaatgccctcaggtgaatgggcgcccgccccgccgttttcgccgtttattatttatggcatattcagtcacttttcccctccaaaaacggcgacccggtcttccgaatgttttttgttccccgatacagtattttcctactttttttcaaatttcaatttcattttcgctgctcagctgctgatcccttcattttgtttcggttttgttttacttttatagtaaaatgagccaacaaaatcagcttccccaaaatgtgccgcttttccgtccgccgccgccttttcccccgggcgtcgtttcttcgcacttttcgtttggcgctgccaattcgaacatttgcgacggtcagccgcagcgaccgtcgcacacctctcggcgaatatcatcgccaccagcaacactttgggaatgaccagcaatgtcggtggtgttgaacatgattttccgagtgtttggccaaatttggcaccaaacaatgtttttggaatggaatttccgccgaatctatcccaattaaatctgagattgggtcatcatcattcaatcccattaattattgttaagcacaaaatgaagaaaatgccgaggaggaggatgagccggaacagaaacatcagcagaaggacagccaacaaaatggagcgaaaaatgggaatttaattgcataattaagctgaaatgattttaaatttatttctcttaatctacaggtcagaagatgcactccgccgccgccttcaaccagctgatgtgttgcccggccgctgcggcgatgagttttttgcccgcggcgctccaatcgtcggccaccattgcctcgggcaatgcctgtgagttttttttatataaaaatattaattttttgtctattgcaattagcggcatcattacgctaatgagttgggggtttaggcaccgctttcgaccccatcatgtccacctttggcggtcttcaccacccgcaccgatcgcagcagtccgtcgtcccctcgtcggcacaattcgtaaaatttgtttgtttttttaaaattttatactcttaattaaacaaacagagtgattcccccatttaattaacattgttttttgcctcttcataataattccttttccgttcattcattgctttgcgctgagaaaagtgtgccaaaaacaattaaatttgctcgcgattcgctccccttttgtattctctccccccctctccacaagtgccgccgcccgctccccactcactcactgttcttccccgccgcttttccgtcctcaaaatccccacgagaagcctcaagttcccccggggcacccccttcccctcggctcactcaatttttccgtttttgcctcagggtggtccgtccgtccgcgcccgtcgccccaagggttgtggctgcttttgctcccctctctcccttcttttctgcttcttctcttctgggtggcccacccttttgccccccccccccggngggagntggagtgagtggcctttcttttcttctccccccccattccattatcacacgaagcggaaaaaagcctgtctctgttcttctttttcgcacccgtttttcatgcccaaccccatttgttttctttcttttttctccttttt

SEQ ID NO: 28116 - DNA, 1158 bp, Heterodera glycines
  unsure (1)..(1158): unsure at all n locations
aaaataaagcccccctttttgagggggggggggggggggaggggggggggtcgaaaaataaagcccccggggtcttaggaaatacggtgtttagcctgtttattgtataaatatttcaatctgaattgaactatttccattgcgcccataaatttaatttatttaaaatgtttttattaaaatgtttttgttcaaatcccattttaaatttaaaaaaggaataaatgtcgactttttgctcttatataattaggtggttcgagaacaaaaatgagcctatgacgcaattaacatggtcgtgccaagaggagctttacagctttgctgtcgtctttaaatagaaataaaataataaacaagccgtaataattctcacacattgaaaaacaaaaataaaaacaaaatgtgaacagacatttccgaagcaattgaaattaaagaaaaccgaataattattaattactttaaaaagaatacttaaaatatttatttttaaaattttcttcaaaatactaaaaatctttaaaatatttatgatttaatgagttcgagtttcgacttttaaataagtccattcaagccaaaatttaaataaaaaaataataattttgccagcgaattaattaattttcgcaccttcacattcaaacacgcaagggtagaaacataatattgtgtacaataatgacgcacatttcaaactttgcaccctatgggcgctgatgacgatggcatttgaccgccgccatcaccattaatcatcaccaaatgcatcgccttgggcaacacaaagggcgtgccgcctctctcggtcggcacaatgcgttttaatgggtgccaccctcattgtttttgaagcttttgcgcaagtacaaatgccggacaaattatgaggatgctaagatttgttaattgagtcggtggatgtttcggtgccgaactctgaaaataaatctttttttttcttagtgagccaaatcccataaattcgttatcatccgatccgaaagttctgcgtgtttggaagctttggttaagctattttgaagattgtgaagggctttcaaataataagaactttaatagattgatttatgacgtcccanaattctcggagccgaatttttttttacctataaatttccatggaatttttat

SEQ ID NO: 28117 - DNA, 1003 bp, Heterodera glycines
agtaaaattttaaaaaatatatttttccctgaaacattcgtatgaaaatttagtttttttaaattttcggtgggaaacgactgagaggggaggggattgaagtgcattcgccactcacacttttccgtactcctcgcgagggatgtaccggcaggcggtgaatcggtcggccaacgcaaccaattccagctgaaatctcataatggattaacgaaaaattgtagtttttccaagttttcaaatcccaaagaatccaaaaatacccattttcatcgaaatttttgtctcggtgttacaaaaactcggagctttctcatccaccgcttacatcgttgcagtctaacggactcaaaagagtggcgagcattttggcgtgggcggtcacccgattcttgagccgttgccgctcgttgaacacattgtcacagaccatggcatactcacgcaacgacagcacaaaacagcgccgaatgccggacaaacattggagatggacgtaggcaaagtccgattgggggtccaactaaattttaaaaaatggaaatataggacaatgtatattgaaatgggcaaaaattaaaatttttaaatcagaattacctcaagtgagcacgaggggacggggccgacggacgattgggccgcgcttctgcaaaacattcggcaaatccaatcgcaaattagaaaaattcgttaaaaaatataaatttttggaataggaaaaagcaactaacttgaaaatgtgcatcaaactcttcgtggccagccgacagaacacttcgccgtccggccccaaattttcgcgtgccctcagccggtcaaaaaactgacggcacagtttcacttttgcgtagccgaccgcgcggaggaagaggcggacagcatcaaccgtctttcggtcggtggcaacagaattgctcactgaacttggccaacacggtgatacccgaggcgaagtgctaaaagtgggaaaaatgacaatttagaaactctcaaaaacttt

SEQ ID NO: 28118 - DNA, 1058 bp, Heterodera glycines
  unsure (1)..(1058): unsure at all n locations
ttatcgttaaaatgtaattttcatatattttcttgattatttcaaagctttttttaaatttattatatttacttttataaaaaatttttaaagcaaattactgagttaagtttttcctgtgccaattagattaccatttcgtgaaatgccgattttattttccttggaatagccaaaatttgtgggccatcggagtcagcgaaagaattggcactaccatatacatcaatggcattctcttaaataaatttcctttttgttagcttttcagtggtttcataggaaatgaattttccttattttttttctcttttgatgcaacaaaaacactgattgaaaaaactttttttttttgtaaattatggagaaaatttaaatgaattgctcaaattttattctttaataataaatagggttgctacccgacccctagtggggggggggggctaaatgtcagggtcgggtcggagaataggccaaaaaatgtcgagggtcgggggctcggggttcggggaggcatccnttataataataggtagtcatttttattgtttttataaagatttttttatagggactaacgtattccatcagcttcagataacggaaacgaatggaaaaacattgccaatgtaaaaagaatgattattacgacagaaaattgcattttatttaatttattttaataataatatttcttttaaggggataaattatggacagaaattatgccgttattttctaaataataattaatgcaataatttttacaataaatcaattcgaatcaaatcactgcacattttctttataatgtttccaacaatacagaaggataataaaaagattaaaataaatttgctttttttttattatatagtaataatttagaaattattttatgtcaaataatttacaattaatcaagttttgatttgggcaaatcacttagttaggacagagacgcgttattattttatgggttttttggctaattgaaaaaaaaagaatttttatcaaggaaccgcctgtgaatttttgggttttcctgtgatttg

SEQ ID NO: 28119 - DNA, 2261 bp, Heterodera glycines
aaatttgacaataagaattttcaaaatttaggagttttgtacctaaaaaataaatgcgctaaaaaagatgaaataactcaaaaagtaatttaaacagcagcaattaaaaaaagtttttcgtacaggcccaaggagttaagagaaaaaagtaatagaaaacaaatacatttttttccaatggcataatttaggccaaacaatttataataactaaagaaaatatttaccaaaaaaacccaaaaagaaaaaaagactaaaaatccaaaacagaatgaattatgggaactcgcttctcattctctccctttctcttctctcctcgttaatgtttgggcttcttcccgcaacatgcccacacgtaatttttgccgcaacaattgctgagcgcgtagccttccgactttacacatttggccccatttttgccattcccaaaaaaggaagtgaagtggcctcgtcgtcgtccgccattccctcccctaattcccttccaaaattatttttaccgcatttactcctttcaatccatttgcccttggcattttgccgatgtttttgcccagtttggttgccggggccaatcccccagggcattccgccggggttttcttccgccctcccctttccggaaaaagggaaaaaaaacagcccaaaagaaaagggaaaaaaagcgccaaaaaaaaacccccttttgggagggcaaaagaggaatttttttgggtttttgacaaaaaaaaaaaaaaaaccaggggggtggggtggtttttctttttttggggggaaaaaagatttttttcccctcttttttgctttatttttttaagggcaaaaaaagggggggggacaaaaaagggggcccccttaaaaaggggaatattttccccccccccccccccccttttaaaccccccccctttataaggggggggaaacaacattagggggggaggagatttttcccccccgagaggggggggcttcgcgcccctccttgtttgtggggtggccacaaaacaaaaaaaaaaaaaaaaccccccccaaaaaaaaaagggggggggggggggggcggggggtgtttttccccccccccctcccttttatttttttattaggggaaaaaaaaaaaaaaaatttttttttttttttttttaaaaaaaaaaattttttttttttttttttttttttttttttttttttttttaaaaaaaattttttttttttctttttaccaaaaaaatttttttatttttttttttttaaacccttaaaaaaatttccctctttttaatttaaaaaaattttttcctttatttttttcctttttaggccttttttaaaaaattgtaaaactttctttaattattaatttttaatttaggctttttcagttttataatattttataatttcaaagcttgataattaccatttgaatttttggtaatgtttaaattacacaatcttaagttagaatatagcatatatatatttatgaaatcaatgttttttctatagcaattttaatctttatttttttaaatgattacactgtttccggtacatgtttctttaagttgtttggacatttttcgtgaaaaatgaataaattttatgatttaattataatttttaaattaatacaatttttagccagaggctgcagagttcggcggtgtaaattttttttgaattttattacattgttattaatttagggttgagcgataatcggtaattgtaaaaaaccggtaattttcgggttgaaaaaccagtactttttggtcattagtgtgtgcaaacaaagcttaaacaaaaattttaaattcgaaaattgtaattttcgactttttgttcgagatcgagtctgtgattcggaattttcgatcatttttacatcgattctgaccgtttttaagcatttttgagtttggggactatgatcaatatttaccaaaattttgattggacacataaaacccgaattggactcataatctgcaatagaatcaaaaatagttaaatcgttaaaacctaaaaatccgggccctagaaattacaaaaaattacatatatagaaaaaaaattactacataattgaagaaaatgttgatgtgagcagcaaaataggaaatgaagtggaaaataagggaggatgaaggactcagcggatggagagaagcgatgccaaatggtgtgctgtgagggtaataatgccaatggtgggatgggggcgcgtcgttttgtgcgtcgttttgctaaca

SEQ ID NO: 28120 - DNA, 1007 bp, Heterodera glycines
  unsure (1)..(1007): unsure at all n locations
tttttttgagattacacagataaaacnncctctgctgatcgctgtgatcagtttcgcactaaaaaatcctctgccgatcagtcgcgccatcgccgtccgcccgcaacagccgcttataaaaatgtgtgtgccgaaatgtaccataattattaaacgattttgagataaaatgcacatttcttgagaagactaaaaaaacgaaaaatgggagtaaattggtaaaaaattgaactaattagccaggtaagctttgtagttgtcgagactcaaagacaccaaataagagaaaccgagcagaaccaacactgagataaacacaagtttcttttctcgtgtcgagactctcgacataaaaatatatgttttttttgattttcttaagacatgaaataattgatttccaaatcaatttttagaaagcacacaaatcattgttcaatttaatgctgatttgtgggtggaatataaattattaataaaataaagcgcctgaggggttttttaaattagtgagacatttgttcattctttccactgtgaacatttatgatttagctatataacatatgtgagggaaaaatgctgcccatattttatttttttgatcaaaaatagagcaaaaacacacaaatgaaaatgaatcatgggaagcgcatgaccgaaaattttttttacccatcattaaaaattctaattataaatggtgattggcggtatacatcacagcgacagattgggacaatggagaaaacccacacactcaaattcatggggctgttaaatgtgattaatgtgcgtgcaaaattctgcaaccgcgcgctaattatgcaattaattatataatacacgttatatgtgtgagaaagttcacggcccaaggccgtccgtcgaccattttcccgtttcccgcaaaggcaaaaatattttttgtaattttatgtgcgtttcgttgtatgtacaagcgcaaaaagatcaatcaaaaatgggaaagaaaaattatttttgga

SEQ ID NO: 28121 - DNA, 1365 bp, Heterodera glycines
  unsure (1)..(1365): unsure at all n locations
agattaggtacaaacatttgaatgtttgcctcctctctctaacagatattaatggggacgggacanaattcgccgcaaaaaaagttataacttactaagagaaaattgaaaaaaatatttttaagggggagggggggggggacaccaaatattaattgcaaaatttaaaaattttatagagtaacaaacagtaaaccctgctaaatcggcacgtatcgatggggagtcgagaaaattatgggcatttttgttttattcaattttaaccaaaatttttatgtttatcccatgcggtgccaactgtcggatcccatttttgtaaatatttttccatattatgtccaaaaatggttatttatgtgaatttaagcaattttatttatacccacccaacccactcacctctcatttcgtttttgccgattgacttcatgcagaatcgtcttcagacaatccaaatccaacaaatcggacacaactaaattttttgcaataaattaattaagcaacaaaaaagggctccgacctcctttccgctcaaccagctgcacaacgcgtgccatcactgtttggcattgtgcccgaccaaaactgttcaactgatccacgagataagtgagcgcctgctcactcaaataaagggaacgggcagcgaaaaatttcttgatctgaaagaacaaataatgatggtgatgaacggtttgcacagtttgaaaagagaggaacaactgggcgccagctcggttttttcgggaaataccccattttcacagttgtactaatggacaccaatttgtgtatcattcgattgccttgagttctttattagccagtacaaatttgaaaaattctgtcaaattttcagtcaaaaattttttttttaggaaattcaggtccctgttttgtaattttgcatgacaacagaggaacttaagcgctctcagaacgatgtccacaaattggatggatatgtaaaacaattttggagctgaaatgagccgttgttgccgaatgattgtgagtataattccgctcaattcaaactcaccaatcgacgcaattccaacacattttggtttgctgtcgccgctgctgctgctgttgttgttgaactcatttgttgctttctataagattgacatacaatatatacatataacggaaattaatccgagataaactggtaaaaagaaaaccaactaagtaatttttgcaaaaaaatcaccaaaatgacgagaaaatccaaaatatttttttgaagatcgtcaccaaatggaaaaatgatgaaatgaaaaaaaataacaacataaaggagaggaataagcggataaattccacacaaatatgtcctaattttggacctgc

SEQ ID NO: 28122 - DNA, 1801 bp, Heterodera glycines
  unsure (1)..(1801): unsure at all n locations
ataattatttnttgaataaaaatatatttaatgatttttaaatcaaaataaatttttatgctaaatttatatttaaataaataagatgtgtagagatggtgtcacgaaattaaaagtaaactttaatataatttgttctttttttatcttatgtttattttattggttcttttttcaaaattacaatattttttactttattggtaagggcatgaaaaattataatttttatttcaaataaatttcaaattaacaaaaaaaaatttcatgacatcactatatgtaaaatttagtgctacaaatataaatttctcatggcgaatatcgattgtaatgcttcatgtattgatttatttattctttattattaattcaattataaattatttgtatttcattttggtcaaattttgtatcattctctcatagcattatttttcttgaacatgagtgtttcttataattttaaggcctaataaagaaatatttgattttttggaaaaaatattcttcgtaaagggtgagaaaaatttaattttcacaagaaatttcggtaaaactgttatatccgcaacattcaagtttccatatcttgtgataattacattgacctactttctcccggcccagtcccattataaacttgtctgtctgttcatctcatcccaagccaatcctccccctcatttccaaagttatcgtgccattgctatccctttcctttaataaatctctctctaaaaacagtaatttaaaatggctttaagccttaaatccggggacataacaacgggtccttttttcaaagcatggactcgtccaataatgagcagcagcttcaggaaattgaggccttggaggtgtagctgtgtgtattataatttgataactttgtttaaaccagttaaacattatttagattactacctatattaaagggcgaaccgtcaccgacaattacttggagtaaagatggggaaattttggtggagacaaatagggtgactatcaacaataaaacccaggtgagttcatcaggcattgattttagtacaacaagcagcagaacggttggaacttctgtcccaattagccatcaaacagcggagagtgctaaagggcggccatggcagtaaagtaaggggaagaggaggggataaacgtgggaaagggtaattgatccattaattcatccaagcattgatttcaaactaacctaattatgacacaaacagtgcaaaggattctgctcatttctgatagcaacaaaaagaactcgggtgcgaatgtcgcgcagagaattgtgccgttggacccccaggaggacattgcagaaaaagcgttctgtcgccactcacacttcgtgcatgtcctgctgaactttcatccgttcggacaatttggtaattgctggataattaactaatggttgctaattaattgcccatttgtattagcttctgacgggcagcggcgattcaatttgtgcaatggtcggcttttgttgcggtccaaatcaaataaaattatttcggcattcagtaggacgtggagagcggtcaaatgatccaaaatttccatggccatcttggcgacgtttttgccattgacatccccaagttggacaccggcaacattttcatttcaggcgtaagaatgtggcttttgttttttgccagtgccttacaaaactcaaaggatgctgatcggcatgccctcgtctgggacattcgaaccggacagtgcagtgcagaacttcgaggggcatgagacggacattaacacaattcgctaccacccc

SEQ ID NO: 28123 - DNA, 1283 bp, Heterodera glycines
ttttctctgccccctctcgtcgtcgcgctttctctttgtgctgtctctccttctttcgctaccctctccactctcttcacaaacttattacctgaaaaagccgttcgaaggcagatttaaaacgccgggtgaaaaagaaaaagaaaatgaatggatatgccatttggacagctatgacctgagcgagttggacctggagcggacttgcgatgaaaacgacaaggaaatgggacagattttttgttacggaaaaattcttgaggtatgcctccgcgagacgtaatagagagggcgggggagaggggtcggcccatactttatttgttaggggggcgggggggggggggttgcaaaataagcaaatcagcatgaaaatgaccattttgtggcacttaagcgttcaatcgaagactatccaaattttcttagtacatgactttttgggtattactgatcaccgattcagcacccatcccgatcaaattcggacccctagtccgaattcaaacagtcaaaaactttgggacacaaattcaaaaaaatgggtttttaaccggttttctgcggaatgtgcttgaaaaaagctgaaccagcgacgcattggcgtgcagtggctttcacaaagtgaaaaatgtcggctcctcctccattctttttttgattcctttttttgttttaagttgaatatgagtagtgcaacatttaatcaagctgttcgccctcttttatcgttattggtagttgttaaaaattaccatgttatgtattcatttttagaacgtacgaaacatagttgaaattttgcaggaaaatagcttggtataagaagggtttctgcatgcaaaattttaaagatattctgcgttttttatttgtgtattgatttcaatgtaatatgctcgttttatacgatgtatgtatgtattggtttcgcataaagtgcaattgcctaatcgcttcaaataataaactttacggcggtgtcttctatttggctatcgaatgataccaagaatatttaatttgggtaattctagaaaaagtcatgattagggtttgtaattatatggaaatccatattttttcctggactgggggaggcctgaaacgcatgaaaaacttgtttttaacttggtttgaagcctataggaagggagttctatatccctattttccataatttttccatatttcgcgatttatgtccatatttttccatattttgggcatttaaggccatattttatggtcattattttggattttttcccaaaaaacctcta

SEQ ID NO: 28124 - DNA, 975 bp, Heterodera glycines
tattaaataattttacaccaaaatcatacaataactggcgccgctgcccgtcaaaatcccgccgcgtcataatcttttttatgactttttaattgatttctaaattttaaaaagttgcgggttttgaatcggttttttgtattaaatgtgaatttggatgaaaaatattttcgactctttgttctaatttgggcccgtataagaaatgggtcgaaacgaatgccggattcgtgatcactgatcaacggcccgaaaacgcaacttttatggagaattgagaaggtcaaatggtgccgaacagggcaaactgagaagctaaagtactgtacttttgtcttactgacagtatgaccggtccattttaagttaaaattcaaaaagtgccacattgttgcactttccttttgctcaactggcagagttagggcccatagaatgagcaaattgggtgactgacgttacaagtgcatttcaagccaaattccttggccaaaaaatggcacggcatacctctttccatttgatgacacgtgacagcaaaagtttgtgcagcagccgacaggacgagagcgcattcggtgtggcattttcggcagggatgagaggcacaatttcgtacagaagttcgagcggaaggcatttggtggccattgttgggagatgcagggggcagttttgttatttggggtaattagtgagcaaattagctgattagcattgaacgaaaccgtcgcactggcactttgaatttggtttggcccgtttcgtcccgacagcagcagcagaaggaatggccgtttttcttttctctcctctccgtttgcttttctctctttcccgttgtctgacttttcctttttgctctatcgctctctcccctctctctctcttcctttattcctctcttcactctctctctttttatttttctctatgccttgcgagttcgtccttaacaatgaatgattcggtcgc

SEQ ID NO: 28125 - DNA, 826 bp, Heterodera glycines
ttttggaattaaatggggaaaaatatacgaaaattattttggttttaaataacgctgtccaatgcttttaaaccccccggtgaggcgggacagttcaaaaatttggtaccccattttactgtggaaagtccaagtcccttatgggacaactacgtgtcaatgagcacagtcccttttgtccagttgtggaacggaaaaatggaaatatcagatggggtgcgctcttttctaaaaattcctcttttcgtctaaccatccctcccttttgtgcactatttcgtttcaaaattgaatcattttttttggctttttgaaataaattgtgaaaaatatacgaaaattattttcggttttaattatgctgtacaatgcttttaagccccgccgtgcggcggctccccttttgtgcactattttagtttttaaaattggttccggactttttggctttttgaaataaattgtgaaaaatatacgaaaattattttagcttttaattatgcagtacaatgcttttaagccccgccgtgaggcgggacagttccaaaattttgtaccacattttactgtggaaagtccaagtaccttattggacaactacgtgtcaatgagcacagtcgcctttggccagttgtggaacggaaaaatgggaatatcagatgggggcgctcttttctaaaaattcctcttttcgtctaaccatccctcccttttgtgcactatttcgtttcaaaattgaatcattttttttggctttttgaaataaattgtgaaaaatatacgaaaattattttcggttttaattatgctgtacaatgcttttaag

SEQ ID NO: 28126 - DNA, 516 bp, Heterodera glycines
gtctcaacatcgttcaaaaagctataacttttttctttgttggccaaacttcacaatcatggtatcattcgaaagccctagatgtttagaagatatttataagctatttctcagtgattaatcagctctcaaaaaagttgtcagttgaaaaccgcaaaaaaggcagaattttcgaagttttttatttctatctttttttatagttcgaaattttctgtaatttttagtaggctaatagagcctgtgaagagctttcgaatgatatcaagattgtttgattcggtcaataacttcaagagttatattgactcaaagttggctcagacggagttggccagacggaattggcccgttccgtagacaaaatctgctaacaaatagcattaaaattcaaagaaattttcccgacggcgtctaccggcgccgccggacccccgcccccccatgttcccaaaaagttttccgaaaaaagcgcgtcgcaaaaaaagcgttttttttaatgccaaaaaattcgtc

SEQ ID NO: 28127 - DNA, 1042 bp, Heterodera glycines
  unsure (1)..(1042): unsure at all n locations
taatgccgtgtcggctaccgcgtttcttctctagtaattattttntggcgttcaacaagcattatttattaatatttttaatatgttggacatgaggatttgagttcatctataaattattttaaaccttttctttctacagaattttcgcatatacgactacattatttgcattcatgcagattaatgccgcgtcggctaccccgtttcttctctagtaattatttttggccttcaacaagcattatttatgaatatttttaatatgttggacatgaggatttgagttcatctataaattattttaaaccttttctttctacagaattttcgcatatacgactacattatttgcattcatgcagattaatgccgcgtcggctaccccgtttcttctctagtaattatttttggccttcaacaagcattatttatgaatatttttaatatgttggacatgaggatttgagttcatctataaattatttttaaaccttttctttccacagaattttcgcatatacgactacattatttgcattcatattattgtcaactttaaacaaaagcaattgataaatattttcgttattaaggcgagtggttttgggttatttcaaaaatttttaaaaattgcagattaatgccgtgtcggctaccgcgtttcttctctagtaattatttttggcgttcaacaagcattatttattaatatttttaatatgttggacatgaggatttgagttcatctataaattatttttaaaccttttctttctacagaattttcgcatatacgactacattatttgcattcatattattgtcaatattaaacaaaagcaattgataaatattttcgttattaagacgagtggttttgggctatttcaaaattttttaataattgcagattaatgccgcgtcggctaccccgtttcttctctagtaattatttttggcgttcaacaagcattatttatgaatatttttaatatgttggacatgaggatttgagttcatctataaattatttttaaac

SEQ ID NO: 28128 - DNA, 850 bp, Heterodera glycines
cttattacttggaacggagacgtcctgggaatcgaaggtgttgtaagcttttttacttatttcacttttaaatttatttaaattttcaattttttttggcttttttcaaaaaattttgtctattttttcggcaggcactgcctctgacaatgttttttatttatttagaaaaataaatttattttttttctttttattattttaaatgtatttcatcctgaaattttttaataaacattttcaaactttcaccttattaatttaaggcgaattttgccttttttaatgaattctcttgtgaaaaggcaaaaaaaggctcttttaaatatgcctatttaaatgactttaattggtgtcctttcgcttacgaccataccacgttgaaagcacgccatcccgtccgatctggcaagttaagcaacgttgggccttcttattacttggaacggagacgtcctgggaatcgaaggtgttgtaagcttttttacttatttcacttttaaatttatttaaattttcaattttttttggcttttttcaaaaaattttgtctattttttcggcaggcactgcctctgacaatgttttttatttatttagaaaaataaatttattttttttctttttattattttaaatgtatttcatcctgaaattttttaataaacattttcaaactttcaccttattaatttaaggcgaattttgccttttttaataaattctcttgtgaaaaggcaaaaaaggctcttttaaatatgcctatttaaatgactttaattgctgtcctttcgcttacgaccataccacgttgaaagcacgccatcccgtccgatctggcaagttaagc

SEQ ID NO: 28129 - DNA, 1387 bp, Heterodera glycines
  unsure (1)..(1387): unsure at all n locations
accattttaaacagttgcattatttaataataatattataaattatataagtaaaaaattgatttgggataatcttacttatgttcattcaacattttaaataaatgcatcataatttataataatatataaattatataaagtaaaaaatagattggtataattctactgatgatcaatcaccattttaatattagctttattatttaatattatttatttaattatatgaagtaataaataatcctacttaggataaattactattttaaatatatcattattatttaataataataatattatacaaattcaattaagtaaaaatagatttagataagcctatttatgataatttactattttaattagaattattattaaagatttgttatcttactctgatgatcactatttcaagtcatcaaatttttcttcctttataagtctatgtgattttatgattactttacttcatttgacaatttcttttttctttaaaaagaattcgttattttaaatatatatttatcttctattctaattatattaatattagttaatttcttaataaaaaaaatttgtttaaacttttatgtaattaaatgaaaccaaaaattaatggattttaatttccatttgaataattttatttaagaaaacgtaatgctctattctttttttataatttattttcttctaattattcatcgttttctaatccacatttcaaatgcaattcaatttgtgagttaattaatcagggtaattaatttgtttaataatttttaattagggagacgacaaaatgctaatagcgtttgtgagcaatggtcagaaaacgcaaatcagtgagtattcaaagcaaaaatatgagacacaccttggcattgtgtattatatgagaaagaattggcactgtgacaaaactaggagagatttgatgaatatgaacgaaaagaatgtcaaaaatatcgtaaattgttggactttatttacgaatatttgttcagagaatacgtcggaattccaacagtgaagccaaaatttgtatttaaaaacaaaattgaaattgaaggaccaataatttatgcgataaattgcttggcgaaaattttgaaattttattttaactcttatttgtataattataattataaattaaacaaactttatcattttgaaccaaaaatgttgaacgtggagaaagttaattatgaatcaaaattgtcaattaatgaaatgattttgcaattggcaattgacacagcaaatgaatagcaaacaaatgaaagtttatacgaaattattctacaaaattgtggaaataaatttgaaaaatatttnggaggaaatgttcaaaaaagcagaagaaagagcaaaaaaa

SEQ ID NO: 28130 - DNA, 1805 bp, Heterodera glycines
aaaatgaattttgcatgataattaatcagtcactcatcccaaatagcagaggggattaaggaactttcccattcggtgacaatggaatttatttacaaaaacgaatagttggacgtaaaaacatacaaagatgatgtagagctcaaaaaggcgatttattttgagaaaaaaattaattaaattattctttttttattttgaaggttaccagcgaaaaatttagatgaatgattaaaagctgatggatgatgataaacaattgaagaatgatcaagagagggaagattttgaaaaacatagcaaatttgggcattatttatgaatattttttaaattttcttgacgagaatttttgattttaaaaattatgtacaattaacaaagaaattaccatttaagttcattggaaacccaataaaatcagaaataaattaaagatttcacaggaaaaatgcaaaaaagcgaaacacataactttaagaatagttttcactgacaaaagaatgagattattacaaaaaaatcttgaaatgcaatcattgaagctagaatttgataaaaattttgcattttccaaggtttaaatccattttttttggtaaagtccatgttttatgtccattttggtttgtatttttagtccatattaactctaataatgagaaaagtcttcgttgaactgatgagtggttctaactgattgacacttttaaattctcatttattcatttcattttaaacggatatttaaaaatcacataaaatgccaaaaaaagcataaaataaaccaaaaaagtcctgaaaataagcaaaatgtaattaaacccaaaagccgttttgggattcttcggagaacgtaataaaattttatggacgattttcctgtgaaatctttaatttattttgtgctaaaagcttcaaaaaaggtcaaaatatgtgccaaaaattgctcaaaaaataagtgattttatcaaaaaagtcatttgtatagctactgcatgcattggattcgatcctgggaccccccttttgtgacaaactcacagaccactgagacgaaaaatccaactaattttcgcttggagccagaaattgacccgttaatgaggcaaaattcacatattaattcattcactcattaactgtaataatttggataattggttttttcagtttagttcatttctttttcatttttgttattaccaattcataaaaatgtctgacaatccgaaggaagcggagagagaaatggaaaaagcgatgtgatattctaaatttgaatgtccatggctaatcattttgcttttccgttttaagtttcatcgctgccgactgttggcttgaggtgttcggtttgcttccacgctcacagcttggccttggcattgcgctgattagtcaccgatttgactattacgtcgacgaacacttcaaaatctgcaaatggacatttgacaaattgaaaattcgaagcaaaatcggagagaatggcgcaaaggaaatggaaattgtcaattccgatggaaaagaattgtcaatcccacaaaattcgttgccgaacaaattcatcagattcggatgcattttgattaagtgaaaattcaatttagaaatgatttgtaaccatttctggttttcagctacatcgaccaaaatgtgctcatttttctccgccgttttcaccgttttttcgccacatttgaaacaaaaattcacattggcactgtgaatggtcgcatttccaaggtcgctatgctcaccatttggccaatggtcatggacaccattcctgtgatgtattt

SEQ ID NO: 28131 - DNA, 813 bp, Heterodera glycines
gccgagaaaaattttgtaatttttaatgcgatttattaacagatttgtacacaaaaaaggatgatttttgggattactatgcttaatttgttaacggattttctttaaaaaatgataaaatatatgttagttaaaaaaatatatgagaaattatattttgtcgattatgaatagagctcgcattttgaggcatatgccttttttttctgcgcacttgttccgatatattaagcataaaaaagcattttccatttggtttgagtcttctacgttgacttttattatgccttatttgcctttttcctgattttcgtgcctaaatgtcttttttggcattttgccgttttggtgccttttttgacgtttttttcgaaaaattccaaaaaatgcaataaaatcggtaaaatatacccctaagaaatgacccgaaaatttttttttagaaaatacaccctccaggaattggaattttttttcaaaaacacccctaataaatgaactgaaaaaatttcataaaatacacccctaagaattaaaatttttcgaaaattgatcgccaaaattttatttattttttcttgattaaaaaatttaggtttaaaaattttccttattcgtaaaacattataaaatatttaactagcgggtgcgtgaaccgtcgaatctgggactgggataaagcgcttcgcgctttccgagcttcgctacctaggctgtgaagcgattcgaattgatcgaatttgagctcggacgggcgctttgcgcccgtttttcaaattttgttcggcttggacgggcgcttcgcgcccgttt

SEQ ID NO: 28132 - DNA, 1794 bp, Heterodera glycines
  unsure (1)..(1794): unsure at all n locations
atacatcttgaatgcctaaaggctggggtaaaatttcaaatattttttctagatttacagaattatttttatttagccttgacaaattatctatgtgcccattatgtcgtgcagaaataacagacgatttcaagaatttattaagcggaaaagatcaggcaaaagttgaaaaaataaatttttaatatttttattattattatttattttaaaggcaggcccatcaaattcaaaaagagaacagacggacatgggtatatttagggttctattttttaagcacaatattaattaatttatctaattactaataaacttttgaacaaaaaagtcagaataatcaaaaaaaaaatcgaaaaattgccataaatagtaaaataaacattaaaaattaatttaaaaaataactactcacaaataaaagttgaatttttttgaccaaatttaagattgtaaaaacggaatttcttgctatttactaatcatttgatttttaatttacaattaagatgaacaatttgcacgagctctaatgtatgttgattatgatgatgatgatgatacaattacacatggtaataatccaacggcaaatgacgcagcaatggcacaacggatgcaaaaacagctgcaggagcaacaggaagaagcggatgccgaattagctaggcgtttggctgatcaactttagggtaataatttgggctggcaatttttaattactaacaataacaagttattcaaattaataattaattaataaatagtgaagaattaaaaaaaagccaaaatacgaatttaaattctgtgccttcaacaaatcatattaattttgatgcactgtttaaagattagtctagaataagcccccattgcatgcatttttaaaatatattaaatatgtgacgacagcaccgtctttgaattttttttttttaatttctatgattttgcaaaaatcatagaaattaaaaaaattataaatttaaataataataaaaaaggaccaataagtgggtaaaaattaccagtatgtcatgtgtaaagcctgtctataataataataataatgatgtgatgaattaattttcctttaaaatgttttaatagcaaaaataaatttttattcatttttaaatatcaaaaaatagagttattaatttcatagatttttgacgaattgcgcaattctcgagcaccgatgaacacaatggacactgagattttgaaaatgaattgcgctcgtgaaaaaaactttgtttctgatccgtattttcgtaaacctatatggaaagtctaagccaccactttaacgaaaataatttgtcatcatttcaaatttttcaattattttttccttcgatgttttcttaaacctagaaaattttaaaaaatccttaaacaaaaataaagttttaacaaaaacaaaaaacctaaattttgttgcagatttttgaaaaacaaatttaaaattgcctgcatatgattcattgttaaaaaggcttatttgatcatctttgacatttttatgaaatttaaacatttactgataaatttatagtttttttacaccacttttaagacgagggattaccaaaattagagatacaatgaaaaacatcccacattttggcgttagtttacttttcttaaagtgatatgaaaaacaatatccggttttgtgacgtcatattttcttcaacatcgaccccagcaatttttgcataaacaaggaaaataaaatttcaaaaagcgcatagttatggccaaantgtacacaaatntttcttgtca

SEQ ID NO: 28133 - DNA, 1115 bp, Heterodera glycines
aaaaagtctagggagttgtgaaaatttttcttgaaattttgagtaggcctagcagaaagtggacaaaattctctaccgaattgccttttgaatgatgtggctacgacttattcccacagaacagcataggatgtcaaaattgacaaccataaaaaagatcaatttttgatcattttcccttgtaatacggtagaaatcagtcatttttgggaataaattctggactataatttaggatagaatataataataataataaaaaggataaatgctaaaatgctttgtcaaattgaattgttttcatggcactgtcttcgctctttcccttccaattgtcccatcgctgtgctaattgactgatgtggcgttgcgtttctctggccatcgtttgccaaatcagcattattttcagtcgcctccggcatttcgcgtggtgccacaagtggcgggaccgaacggcgaaaggaacagtgccgttggatacgcaatgcttctcgatcatagccaagccttagtttttgctaatatagacgagctaagaaacatgaaaaagctagaccttaagttttcatgttaatttgctttaaatcaaataatgctaattgtaagtagttaaattatgattagggttataaattatatggattttttagtccatataaatccatattttgggggttttcgggaataaatccatattttgccatttttgcgtttttagtccatattttatccatttattggggaatttcataaataaatccaaaaattgccaaaattgcgtttttagtccatataaatccatattttgggggttttcgggaataaatccatattttgccatttttgcgtttttagtccatattttggccatttattggaaaatttcataagaaaaatgcaaaaaaagcgaaaaatacacccctaatggtcaattttttttaaattaaaaaaatacaaccctaggggaaccgcccactttggcgcgggtattttggcgccctatataaaatggcttttttggcgccagagttgaaaaatctccaaaaattttcagaaaatttttagtttgtctttctttatggataattataagccattttctttaaaagaac

SEQ ID NO: 28134 - DNA, 932 bp, Heterodera glycines
acgccatggccttaaataacctgtttgcttttgcgtcgacacatggcgaaaaggcacccgcggaccaaatgggcggccgattggacacgtgcaaatacaacggttatgaatgaatacattatctaaaaaattttatatttttaggacagttttcatttctgttcagcgatttaattgcgccgggggtccgtcgtccgtcttttgctcaggtgtataccctggcacccgaagacgcattgaatgtccgcgaagaggcgcttgacaccgccgtttcaccacacgtcagacgcacaatcctcgaaagacttgaggcactgatgcgacaaaacccatttgggcagaccttccagactgtgggtacgaagattgccgctgctcgtgcagcaactggcgaaatgccgcatttccgagtatatcatactaataatcatatttaaatttaaaaaaatttaaaagattgccctgttaacggatcgcgagttgaggagcgttccgcttcaaggccgcactgatgtcactgttattgagcgggcggatgcaccgactgccaagcaagttgcagtgatttgggtccaagaggatggacttcctcctcaaatcagcggtagaaattgcacagttaaaagacctttactatacgattcagctttctgggtgtccgacaaggccgggaagatgcgcgagctcaagagtggaatgccgcaaattgatccgtgctgcttcccactgctccatccccgcggtacgcttggatggcgatggtatatgaagaagcgtgggtccgaggtatataataaaaaataaacttaaagtacattgaatgataaagaacacccgacccgaagtgcagttggaggaacaagaacatgatcagatttccgacgacgaattgggcgacgaggttccaatcgacgatattgtgggtacgcagc

SEQ ID NO: 28135 - DNA, 906 bp, Heterodera glycines
taaatagggaggaaaatgtttttaatcaaatatttttacttttttctgcaccttgttttggagcagttacattaagtctatgttatagccagcatcctcaaacaaatttgatatcttcaaattttttattccttttgccggtatattaaatactcagaatttagaaagacatttaaaaaaataactctaattactccacagtgtttaatcgtatgcaatgtggttaattatcattcataacattatcacgttgttgcttaaatcccctcaacatttcaatttttctcaattatgcccctaggctcatctttaattttttgcttaaaattacaataatttttttatattccactgttttcaatactagcaaacttttccatatcacttataaggctgatattcctagtttttgttaacaaataatcttttttatatctagagcgttgaataaataggaggaaaatgttttaatcaaatattttacttttttctgcaccttgttttggagcagttacattaagtctatgttatagccagcatcctcaaacaaatttgatatcttcaaattttttattccttttgccggtatattaaatactcagaatttagaaagacatttaaaaaaataactctaattactccacagtgtttaatcgtatgcaatgtggttaattatcattcataacattatcacgttgttgcttaaatcccctcaacatttcaatttttctcaattatgcccctaggctcatctttaattttttgcttaaaattacgataatttttttatattccactgttttcaatactagcaaacttttccatatcacttaaaaggctgatattcctagtttttgttaacaaataatcttttttatatctagagcgttgaataaataggaggaa

SEQ ID NO: 28136 - DNA, 466 bp, Heterodera glycines
tcgcgagttgcgatgcggtgcacgctttattttatttgaattaaaaaattacaacgaatacattttattgaattttcctactgtataattttttatcgtccggtgacggtaggggtcagttgcgtctggccagttgcgtctggccgattgcgtctggccagttgcgtctggggccggttgcgtcttgggccagttgcgtctggccagttgcgtctggccggttgcgtcttagtacttaaggggccggttgcgtctcaaacattttttgaatcactttttcaaagaatacaatttttgagagaatgatatttgtattgaattcggttaagtacatagagaaattataaaaaatctattttaattaaaacgaaaatacaaataaataataatgcaattaaaaagaaaatattgattcatttggtaattgctggaaattcccctaagcatttcattaaataaattcgga

SEQ ID NO: 28137 - DNA, 1688 bp, Heterodera glycines
tgtggacagctaaattttgtaaagggtaaagtaaacccgcgaaaagacgagccctacggttgaatttattgaaaaacgggagacaaatccctcaattttcaacggactgtctacaaaaaggggtgaacaaaaacccggaaaacgattcgaggagaagacgaaaagttggatttttttgtaaacgggaaaagcaaatccctcttcacttcaaatctcagcatcggaaaaggaaattgtgaaacaaatcacaaaatttgtcagttcggtaaaatccttcgacaaaactgactctcaaacagggaaactaatcccatttcgacatgcagcaacttcgccaaaacaaaagatcggacaaaggaaattgtatggaacagcaccaaaaacaagaaggacagcaaattggctcgttgaatttgtgctaacgatggaacgacttcctgagctgaaaggaacggaagggacgaaccaaattcgaaaatttttcaaaaaattttcgtcagcaaccgaagaatggacggaaagtcgacgcatttcagcgctagaaagcaaaatgattggaaaagcagagcgtgcatttgacgccgcgatgaaacatcggccgaaaaatttcaacaaaatttgccgcggaatggaaggaattttgagcgagtgggactgcaccgaaatgcgagctttcaatgaattgtgggaaggagtgaagcgaagaccggaagaaacgttggacgaattcgcggaacgaatttacggcattgttgaccgcgctcacccaggtttgccgccaaactttgtcagcgattttgcgataaagcacttaattcgtgctttggaaaacccggaaatttcgatcggtttggaattagctcgccgcccaggcatgagcttcgacagctttgtcgctcttgctgtgcgagcagaggcagtgcaaaaacccaccaaatcggccgaatctggaaaagagcaccgtctgaaatttcaacctaaaacgactgttgcgccacaaaaaattttcgcgccaaggacaacccgaatcgtctgctataactgcaacaaaatcggacacatttccagcaactgtaggctaattgaacggaagcatttcaactgtgtaccaaaagcgccgcagcatgaaaattttgcgacgaaaagtgccgattttcgaaaaaattaagaagctgagaagaaattgaatgatttgcggttgtcgaaccaaccaccggcacaacaaacaaacgtggaagctggaccaaaacggaaagcgtccaaccgacagcgcaattcgtcgtcttcaagttgcagcgtaaaagcagcaaaaattaaggaaaattcgccggaaattccaaaatggtttttgaatgctatgattgctgccttggctttgctcgccagcacattctcgaatgaaaagtcaaagattggacgaatttggaaaggcaaaagcccaacgaatggcagcgacgacgagaaacgacggaaagcagatggaaaattgaggacaattttttcgccgaaggccggggaggaaatggccaatgatattgcagacaacttagaaaatttgtcgatagcaaacaccgaactgaatacgcccctttcaacaccgaatgccctaccgatgagcccaaagcgcagaggacatcgcttcgtagagggcgaggatgtgatataattgtgatttaaaatatgtttgg

SEQ ID NO: 28138 - DNA, 882 bp, Heterodera glycines
  unsure (1)..(882): unsure at all n locations
tagtctaatctactcaaaacggttcagaattcaataaactttaattccggtgcgaaaaatggggtttgacaagtttattgggggaaaaaaagactttacaaaataatacccctgggagaagggagtgggaaacatgatttcaaaattttcaattttttctagtctaatctactcaaaccggttcagaattcaataaaaataacattcacggtgcgaaaaatggggtttgaaaagtttattttgaaaaaaagactttacaaaataatacccctgggagaagggagtgggaaacatgatttcaaaattttcaattttttctagtctaatctactcaaaacggttcagaattcaataaaaataacattcacggtgcgaaaaatggggtttgaaaagtttattggggaaaaaaagactacaaaataatacccctgggagaagggagtgggaaacatgatttcaaaattttcaattttttctagtctaatctactcaaaacggttcagaattcaataaaaataacattcacggtgcgaaaaatggggtttgacaagtttattggggaaaaaaagactttacaaaataatacccctgggagaagggagtgggaaacatgatttcaaaattttcaattttttctagtctaatctactcaaaacggttcagaattcaataaaaataacattcacggtgcgaaaaatggggtttgacaagtttattggggaaaaaaaagactttacaaaataatacccctgggagaagggagtgggaaacatgatttcaaaattttcaattttttcttgtctaatctactcaaaacggttcagaattcaatanaaataacattcacggtgcgaagaatggggtttgacaagtttattgggg

SEQ ID NO: 28139 - DNA, 666 bp, Heterodera glycines
actcggcctcttcgcggcctcgtggtgggccttcgcccccctccccccccccgcccttcaaaattttgaaaaataaataaaataataggagactcagaattttgaaaattttttataaaaactgatgacaagctaatgtgataaaacaggttaattcttttcctttcagtatccctgcaaagtttggggcgcttctgataagtttctgaaaaaaaagataagcctaaactttttggcctgtttaaaaaggaattaaaaatttttaaaaatttattcatctccctttttgatagaaaaagcatcagagtgcctaaactagcatgtaaataaaatttggtgcgtttcagagcattttctgaaaaaaatatttatgaattaattatgcaaaaaacaaataaaaacgaaagactcagattttcgaaaatttttttgagccagctagctcggcgctcatttcagtgtaagttagtcctttaccggggagtatccctgcaaagtttggtacgcttctgctcaattagcaaaaaatatgagtgatcgaattttcactaaaaaagttaagcctacattttttggcatatttaaaaagcaactaaaaaatttttaaaatttaataattttcctcgcaccgaaggtactcactcggcctcttcgcggcctcgtggt

SEQ ID NO: 28140 - DNA, 1384 bp, Heterodera glycines
ttccttttgtcgaaacacctttatgaagccataacttttttatatggttggtcaaatcaaatgatcttcgtgtcattcggaagctcttcataaactctatcagctaaccaaaactcgcagtgattcgtacaaaagaaaacagttaaaaatagaaatacaccaaaattcggacttttttgcagttttcaagctttgactttttgtgggttgcttaatcgcttagaaaatgcttacaaatatcttctaaacatatatagctttcgaatgataccaagtttatttgatttggccaatacagaaaaaagttatggcttcataaaaatgtctcagacgcagttgactcctaccggatcgaaaaaaccacaaaaaatggcaaaatctttctttcgttcgttcgtcagtttggccccctcctctcccctcaattggcttcacttacacagcttttgctccttccaagtaaacttgccacgggcctctcacagaacagaatgcgtctccgctctccaattctcatttcctcctcaatgaaaaggccgagaatatcccaatttggcacaacaacgggccgaaaagatgcaatcggagaaggccgagggagtgaagaggtggagaaagagtgatcaaaagtggaagatggatgaatggttagtgaagcggaagaagacgaagcggaggaggaggagggacaatcggcggaatgggcggaagcggcggaggaaagcggcgaatcggccgaccggcggggggcggtgggcaaaccgtcgcagcacaactaaactaaacgcattttctgaccggtcaaaacctccgctgctcatccatccatcttcaatgcttttaatcacttccattttaccaattaaaatattttaattttcttccattttatttaattatcccgaagtgaaaatgccgaccccaaatgcgttgttggcaaatcgtttgtttctcagaaggcccgactttgtgaaataggcccttcccttcttcgcgtggtcgccgccccttttctccggcaattgcacagcttaattacctaccaattaaaaataaatatttctcttttaccatttttattcattccgatggtcaaacatttcaccattcgacacgatcggcacaaaactttctctgctgaaattttaattggccattattttgttaccctttctctttaaaatgttaaaggagtgtttccaaacttactgtacacaatgggacaattcgctccaattttcgatagtttttggcacaaataattgcgttttaacacaacggatcgtctgaagaaggcacaacacgcttggcacgactgagccccaaaatgatgcccagtggcataggcatggcaaacgcggcattcgaaatcgggggaaaccat

SEQ ID NO: 28141 - DNA, 412 bp, Heterodera glycines
cctcaaaaagttgtaagacccttccactactttcagggcgctcccggccttcggccgggagaaaatggttttagcaacgaaactccttgtcaatataacatatatagtaactagcgggtgcgtgaaccgtcggctatttagctgggaaaaagcgcttcgcgctttgggagcttcgctacctagactgtgaagcgattcaaattgatcgaattagttggagatttttttttgaatttttaaaaaattattatgggtttttagtccatatcgaggctcaagacgggcggttcgcgcccgtttttaaaatccattgaactcactcgggcgcttcgcgcccatttttcaattttgttggccttacagagattagaagaggtacaacagtgattagaagaggtacaacagtgattag

SEQ ID NO: 28142 - DNA, 1007 bp, Heterodera glycines
  unsure (1)..(1007): unsure at all n locations
aatcatcggccgattgtgaattgtcagtcgctgagcaaagnccttctgnttaaggaaagtgccaataaatgagccgtttctgtcgtgtccttcccttacctacagaaataagcactgtcttcggcacgcaaattctccccaaattcgatcatttccttgcgcaccctttccttttccggcccgtctcccttaagtcgcgcggcgtcgatgccacgaaggcacgcgaattcgtctttcagagggttactcaaagagcaaatggaaacatcgaagtcggggaaacgatttaccagggctgaggccaattttagggtcaaaaagtctaaagtgaacggaataaaggggaaggcgaatgggacggacctttgccggactttctctttcccgaaacgcaaatgaatgccttaagagacgacgggagaagcggagcaaacattgagcatacgaaaaacggaaaatgaggaagaaaatgggggaaagggaatgaaataccagcgaaaaacgaatgaaaaaaagagaaatcggaaggaattgcgaattgtttatgtgcaataacaaatcaaaggtgaagaaaacaattcacaggtgaaaaaacggtggactttttttgttcattttctcctttttcttatcctccgccgacgataatattgttgatgggaatgtggatgagtttgacgaagaatccgatgaagcccataatggcgaatccaatcgcagttgcaaaggcgatcttctgatactctacgaaagtggcaatgtttagggaaaagttaattactccgacccataagcgttttagcctttggctcggttaattgcaattttcccggtggcgcctttcggctacgccggaacattaattccttatttttcaaaaattaacccattttcccccacggaatttctctaattattggcatgctcgggttcatctctaaatcggaaagttcaaataaaatttgagcaaaaaagtgcaggccctttctctttcggaaatgaaaaac

SEQ ID NO: 28143 - DNA, 1206 bp, Heterodera glycines
  unsure (1)..(1206): unsure at all n locations
ctccctttttgtgcactatttcgtttcacattttctctttttttgttgtcttttgaaataaattgtgaaaaaatatacgaaaattattttcgcttttaattatgatgtacaatgcttttaagccccgccgtgaggcggcttctttttgtgcactattttcgtttttaaaattggatccggattttttggcttttttaaataaattgtgaaaaattcaaaacaaaaaacttttattgcgctacaaatgcttttaagccccgccgtgaggcgggacagttccaaaatttgcaccacattttactgtggaaagtccaagtaccttaattggacaactacgtgtcaatgagcgcagtcgcctctgacctcttatggagcagaaaagggtgaatatcagatggggtgcgtcccatcctaaaaattcctcttttcgtctaaccatccctccctttttgtgcactatttcgtttcaacattttatcaattttttgttgtcttttgaaataaattgtgaaaaaatatacgaaaattattttcgcttttaattatgatgtacaatgcttttaagccccgccgtgaggcggcttctttttgtgcactattttcgtttttaaaattggatccggattttttggcttttttaaataaattgtgaaaaattcaaaacaaaaaacttttattgcgctacaaatgcttttaagccccgccgtgaggcgggacagttccaaaatttgcaccacattttactgtggaaagtccaagtaccttaattggacaactacgtgtcaatgagcacagtcgcctctgacctcttatggagcagaaaagggtgaatatcagatggggtgcgtcccatcctaaaaattcctcttttcgtctaaccatccctccctttttgtgcactatttcgtttcaacattttatcaattttttgttgtcttttgaaataaattgtgaaaaaatatacgaaaattattttcgcttttaattatgatgtacaatgcttttaagccccgccgtgaggcggcttctttttgtgcactattttcgtttttaaattggatccggattttttggcttttttaataaatttgtgaaaattcaaaacaaaaaacttttattgcgctancaatgcttttaagccccgccgtgaggcgggacagttccaaaatttgcaccacattttactgtggnaaagtccagtacctt

SEQ ID NO: 28144 - DNA, 950 bp, Heterodera glycines
aattcatcataattttttaaaaattgaaaacttttcaaacttttttttatttgcccaaggcttggacccaaaaaaccgaggctttcccaggctgagaaacttgatgaatgcttttcaaatgctctattaaacttttcaattggcttgttataacactaccatggtcggtctcggcagtcggtatgggtttttcaattttgctgttcgctgagcccgtaccataaaggcgatttggagggtaccggcggaaatcgaaaaaatttaaaacaatttaaatatttatttaaaaatataagtccaccatttaccatcagaacaccgaccgccttaaacattaaaaggtgaaatttgtttttataaataacattttcaatttttaccaaatgataaatacgaaggtagtgaattgtgtcactcccttaaattattaaattaaaatatttcgggaagttttatttattatttttgcataaatttttatcataataaaaaaatatattacgattcaacagaacgtaaacattgacgaacacacaagcagcagctagcagataaatggcagaagaaaaaatattcatttggctttgttaatccgacttttttcttcaaataaaaaaataataaattgcaaaattaaaatgaaaaattttattcccacaatttttttgtgttaaaaatgacagaaattttcccacaaattctttctttttttttgtgtgttaaatgtttcccctcaatttcttttatgatcttttggaagattaacggaatgggaacattgacaaaaaattaacgaacaaaagaaattgggaaaattctgtaaaaagtgttcattgtcagtacggaaaatgggatgggttaatagaaaatggcgtaaagtcgtcaggggaggggggggggggggtggagaagaaaaagccgcttcttcttcatgagagagttgggaatgc

SEQ ID NO: 28145 - DNA, 2006 bp, Heterodera glycines
ttatttgccatgtctgtgataccatttgacaaattgtggtacatggacatcatgcagggaatgtacaacaactaatggaaaaaaaatactcatgcccatgtgacaaatgaaaagggtcgtttttgtgccgaagttttggcggcagctaaaattttctaacttttttctttattgtctaaatccaacaatcttagcatgactcggagattctttacaagctctattcgctcaagcatataaaaggaagaaaaaaaacttaagaattccgaatttttcaattttcgttttaaaacaacttggtaataataccaagattgttggatttgatagacaaggaaaaaaaagtaaaaacaagggtgcttggtttttaaccaataagaaaacaattaaatttgactgttttaagaaatttaagtttcagattttgatccaattcaaaaaaaaagttggaacgattttaccataaattttatatcattttcagattttttcaccataaaataaaaattttttatgaaaaagctaagattttaattggcaaacattttaaatatttccattgaaataatcttctgctgaaacttacttcgaacacgaaaaacataatgattaagatgatgccgtgaacagtgtgaatgcgttgcccaattggcaccaaattggcatcgaaattcgtacaattgtacgccaaagcgtatttatcgcgttggaaaagaagcaaatccattatcaaaaaataaataaataaaatttttattgtttttgataaaaattataataatttattaaatttaaaaagatttaaatgaattcgtttgaaggcagaaaaaagaagaataattatattagaagattcagtttttgtaatttatttttgttgcttttccatttgccattgtatataaataaatctgtgcttttgacttaaaaatttgtaatttattcattggtacagaaaaatactttttggtaagaaattactcaaaaaggagtaattattcattagacaaatgaaaaatatattctttttaaatctcataaatttcaaatctcataaatttcaagcaattatcaataataataacaaaagaatttggtctgagatgaatgagaaactagagtattagcgggaccgggacctggtactgaaaaaacgtcgtacaaatgagtacctaagtcccggttttcggtatttggaggaaaggacacggaggaacttaaatgagcttggcaattttaattgcaaaatgaatatcatcattccaagtttgataaaccctaggaaaagcaattgtaagcatttgtggacaaaaaaaatagcaattgcagtttcatattttgggttttaaataatcaaccaccgtaaccagaaggatttggtttcatcaggaaacgttttgcctttttttcagattcttctagtcattttgcaggcttttgctagggtatgcacagaaaatggattaaatttgatcaaaaaacgtataaacaaaatcgtaatcaagtaaacataaaaccatccttggtcaatttcccaaaattaaaacctaatcaaaattttcacaagtcatcttgaaaaattttttatgcattcatttctatatgaaatttttattttaaaatcatgtacaataataataggcaatttgtaaaatgatgctttaatgtatacttttaacatcacccaattattggggcctttaattagggtggtggaacattggtagggactttttcttcccaaggggcgtgaaaaagtgaaccaaaaaaatcggggaaagtgtaccgtgttaatgaacagaagataaaagaggaaacagatgcaatcttattaaatatgggcttaaagcctgttattaattatttcataaaattattataacttactttgttgaaatttttttttttcatataaataaaaattgaatggaaaaagcaaaaacaaagccggctttagtttgtaataggttaacattctattgctattttttattattaataataaa

SEQ ID NO: 28146 - DNA, 1013 bp, Heterodera glycines
  unsure (1)..(1013): unsure at all n locations
ccctgcccctacaacctatcacatgggacccctgtccctgcgacctatcacataggcagcggtctgggacccctgcccctgcaacctatcgcagggatctggggacacctgtcctgtaatttaaagcatttttgcatataatcaacggacagggtcgtccagacccctaccccctgttctattaagtaccctcagacccatgtcccttgtcatattaagggtccagacccctgccccatgtcctattaaaggatccagacccccgcccctagcgtcactatataagcagctcgttttaagaaatgtacagttaatagaaattattgtacccattacctctaaacattcatggagaaaaatatacaattatcggttgataaagaattggagcgtgaacctttaccaccgccggaccaacaaatggaacgcgaacaaccactcatacaaccaaaaatcgaaccgcctgatgaagatttcccacaagaaaaatcgtcatcgtttataccacagcccctcaaacttttgaaaacgatttgtcatgtgagaaatctccaccacctacaaaaatatccgagtccgacccgcagactctgtttaaaacagccaaattgacaacagagtggtcgcagaaggaaacagtagaattatctggcagttcggcagatttaacacaatggctcgaatacatcatgaaacccgaataactgcccctacatatttacactatttaaacaattctgtttttttcaatttgttacaaattattaaaaatgaacaaaatttgtattcatcaagtaaaatgttgtcattactgtccatgtcattatgaaatttgtaaaagatgtaggacacaaagtctattgcatttttgcaccgtacacttcccctggtcagaaaaatggtgggtgtgcccaaaatgtgcggcatatgtcccatacaaaattggagacaancactatataaataagttacaattagaaaaaaattatttttaaaaaatggtttaacgcccc

SEQ ID NO: 28147 - DNA, 1384 bp, Heterodera glycines
  unsure (1)..(1384): unsure at all n locations
attccaatcagtgggactctattctcctgcgtttcaatcaaaaggactcaatccaccgcattcaatcactgggactcaacccaccaacattccaatcactgggactcaacccaccaacattccaatcaacaggactcaaccctccagcatttcaatcactgggactcaacccaccaacattccaatcactgggactcaatccaccaacattccaatcagtgggactcaacccaccaacattccaatcaacaggactcaaccctccagcattcaatcactgggactcaacccaccaacattccaatcaacaggactcaaccctccagcattcaatcactgggactcaacccaccaacattccaatcaacaggactcaaccctccagcatttcaatcagtgggactcaatccaccaacattccaatcaacgggactcaatccaccaacattccaagcaacgggactcaacccaccaacatttcaatcagtgggactcaattcttctgcatttcaatcactgggactctattctcctgcgtttcaatcaaaaggactcaatccaccgcattcaatcactgggactcaacccaccaacattccaatcactgggactcaacccaccaacattccaatcaacaggactcaaccctccagcatttcaatcactgggactcaatccaccagaatttcaatcactgggactcaattctcccgaattcaaatcactggactcaatctcatcaatccttcagcaacacaattaccgggactcagttctccgacatttcaatcaccggaacttaacctcagcaacggaatacagaactatttaagaggaatccagaaattgaaatataacccataataaatcaaaacactatggtgtataattattgcctccaccccataaattcaaattaaaactgacctgtttaaaactttccacctaaatttgatcccgcaagtggcacgtcaatatcccaattgcatataaatattccactcgaacaccggcaaaacatgagatgtagcatttatattgctttttctatccatcaaaggctttttctttcattttttattactaatcataacatgctttttattcaaaacaaatatcaaaaaccaaatcagattcttttcatattataagcaaggaaaagtacaaaaaacttttttaagtaacaaacctttttcattcaaacgaattctaatgtatttttttaatcattatcgtttacataagcaaaacaaaagctttcacatncaaaatcaatcattaaaacaaaacgaaaattttagacaaaaaataatgataacagcaaaaccacaaattttttctacacacaataacagaaacctcatgtaccggattttccactcaa

SEQ ID NO: 28148 - DNA, 1507 bp, Heterodera glycines
gataaaaaggcacaatttacgccaaagtttgaccggttttaacgtttattttggtaattttttttcaactttttgttcgaattcggatccgaggttcggaattaggcaaatctgagtcctgattcgtaatcagcaccctcgaaaacccccggaaactgattttgagctcaaaataaaaaaaagttaaattagggacacccattcttcaggattgccgaaaatgacaagatttatacaaattgctttttgctttgatagtaaatccgatgttgacgagcagaggatccaaaagtagatgatcgtctctgcgatagtttctgttgctaaataataatcggtttttggttctcatgttctttaggcatgacttttaggcgtccaatcaagtaccatccaatcttattactgtgtcaatctttaatttcttggtatcaactagtctcaggaataaaagaaaagactaaaaaggaaaataagaaaaaaaatggacgcctaaagcgcactggcgccgttttttcgtttattcgagtttatgggctcgaaattgctcatatatgctggtcctaatcagccacaccgaaccctcccaataaataaacgtgttctttgaaacaatatggaacaccatcaattatttttcacttactgtgctttgcgattcttttgactgttgttggtccttctgaattttcaatcgaattgcttcattctctttagcgctgtctccaatttgagtttcatccatagataaaaaaattactctaaaaatgtaattttaaaaattaagactgttgttgtgatcatggtcatgtgttcaatttctaatgatagaaaaaaaaaatttccttttttgctttttcatagaaaataaacaaacttcaaatttatatgctttctttatcgttatattttcagttttcaaattgcattattgtttttaaatgaccagctacatcgaacaagaagctgatctttctgaaggtcatgattcagactcggaagtttctgaacctgttgcaaagaaagcaaagaaaaataaagaaaagaaaagaaggcatcaaattaggtttaaaaatttcttcttaaaccttatacaaaaggaattttagtagtgatgaagaagaggaggaagatgaaggagatgaggaagaaatgagggattttattgttaatgaaggtgacgaagaaggtggagatgagggcgttgaagcggaagcagacggcgaagttatcacagatttaatccaaaaaggccttaaaattacctatttagagcgaaaaggggtctgatgtcagtgatgatttgctggatgacgatttggacctactcaatgaaaattaccaaaacactcgtggcagagttgaaattagcgatgatgaggaggatgtcagagaacgaatcaaagacagaatttttggaccgagtaattcaccattttttatatttctatgttgatttccatttaaagggtatgaagatgaagcgagggtcgaacagcctcaatat

SEQ ID NO: 28149 - DNA, 1992 bp, Heterodera glycines
  unsure (1)..(1992): unsure at all n locations
ttgggggtgggtcgcctataggaggaactagctccggcccaccccacgtngggtcgncaagtaaagaagaaatatcacacttttctctgacttctctacctcaagcgtaggattcctacactatcaacaacgacctgccccttatgggattgtggtcaacaacgacctgcnccttatgggattgtggtcaacaacgacctgcnccttatgggattgtggtcaacaacgacctgccccttatgggattgtggtcaacaacgacctgccccttatgggattgtggtcaacaacgacctgccccttatgggattgtggtcaacaaagacctgccccttatgggattgtggtcaacaacgacctgccccttatgggattgtggtcaacaacgacctgccccttatgggattgtggtcaacaacgacctgccccttatgggattgtggtcaacaacgacctgccccttatgggattgtggtcaacaacgacctgccccttatgggattgtggtcaacaacgacctgccccttatgggattgtggtcaacaacgacctgccccttatgggattgtggtcaacatagagctgtccctcacgggatacatttaaatcgtctttttattatatatcaatgactgcattagggcacttccggtttccattatatttacaatgtaatgtgtcagcttctcaatgaagtgaaaccaagtgcatgtcgggcgacgcaaagaccctaaagaaaataaggacctgcccttcttgggattgtggttcgaggcctgccctttgaggattttgggccacaacggtttacaatgatgatttccttattgttaccggccaacatccggtgcgaagctggtcccgcactttgccaagaccagtggactggtgagaggtaacataggatattggagttaaccaaaatttatcgtcaaaatttgatgacaataaagacctccctttgggaatggtggttcaaggacctgctctttcttgagattgtggttcacaatggtgtatcgattagttccttatccaataatgataactctctgcactcagtgcccttagggcagatgggatgataggtgagccctggctgatagatttcaacagcggcttcatttgtggcaagcgaagaaacgacaccatttttcacactattacttcatttgcataaatatttgattttgtgtgcactcattggttaatttccttcatatttttgttacacccatatttttacactgattttgtatttaagatgccttctaaagatcgtgagttgaaaagaaggaagcaagaagagcacctgcgacggacggagcaatctgtcagtccaggtcgcttacctatcccaaattgccctcctcagggcaattcaaactgtcctattctggacaacccattgagtgcagatgggaatggggcggcatcgccccggggttttaacaccccaaatttaagtgctttgcaattgagcacgccggcttcttccattggaagtaaaagacggggaagacccccgaaaaccggagcggagtctatcacggcttcgcaaaatagggtgtcatcaattgacacacaaatcactccggccactcaaaatattgggacatcgccgtgcagcaaaaaagggaaggttgccgaagttgaccgacccaagtttgctactgaagcaattgcttcaacgccagtctccacgcaaaaaagccgtagtgggcggccagccaaaaaaactagaggaccaggaaggggcagaacaaatgattcgttgagcgaacgctcttcaatgggtcagagctctgaagcggccatanatgtggctgttttgcccaacgtgcctgnaaaaattaattttagcacagtacaaattaatttcgcaacccagcggaatttagcgtgtaanatctggaaatgnggagncactgctctttacgaatgcgatgcaagaagtcaggcccagattcattgaaacgtgctggaatgatc

SEQ ID NO: 28150 - DNA, 1085 bp, Heterodera glycines
  unsure (1)..(1085): unsure at all n locations
atccgtttgattggtgccggcgctgaacagagaattaaaaaaaatataattaaaaattatacatttaatttaagtttctctttgattgtgccgccctcatttagcaataatagcaacaataataatgattcgggcacaacaaaagcttctacaactaatgatgatgatgatgatgcgaataatttgttgattttgcaccaaaactgtgcgacaaatgtgggagaaaaagaatgctttttcgagcctaccgtatcaccactgtcattcctactgtacatggatttatctgaaatatacggtgaatgactccatgattattggcactattaaatatttattaaaatgaattttctacatcgtatttttttttgttttgaaataaattttttaatttatttatttaagtttaaaataatatttggattaatattagcaaatttttttatccagataattaattacataattaaatcaactaattacctaattaaaataacattaatcaccaggaatgccaaaatatgtgcttcacccaatccaactgttcacatcactgaacaacaccgaaaatgtcgaaaatgcacagaactcgccgcgctttgcacgcgcccgctttcacgttcagtttaacgctaccgcgcgcgcgttcgcaccaccgcttgtactgctcgcgcatgtcgtgtacgcgtcgccaccaacggcacagcgcgacaacgacagcgacgttgagtttggattggcacaggacgctgcgggagctgccgaacttgtggaaatggcaccagccacgggcataattgtgccaagggtgaaggaaaaaaacaattttgaaacttaaaatttttttaatgctttaaagtaaaacttaaaaaatactttcaacattaaattaatttttaaatattaattttcatataaatgttaaaatttgtttatttttaattttttgcataattatcggtaagaattatttgtttcgattanatcttttcaattttttataataaattaaaaaatattaaaaaagtaaaaaattttcctggctttanagttaaacaaagaaaaatgcattaattaaactttat

SEQ ID NO: 28151 - DNA, 1041 bp, Heterodera glycines
ataagcaaactaattagcgaatttggggtcatttatggccattaatgttctctattagcctccaaattttaaagaatttttaattaggttacaaaaaaaattagaaaaaaacacaaatttttttaatagttttggtcataaaaattttacaggctgatagagaaaatttaaacattaaatgaggttttgataagtgatcagaggaactcgcctggaaatagtcggccaatttgagcagcatcagcacatttttatctaaaagttgagaattcaaattaaaaaaaaaaattgaaaattaaaaatcatttttcacccctcagggggttattgaataaatacagtatcatgtcatggcattacggttgggcagaaaaggtccgttcagaaaagtgatggcctccaaaaactccatgaattggtccatgtccacgcccaattcgtccaaagtgatcattcgctgctgcttctccttcatctccacgctgagcatgcgactgatcaccggggaaacggacatcagccaatgggcggacacagcgatctgctgattgtaagcaaaattgataagtgatctgaccaagataaatcaacgatttgatcaagaattattagtgatctgatcaaaatcattgttgtgattacgcccccctcccccttataaagttgagccctccccccttccgcccccattgttttcaatgagtctgataatttggcaattacacatcctgcacatttgcggatgaatttttgtgatagatttttgacagaacaggccttacttaatgtgcagtatccatacataaattattatctaaatttcatataccgaaaaattgttttttgcagacttaaatttaacaagcacaaattgttttcaaaattttttgtatggaaccatgaaaaaccggtgatgcttaatgttgctgttattctttctgtttttcacctgtttgtcaccaattttcatcgtcaaatcgtcgtcgggtaagctgctggatggcgccgggaactgacttaaaaaatggggaaaaaataaga

SEQ ID NO: 28152 - DNA, 1163 bp, Heterodera glycines
  unsure (1)..(1163): unsure at all n locations
tcccgaaccaaatttctgttaattcgctcgaaacgcttatttcgggtgccattctcaacgaatctcatccttactccttcttcccgcaccaataagtttccaaaatttggtctcaaaacttcacgcaaaccttcaacaaagtcctcgtgaccaacattttaattgcgaatttgctgctgttcggcaccattgttaccaccaccgtttgctcgcggcggcaaattcgattggatggacacatgcagaaggcgccgccgaatttcatcgtcatttgctgctgctgcttccatttcactaaaatggtgttcgttttcctccgccgacaaactcaaattccggttaagtcccggcgaaatcggagcgttaactactggttcattttcaccatgaactctttcaacccgtcgctgttgctcttcaatcgcttcgttttgtgcgaatgttcgcaaattcaacgctctttgtcgtgtcaatggcggagagcgaattatcatttttgcacctggctcaggtatagcaaaaacaaaataagtttccgctgtcgacacttttccactttttcgtttgatggcgtggcgattaggacggcgaatgcgatagttcggctcgaatttgttgcaatttgaaaactttcgactcgaattgttttgttgccctttatcctgtctcaggatttttaactccactttcttttcaacttcaactccaactcttttcttcaaattttgaaatttgccctggctcagggtcaattcaaattccgttggttttgttgtccggttcggacttcaaacaaaactatctaattccgatctcgcctttccccgttttacctgctgttcctcaggagcgccaaataggaatttcgaatattccaaccaaattcctttcacttcaattcgaattggggggaggatggagttcgaacgcacaatgataaagccaaacaatatttattttaaagtccgaggagatcgatgagcaatttgagaatcaatttagaaagaaaatttgggagacaaatttaagatgagaataatgagaagtgaaagtgtaccaaacataaattaaagaggtcaacaaacataaaataaatagagataaaatgccataataatttaaaattaaaacaaatatcttaattanattanaatctccaacaa

SEQ ID NO: 28153 - DNA, 1867 bp, Heterodera glycines
ttttcggccgttcagcggccgttttttaatttgtgatgagtcggacgggcgcttcgcgcccgttataaaagtttgatggactcagacgggcgcttcgcgcccgtttttaaatttgttggccttggacgggcgcttcgcgcccgttatttaaagtttgttggttcatacgggcgcttcgcgcccgttattcaaattttgttggccttacagagattagaagaggtacaacagtgattagaagaggtacaacagtgattagaagaggtacaacagtgattaaaagaggtacaaaagtgattagaagaggtacaacagtgattagaagaggtacaacagtgataaaagaggtccaaggccttacagagattagaagaggtacaacagtgattagaagaggtccaacagtgattagatgagtccagcagtgattagaagaggtacaacagtgattagaagaggtccaacagtgattagatgagtccagcagtgattagaagaggtgcaacagtgatgagaagaggtacaactgtgattagaagaggtacaacagtgattagaagaggtgcaacagtgattagaagaggtccaacagtgattagatgagtccagcagtgattagaagaggtacaactgtgattagaagaggtacaactgtgattagaagaggtacaatcagttaaaaaaatccttttacttattaaaaataaagttagaaatttataatatattgtagaatatttattgaaattgaaaggaattaatttctcgaaaattcaaattaaataaaacatttattcatcagaaataatttaaaataattaataaaacaatattaaattaaataaaaaattaaataatttaaattaaaacatttgttcaccaaaataatttaatttaaattaaaatttaaattaaaaatttttatttattattaataatacaaaacaaattaattaaaaaatgtaaaagtaagcaaaaaatgcacagaaaaaaaatggtttatgaaaaaatataattaaaaaaatgtattaataatttttaaaaaattattaaaaaatgctttcttttattaattaaaaataaactttaaatttacaatgattgagtattattgtattgaaaataaatttttgacaaattataattaaaaaaacaaataaattctttaatttaaaaataaaaaataattaattttaaattaatacatttatttaccaaaattatttacttcaaattaaacatttttatttattattaataaaagaaatctattttttattaataaaaacattgaaaataacgtaaaaatgcacagaaaaataatgtacaccgtccggatccgaacctaccgccccccccccccagaagatgactcagaatccccaatcacacagggattctgaggtcttatcgatgtcaaaagtaaaatctgatcacgtattcgtgatcagcagcctcaaatagcatttttttctgaaaattcgaatttttccagaaattctggaataacttttttccttttttagatagaaattcctaataaagtccataaaattctcctgatttttctctatttttaaagctttatttgctcaaaattggtcgacccttaggctagatatgaatttttcaatattcgcccaaaatcccgtgggccaaaaaattggaaaatagttttgaatttttaaaaaattccaaaaattttgaaacgaaaaatagacatcatattcgtgctcagcacatcaaaataccccagaaaaatatttttgacccccattttcaacccaaaaaaaaattttcgaaaatttctagggggcctagctcgaaaaattttgaaattttccaaacatgaagtacaccattcgat

SEQ ID NO: 28154 - DNA, 1103 bp, Heterodera glycines
ccccccccccgccttcagagcacgacaaatatttcaacaaaaatttttaaaaattgactagagcaatcgaacgctaacggacgacctaatggaaaaaaatccccgaaggagagaatttaattaaatccattccttcgggggaccgtgccgggtgccgcggggtaagcagtgctggttcgtttcatcacggcaccgaaccttttggctagtcagcaatcgttgcttaacttgccagatcggacgggtgcgcatgattccactgttccaagcaccccaccaaaagcaaaacgatataaccaaaatataaggaaaaattttttaaaacattttttctccatcttcctttttgatactaaagcatcagagtgctaaaattaagttgtaaataaaatttggtgcgctttagagcactttctgaaaaaaatatttatgaaacaaaaaaatcgattttttcaagtgtccgtttggggtactcaaacaattatggggagcaaaaatccaacgcagaattaaagtacaggctatagggaagctattcccgaaggattcggtctccccataaatctgggcgcatcggttcggggggactgccccgaaaacaaaaaaatcgattttttcaagtgtccgtttggggtactcaaacaattatggggagcaaaaatccaacgcagaattaaagtacaggctatagggaagctattccggaaggattcggtctccccataaatctgggcgcatcggttcggggggactgccccgaaaacaaaaaaatcgattttttcaagtgtccgtttggggtactcaaacaattatggggagcaaaaatccaacgcagaattaaagtacaggctatagggaagctattcccgaaggattcggtctccccataaatctgggcgcatcggttcggggggactgccccgaaaacaaaaataaatcgattttttcaagtgtccgtttggggtactcaaacaattatggggagcaaaaatccaacgcagaattaaagtacaggctatagtgaagctattccggaaggattcggtctccccataaatctgggcgcatcggttcagggggactgccccgaaaacccaaaaaaa

SEQ ID NO: 28155 - DNA, 828 bp, Heterodera glycines
acggagttggctgggacggagttggcgggacggagttgtcctttttgtattgggacggagttggcaggacggagttggctcgggacggagttggcctgggacggagttggcctgggacggagttggcgggacggagttggctgggacggagttggcgggacggagttgacccgcttcgcgcgaaaacgaccctgaccgttttttgcagacctactaatcatcaatccttcccttcaacgcaattaattcttccttccctttgtgaaatcattcggaactcggccaaattgtgctaattgcgaaaaatgaaccgacggtaaaaggattttaaaagtcacacaaattcgtcatttatttagctaacaataaactgttttccataatttcagttggatttgcaacgacgtttggatggacattttcccatcctttgaccgtcctcaactcggcctcaaattggcacttctttcgccacgtttcaatgcgttggtggacaaacatttcaatggcaaaagcgaattgactatttggagaacgatcaaaattcatcgcaaggacaaaggaccagaaacgaaactatctgtgcggatggatgacaaatttgtggaatttccgttgccggaccgtccgttgcccagcaaaatccgttttaagcaccttcggattatgtaattgaaaatcatagctatggcaataaaagctttccttccattttcaggcacatcgatcactccgtcatcgcttttcttcgttcaaatcaccaaattttcgacaaaagaggcaccaatttagacttgtggattccatcatcttgcaccacggatgttt

SEQ ID NO: 28156 - DNA, 1729 bp, Heterodera glycines
atattttatttaatctgtttttttcaaaatactttaatattttataaaaatagtttattattgctcagaaaaagagatagccaattttctggcatattttttattactacataaacttaattgcattatttaaaataactggtatgactgaaactaataatcaacaattacttgaaatttacttataataatgaaattaacaaatattatctttaaattctttacaattaatatgatattatagaaaaatgaattttaaaaaataataattaaaaaaagtaagattaatttttataattaaaaatgaaaaaaatctatttaattaagtccattcatttggattctgatagatactagaaatcaagcagaaatagagaaaaacaacctatttttaggttaataagtagccgcaattatagtttttaaaatttattttatctaaaaaatgaaagaaaagaatttattgctgttgccaaaaaagcactactactaatctactaatcaatataggaattaaaataattggaaattattcgaaaaagaaaaataaataaaataacaacacttaatttaaaaattaataaaaggtcaataataattaattaatgcaaatgataacattgcaagcatatatgcgaacgattaatcagttacctgtacaagagaattatttaattgttaaattaataattaaaaattaaaatgattaaaaaatgatccaaattgttcaataaaaaacgagttgtctaaatacgagtcgatatcggctaaaaatttgaatttgaatatttttgataacacatcccaaataaaagttaaatggtgatttcttgccattaattacagaaatattcggacaaactaattttatactttttataatttatattttgtcttttttatgaaataaattttttttacatcttttaaattttttaatcagtctcactcgaacttcaacaaacttatccatttttagtaataaaaattcccagttcctgccttttcttttaaaaattatccaaaattcagtatattttaaagcgtgatcttaataatttagcaatttttttgaattcgtaataaacataatattgtagacaaatattgaatgatttaatatactattatatataaccaaatcaaaaattcatccaacaacacactcaaaaaatttcagcaattaattgtaaaatataaaataaatataaaattaattgacttaatatacaaaataaatgagaaataaaatagctaataattgaatcaagaaataaataatcaaattttaattactgattacagtttaaggtttaagtcacctatctgcacatttttaaattttattgttattcaaaaatcgaaaaaaccaatctaaaaaataatttacttttaaaaaataaattaaaaatgaataaaaaaaaatttaatgtaacaattggaagtttgtaacaataaagagatttattataatgaataaataattgtattaatcacataattattttttgatattaattttctttattaagatataaaaacttatttaattgctgttgatttcaaactaatcaaaagtctagcagatatgaataggaatttatgtatggataaaaataaaatatggtaacaaaaaaaaattggacactttgtggcagcgcccgaaaaacattcaaaatttattttttaagacataaaaatatttattttataacaccaatgtttatca

SEQ ID NO: 28157 - DNA, 1371 bp, Heterodera glycines
  unsure (1)..(1371): unsure at all n locations
ttccaagttcctgcaatagaaaattgggaaaattagacatgcacaaattgaaaacgaccacaaatcccagtgtgtaaatacaggcgatgggtccggtagtggcaaagccgggagtctggattgtaatctttttgcacaatccgggaccgagacctgaaaaaagccgggttttcacgcctcgagccggtgacgctcaactctagccaaaactgatgaatggtaaatattaaaacaataattttataaattattcttcattatactcgaaaaatgaaatgatttttattaataaaaataaaatttatattttaaaggcttggaaaacaataacaataataaaatataaaatagaatccattccgccaaaaccatacaaaaatcataagtatcagtaacaacacgaaaaaaaatatacaaaagtaaagcagttttaatcgtgagaaactcatatttttcttttattatttacaaaatgtttaaaaataaaatagcgtaaaggtaaagaagaatattgttggggtccaacagggggaattccgacctaatgcagctttggggattaataatggggtcagaaatacgatttttggaaatatcgggaatgcaaaagatcaaaggagaaaagagtcgaagtggcacggaggaattcgaagtccaaatgttgtgttgaatgtgatcgtatatacgcatttccccaaaaccattttatttattgattctatctaattttattacatttttattttttatttttggttttaatctaatttttaacaagtatttgtcaaatttcctgaaaatataatgatttaaatctttttgcgcctgcaatagcaaatcatgctttgatctggttaaggaaactgatacattcttgtcgaatgacaactttcgtaattctaaaaaaaacaattttttgagaaataatttttaattttttcttctggtgttaactgaataaaaaatgtttattaattttaaagtgtctatttttattcgaatctttatcaataattaaaaagcttacattcatttaatttgttttgcaattttatttttgtaaaactggcgaaaagaatattaatcattttcctgaagatgacttctctcggtatgtttggggcggtcccttcccgcttttggctgaaactatttacgccttacacttattttgttttttaaaaaaataaacatttttaaagattatacttacatcattnctccattatttctcataaacttaacatatttcttttatatactttcatttttatttatttttnaaatttttatcacattaacttatttatttattttttcttctaaatcttaatatntaaaaataaatattcatattaaattcactaatat

SEQ ID NO: 28158 - DNA, 904 bp, Heterodera glycines
  unsure (1)..(904): unsure at all n locations
ctctattagcctgccaaaagcggatagatttgcaagcctgtaaaaaattttattaagaaaaaacttcaaaaatttcgacttttcgaaattttcatgtataacttttttggtaattgtctaatcgggaagcaatcgcttagaaaaagcttctaaacatgttaagctttcgaatgatatcaacaatgatggatttggattacatagaaaaaagttatagccaaaaacatgctggcgccgaaacgccagcgccgaaacgccggcgccgaaacgccggcgccgaaacgcagtggacctatattaaaggaaaaaatttcaaacaacaaacacctagatttttatttttagaaccaaaccctaaaaaaatttgaaaaaaaaactattttaatttgggcatttttcccaaaatttaaaaaatgcaataaaacgaaaaaaacacctctaagaatcgatccaaaaatttctgaaaaaaaagaaatgaaaaaatttctcaaaaatgcatctccaaaatatatttatttattttcttgacaatattttggagtttttttagaacctaaaattccatctctagtaatgaaacgccaaaattgccgaattagaatttaaaaaataataataattggaatttgaaatttttgggacagttgcttacatttttaaattcaatttgtatcaaaattctttaatgaataaaaaacagcagcagaaaaaaggcatttctcattatattcaattattttagctataaaaatataaatttcggtttttttatggccataaggcccaactcttagcagttaaaaaatggaacttacattgagcaattattttcattataataaatggaaaaaagaaattgcttgtttgatttttcgtggctanagaaagagaaagacaaacaaca

SEQ ID NO: 28159 - DNA, 917 bp, Heterodera glycines
tgcattcttcggcaacttgaccacctggaagaagctgcgtgcagggtacgtgtccgcggtgaagaagttcttgaacgtttcgttgacgtcctggaagtcgctcatgttggccaccatgatgttgcagttgataactggaaaggggcggaaatcaacgatgatggttatgccgaattttgctcacacaccgtgtttgaaggatgagccggcgtatgtcagaagctctccgatgttggtcatcgcctgcttcgcctcggctcgcgctcctcccgacaccacatccgtctttcctggcatcatcccggtctggccgctcacgtacagcgtctggttgttgacgagcactgcctgactgcagaaaagcaaataaagttgtgctttctcaattgtcatccattgtttgctccacctgtagcccgtcgcagcaggcgccttggacgtcgcgatgatacgaatggacggagcagcagccatttggggaatggtggtcgtttcagaaattaggacgttggaagtttgttcgctgaaattgttaattaaaaaatattgctactttaatgaagtgcaaaatgatagtcgacaaatgaaaatggttgcatatttatacagagagaaaaatcgaaatgtcaaaatcgaaggaagttcaaatttcaccgaacactttttgaaaatttgtttgtgcacgtttgaaatattcactcagttgtaaaaaattttccacagttgggattttcttgaaatttttcataaagtaatttttcggccgtctctatcgaacttttgttttctgaaaatttcttttctaactcgagatcggctcttccgtttttacaagggaaaatctcggcaaaatttttaattagtggggttttttggcgttttgtccttaggcaatttttgtcaaaatgatgatatat

SEQ ID NO: 28160 - DNA, 1751 bp, Heterodera glycines
taaatcttaaaatagggttgtacttttgccgtttttccctttcgtcattatttttgcccgattttggctgttttaaaacttttttgataagaagataaggaacaaacaataaatccgaatggtcggttttagattttcaaaaaataaattctcattttttagaaaaaaatgaaaattactcaacatttttttttatccaatgatttttttgaattccatttagaaatatgaattttatctcttttttatttaaataatttatgtattaatgttttctgcatcggtttcaattatttctatagaaaaaaattaaaagctttataaaatttttaaaattacataaaacatataataataatttttttcctatttagacattacttttaaatttatgaaattttaattgagattacctcaattagtttgtattgatgttggaatgtgcactttgccacaacaaattgatgaataattgggctgaaaatccattcaccaactgttgtcatatttttgtccaagtataatgcggcagattttgatgccaaattagcggtctcatattttgtgaacaatgagatgttcaaatattggcagatttgatccgtcattgtttaataataatttgaaaattaaatatttaaataagaatttgagctatcctttttaaatcacaaaaaacatttagactattggttaaacctccagtctttcatcgatttatcctttttcccgacgacgccttaaagcacctacgacatcttctattcagcaaaaaaaatttggaaaaataaagtggcgaaaacagatctcaccaaaattggaattctagaaaactttacaatttatctatttttgatataaaaaaaaattagaaaaataattaatttcgaataattgttgaattgttaaaattgagatagatatttgttttttgttttctaacattcatgcaaacgattttatataatatgaaattaaattcatagaaaaggatgaaagagggaacaaatgtcaaaatagagataattagtcatagaggttttagtgtttttaaacattgttttttgaattcaaaattttcgaaagaatcgtttttagtaggggtaaattttcagaaaattcaaaattcgcaaaaaccttaaaatatgtaaaaatgaaaatatcacgatgataatattttaagtcgtaattttccctaaagttgttaaatggaaatatttattgtacacggaaaacttcacacacacgcagctaattaaaacgaatacaaaaaaaaagagagagagcgatgttcaaaatttagtagtaattagaaagaatggaatgttattcaccaaaaacataaaatacaataaatacacaaaataattaaaacacgaaagacatttacgatctctgacgcttaggatattattgcgttttggttaagaattttagacaagttttgcgagttctgtgcttttttattattttttaaaatatttttaatgcagttttgattatgagttttgagacaaaataggcatttgggcgtaatgaccggggcggagtcgttatttaaaaaaacatcataaagggcgttatttaaaaaaccatcattatgaaaatttttgtcgaaaaattatttataattttgctccaaaacaacaaaatttttaatgatggtttttaaataatgacatagcacctaatgaccctccccccccaccccaaaaaaggcaaaatcgggattataaaagtcatccaaagaa

SEQ ID NO: 28161 - DNA, 1140 bp, Heterodera glycines
gtattcctccccgagttgttttttggtcaacgctgggcggcggacagacgggccaggttttttgagacggagtcgagcaccctcgcgtttccatcctccgagtgccacgtgttgttgtgtgggtgtcggcatgaccaccttgagcgggcgtggagttgttcgctgcgggtcgtaccggccgagtcgaaagacggcggttggttcggcctcaacttcaagatggtccaagattttggtggtggcttccctgtcttcctgaacacgctccgatgggcgaacggcattgctttctgggaggccaatgaacaccagtgtacgttggcgttcttgctctgcgagtgcggcagtgattgggtccaatgccggtgccattgagcgtttggcgcgaggcggagtgatgtttgttgcgttggttcgcttcatgtcgaataattagaaaggaatatttgttttttgcgatcttatttggacaattaattgtcttaattggactatcactagtcaattacctctcttaggcatagtgcccattaaaatttaaataaattaattctaacaaaatcctttaatgagtttcacacagaatcacagcgccctgaaattgttgttttagggaacattttgaatttgaaaagtatttccaagaagatttgttgaattttgtcaaagtcatttcagttgaatacgacgcacacaaaagtaattaattatgtaaattattaaaaaaaattagagctcgacatattgaaaaatgcttggacctctggatccggaccagggatggcatggaatccaatttccgattccgacattttggggtcggaatttcgatttgcctggatccaggaaaaacccgtaccttgatcctcatgtccagatcgagctcgagctctaattaaaattaataaacaatcataaaaaaaattttggctcttattcagtttgtcccccataaaattttttttttaatttctaagtaaaaaagtcaaaatataggttttcggggtcgctgatcacgaatccgacatccatttcgaaccccgaacccaaattcgaacaaaaagtcaaaaactcaattttcaacaaaattcacatttattgctcaaaatcgattcaaatgcacgatattgccgaatgttg

SEQ ID NO: 28162 - DNA, 1571 bp, Heterodera glycines
ggaaaaaaattgtgccaaattttttcgtcttgaatgcaatttactgcccagttttaaccggttggttcccaaaaaaatatttgaaaatttgagccacatttgttgcgggatttttgttcacctatcaaaaatcggagtaatttagagctcgacaatgcgaaatacataaattccggtattcagtacaaaagcccttgaattcgggtccagccgattgcgagaggggggggggcagcggcgagcagacattcttttttgcttttcataaccctttttgcgggatgagctttttgaaacaatcgtataaatttttgtttaaaaacttaagttttgtagtttgtaagtatcaaattcttagacttattgtaaatgttgaccgatttccaatttcttaacaggaaccggcggggggggaaatggcgagggggaaacgtagtgcacccgaaaattacaccggacagaaaatttttgagtcggagcaacaaaaaatttttttaaataaactcttcgggtgtaccccctggcacgggaattgaatcaatttcttgccaacaaaaaaaacaaccactgaaaccataaacgcacttgagcattgtgtgtttgttgtgcggtgtgctgtggtacattggccgtgcctttgccatgccaccaaatgccgttttccgctgcttttgctgttgttgttgggccggcggtgggtgaaggtcatcatgtttaaagttcggcacattgagttgctgcagcggcgaccgtttttgtcggtttgttactgcgtccaggcgttgttgcggtggtccatcaaaatcgacgtgtttaaagtccggcacgttgaggggctaaaaattgcgacataaaaatggcgtattaaaaacgaaaaaatgatatacctaattggagaccggaaataggacaaaatcacagaattgcgagtcagttatccgaaaattcggttgttttttttttgttgtttttgtcaaatccagtctccatggcattacagaaattacagaaacaatggctacaaataatggaagggtagccaaaggtttcgttcttcaccattccaacctaaagcgaaaaactcaagaattttttttttaattttttttttttgtaattccggcaatgcgagtttttttaaatgtaaaaaattaccgccatcagtgaagcaatggtggcgccgcttgacccagttgttgttgtggttgtacgtggcgttgtttttggcgcctcacgacttgcaatggacaacgccgaggacagcgacgacggcaccggcgtcgaatgggtgtgccgatggtcaacaatgctactcgtgttactgtcatcaccgccaccaccaatggcaccacggccaccaccatcattgctaatggatggcgagttgttgttgctgttcaacagaatttgctgataggacagttggaccggcaagtcgtcgtcgtcgtcttccgcgccgccgccgttgttgccccccattccctgacgcatgaacggctcatgggcaggcaagtggagtgactggaacaaatttggggacaatatcagcaaaattgtgcggcattgactgt

SEQ ID NO: 28163 - DNA, 1346 bp, Heterodera glycines
  unsure (1)..(1346): unsure at all n locations
aaattaatattatgagaacgaaagttttccgaaaatacccccacgtggaagggttaggggatgggtaccaatatggatacttacttacaggctaataaaaagcccgtaaaacccgtatcgctcgaaaagagtacgggttactggcccgtaaaaatccgtatgcggatccgacccatattcgatctctatttaatatacaatatattatcataaataacaatttgcttttaattaagattatttgagaatcgaaattttcgagacgaaagaaccgaggactgtccttgagagtcaatgacagaaaatcccattcccgtctctttctactctcaaaaagctcgagattaagccgaccctttcaatcccggctgagcgtatcccactcaccaattgattcatttgcaacgcattttgtgctccggctccgccaaatccgaattgttgcagcaattgttgggccgttgcgccgccggtggcaccagcggaggccgacttttccaattgagaagcaattgcgagcgcatcattttgtgccctgaattaattattaaaaaattgctaaaaacaatattatactatattttaggactcaacgatttattctgaacatgggaaaaatgtaaaaagtttaatgttgttttttttgtaaatttatttttcttgaaaatttctttaatttaatttaaattaaattaaatttattttactgaattttttgagacgagatttcggatctgttgtaattaaataatttggtaaaaatggaaaaatcttagtgatttgcgtttttaaattttccaaatttatttttctagaaaattcctttaaatttttatttattttataatgaatttttttgtgacgagatttcggatacaatatttaaataatttttgattttttaaaagttttttaaaattttttctcttttcggcacacctcacaccgctgctgttattgctaattatctctaattgctgcggcgtttgtggtggtggcggttcgccttcgtcttctccaacaattccccagccgccaccaccgctattattactattagtgttaatttcattgttgccattgccaatattactgctgttattcccatttgctcctgatcctccttcaaattcattttgtctttttcccttctgttgtgcatttcccacactatttccctctccttttcctccactaccactctctttgtttgctgtgctatttcgtccagtgatttttctaacatttttcttttccaccatttcttcttcatttcccgcactattttgttgtctattttgctgctgttggagttgttgtcctgtggtggcacaantttgtcagac

SEQ ID NO: 28164 - DNA, 1405 bp, Heterodera glycines
tgtatgtctactgcttcactatgggtcacgcccagtgttagacaaaattgctcataacgccaaatagcgcatttggcgtaaattatttcgcgctaattcaaatttacgctgatcactgccattttgattgtttattttgatcagccgtaactttcttcatttccaactaaattgaataaaatttgtatctaaaaattgtttttgaaaaggagagtctttttctaagcgaatgctaagcaatttaactcgtttcaaaacatcaaatttttcgaaatattaatgtgaaaaaaattgaggtgaaaatgtggtcaaaaatctgggtatttgtcgttttctttgttgttctcaacgcctcggtcgtgcagtgcattcaacatcgtcgtgtgcttcaccagtttctcaacgatcttctcttgtgtgccgagatgagagtagcggcctacctaaaattaaaaattcaatgataaagaaaaattgaaacaccaaattgttgcacattctgtgcatgtgttccattccttgttcactgatcagcccccaccaaagatgagagcgcgcaaaagggacgacatgggcactgagaaggtgaagcttcggacggacggggtacgcgaggcgtcaagtgatcggagttgctgccagtggcagtagaacattttggtccaatgttcaagcgaatcgagatcctctgggtgaagaattttggcacgcgataggcggtaaatgtggcggaggtcattcatggcgtccatcagccaaaatttcaatggcccgggtggaattggtgccgtgaatgaagcgaagttttcgtggtcaaggattttgtagatgtcgccacctgtcaaaagttggccgcctcaataacccccacctcatccccatcattctacccgtgaattgttttgtccgagggtgccgtcgcactccgacatcagacagtcgtttccgaacaacgtccccctttccacgagcatccgcttccgaacaaatggcgtcaataacgcgctgaccattgcctgaaaattcttggcccatcgggcgtgtgtcgccttggccattttggttcgtcgctcctctcgcttgttccagcgcttttttacagattctccgccgattagcttacttaataattttctttctgccatgaatacttaaagaatctatatttttatttattagcacaaaaaaactttctaattcgacctattttaatattgacttgacctattaaccgatgcagaatttttttctctatcggtatgcaaaatttggtgcaacttgtatgcatagaaaacaagttatatggagagaagtaaatgttgttttttacatcattaaaatgaagagatagtacgccaaagtgagagaaattataaagaaaaagagaaacgacgagatagtacta

SEQ ID NO: 28165 - DNA, 1595 bp, Heterodera glycines
ttttcgataaagaatattatcgttgacatacataaattaatttagctttttaaaattaattaaaaacaatttcttcaaatattttctaccaccaaatctgaatgtccaccgctgtcgaagcgtgccaaaagaatacggagaatgaatgccgaactcactttatggcttcatttggcattttcagaggattttatcgggccccggggatgagaaggattcgcaattgagcgaattgggaggataaattgcctaaaaattaatttgaccatttcaaatggctcactcaaagtgttcagcaacatttaccgccgctctctttttaaatgcgctttttccgacccgcggtctttagccttgccgagaatttggccagccaatttagccataaaacatctgcccaaatgtcggctgaatgaatgggcgggtcccacggcagatgaaagatgaaagtgagggaaagtgacagcgaatgaaatgccaaatttatatcaaattaattcataagaaataaaaatatattaccacgaaaatgccatttcatcggccgaagggaacaaatttagcgctaattatgctaattgataaattattcatgctccaacactaattgattgtcaggggaagcaccgaaaagggaaggcaaattaattaattttctgctgacgtgtcgccaatttctcaaaactcgggagccaaagaatgaaaacgaagagagggccaagaatagaagcatcaaaggcaattaattaattggccaatcagatgattatgcataagctaaaggcaagaaacaatggtgaaagaagcagaaaagcgattggatgactcaaaaaaaggacaaaaatggacaaaaatcggataaatgccatttttggaaaacgaattggaggattatttgaataaattattatttttttctatgaaacgctaaacaaaacttctacattaatatttgattaattaattgttcgattgacccaaaacagcctttaaatgaaagcataaatttttatctttatttttgagaaaaatcggatgaaaaaataaaatgatgccaattttcgatttttggccatgatgagcctttaggggaaaagcaattcggtacaatattttggataaaatgagaattactataattagaatgtacaaaatgcaattgatttgaccatcttccgtcagttttggccccctttccgctcatttcagcggaatgttctcccattgttctccgctctctgtggtctccgcttttgctgctccgtccccactttcgctgttgctgctgctgttgttgaacttcttgcgcttttccttctcctccgccatggcattgtgcaaagagaatttgctgagtgttttcagtgtactaaacgcaacaaaaaatcattcttcgcaagaaaagcataattagtgtctccactttgagtctattagccgaaaatgttaacttttggcgaatcttagcttcccaggttcagacctttatgcattgtttgggtttaactaaaagtccctcgagcccaccaatcacttttttcgcgccttttaattatcattttaattatttagtttgattatatgtgatgtcataa

SEQ ID NO: 28166 - DNA, 582 bp, Heterodera glycines
ttccaaaatcacgcattttccatctgatcattggacctcagtaaaaatcgcaaataaaagggagtcatgtggaaaatgaaggaaaatgaatcggaatatcggcggagttgtttatcattgcaaaaatgggaggagaaggggggggggggaaacacgttgagaaatggtaaataaaagtcgaggaagtcgtcgggactcactcttggccattcattcgctccctattcccctttttgaatttcaataaattattttccaattttttttctaaattttgctgaaatgtcggccaaatacttgcgcagaatgcccccctccctttcgcttcttttggccctttcgatggccttttgcctaatcactttggtactgaaatgccccgatgaagaatgcgtaatttttaattatgccaattaattaattaattaaatttaattgttagaaaaacaatttgagggaaatcatttgtaagttaattaatgcaatatgatgtgatgagaacaattattaaatgcccttcttttgttagcatttccaatggacggcgacgaaacaaacggaacaaattcatcggaagcaatg

SEQ ID NO: 28167 - DNA, 905 bp, Heterodera glycines
tactgaaaggaagagaaataacctattttaaatattatctagtcagttcatttaaataatttttatccaaaaaatttttttttgggttttcggggcagtccccctgaaccgatgcgcccagatttatggggagaccgaatccttccggaatagcttcactatagcctgtactttaattcttcgttggatttttgctccccataattgtttgagtaccccaaacggacacttgaaaaaatcgatttatttttgttttcggggcagtccccccgaaccgatgcgcccagatttatggggagaccgaatccttcgggaatagcttccctatagcctgtactttaattctgcgttggatttttgctccccataattgtttgagtaccccaaacggacacttgaaaaaatcgatttttttgttttcggggcagtccccccgaaccgatgcgcccagatttatggggagaccgaatccttcgggaatagcttccctatagcctgtactttaattctgcgttggatttttgctccccataattgtttgagtaccccaaacggacacttgaaaaaatcgatttttttgttttcggggcagtccccccgagccgatgcgcccagatttatggggagaccgaatccttccggaatagcttccctatagcctgtactttaattctgcgttggatttttgctccccataattgtttgagtaccccaaacggacacttgaaaaaatcgatttttttgttttcggggcagtccccccgaaccgatgcgcccagatttatggggagaccgaatccttccggaatagcttccctatagcctgtactttattctgcgttggattttgctccccataaatgtttgagtaccccaacggacacttgaaaaatcgatttttttgt

SEQ ID NO: 28168 - DNA, 2117 bp, Heterodera glycines
  unsure (1)..(2117): unsure at all n locations
tttttgttttcgggggcagtccccccgaaccngatgcgcccagatttatggggagaccgaatccttcgggaatagcttccctatagcctgtactttaattctgcgttggatttttgctccccataattgtttgagtaccccaaacggacacttgaaaaaatcgatttttttgttttcggggcagtccccccgaaccgatgacgcccagatttatggggagaccgaatccttcgggaatagcttccctatagcctgtactttaattctgcgttggatttttgctccccataattgtttgagtaccccaaacggacacttgaaaaaatcgatttttttgttttcggggcagtccccccgaaccgatgcgcccagatttatggggagaccgaatccttcgggaatagcttccctatagcctgtactttaattctgcgttggatttttgctccccataattgtttgagtaccccaaacggacacttgaaaaaatcgatttttttgttttcggggcagtccccccgaaccgatgcgcccagatttatggggagaccgaatccttcgggaatagcttccctatagcctgtactttaattctgcgttggatttttgctccccataattgtttgagtaccccaaacggacacttgaaaaaatcgatttttttatttcataaatatttttttagaaagtgctctaaagcgcaccaaattttatttacaagttaattttagcactcggatgctttagtatcaaaaaggaagatgaataaaatttttaattgctttttaaacatgccaaaaagtttaggcttaaattaaaaaaattttcttcggttctagctctttcaataagcaataaaatcgtaccaaattttataggcatactccccggtacatgactaacttaacctgaaaactttcaacgcttattgcttttaaaaaatttttcgaaattttgagttttccattattttaaattcctaaatattttttcagaattttattgtcataatattaatgaacttaatgcatgcatatattctggaatggttcatgatttgagaatcatatatttttttttctttagaacccactaaatttcatggaaaatattttttttgattggtggccaaatttcaccgaaaaaatctcataaatacaattttccgaatttttggcactttctttttatcccattttttggatttcatttcttttccattatttcgcttctccaaatttggctttccatctttgaatgtttcgtattggaacttctatcatttcagcaatttctttgtcactaatttttggattttccatttttatttgccaataaattttcattttttcaattttttctttcttagttcttttttctatgttaatgccaaattgtttcttccatttcttaattgtgtcataatagccaactcaaattttcttacaaatttcggcataatttttctcccattcttttcttgaatattttcttcctttttgcttgattttctcttcattttgtttttcttcttctttttcttcccatttttctccaaatatttcgtcaaatgattactgttgtaatttttcatttgctgattcaatggcatattcgtgaaattaaaggcaaaaatttatacagttttgaccatcttttacaaatttttatgaaataaagtaaatttggttatatttttaaaatatttgtggtttgtttagtggttagtgcttcaacattaacaaactttttgttattagttcgacatcggttgacgttttcttttgattttttttttccaaataatacagggtttttctatgttgttattataagaaatgttctggtttaggggtagtaccttattttcatctaaaacagggaaattgctaagaaatttggctaatttctaacaaaattcatatagttctaaaaatttccgcttgccgcgccaatcgggacccaccggacctctcccctcgcacatcaccaagttttttggaaatgggccgcaaaaaagttaaaaatctgattaatggaccccgaatgaactgtaatttatgaaaaaataataataaaaaaaatttttaatttgttaattcctaaaaaaaaaaaaa

SEQ ID NO: 28169 - DNA, 770 bp, Heterodera glycines
taaaaaaagtcatatcaaaaaacagttgacatgagcacccccccggggtcgagagtggagtcccagtagggaatgacgcctaactcttaagatgaattacttaattagttcattaaaatgagggatgggacggaagtgccatcgaagcaccgaccgaccgacccggcacttcgctgtgcatcgctgcttcaaattgccgcagaaactcgcgatgccagggcagaaatgcgggacctgtctgagtggtgacaataacacagcggacagagggccaaacgaaagaaaaacggaccccaatgggccgcgggggcactgtttgggtagtggaggctgaaaatggacggtaggcttcatcctactgtaagttgttactgtactcacagaatatgcaaatcccaaatggaaatgttgtccacgcgcttctccttcagcatgttcagtgcgttgtgcagatgcgctcgttcgctgtcgttcatcattcggtattccttccgcacaaattttttcccctgcgggcttttccgcgtcttttcgcctttggcgccgccccgctccaattggcgcttccttcgcatctgccaatgccatggattttgatcagagtgccttagctgatcagtttgacatttcatgccattcttccatcgttccccccccccgtgccatcgatttccaatcactttttgttctcttttgtctttgatcagtcttcccattttctgatcatttgattcattccaattctccattcctctctccctcttcttcac

SEQ ID NO: 28170 - DNA, 719 bp, Heterodera glycines
  unsure (1)..(719): unsure at all n locations
tgcaggnntcgtttgngaataacaaattaaaatataattttccaatttctttttctttttgagtcgtcgcaaccggcacaaatttcgtcccaattcgcttttgcttttgggcccaaattgtgcctgcgtttggcgtctcttggcgcaatgctttctattgggcttgaccgtttgtttagcgttgtcacccctttttggtcaggaattgacttattaactgttcatcaattaataaattaattgagactaattagacaattgcatttgggcaattaattaattggctaattacatttcatttcaaggtaatagtttagatggtacccccccccccttttttaaaaatttttttcaactttcaaaaaatcataaaaacatgtttctaggggttttcggggtcgctgatcacgaatccgacatccatttcgaccgattccgaacccctgacccggattcgaacaaaataaaaaaattgattttttaacaaaattcacatttattgctaaaaatcgattcaaatgcacgaaaaagaaaataatcaatgttcgcatggataaaactcagagacatgcaaccaaaaattgtaaaacgcattttcacggtctccaaaacgctgacgccaaataataaaaatactaaaaacccttggaccgttacgctttacaatttttataatatttttgaaaatatggctgcgttagaagaacttcgcaatttta

SEQ ID NO: 28171 - DNA, 1170 bp, Heterodera glycines
ccaccggatcagcaaatgccatggagtcacgctgagaggccaatggcatttggacgtccacctgaagaggaacaaaaaaaaacattgaaatcagttttatacatttaaaaattcaaggaaaaattaaatttttaagatgatttccaaaatttctttttagttttatggtgtttttaaataaatttatgttttataagaggattaattttctttgccagggcctgtatccagcaacaaaatttcgggagtgcctttggccattttgggactaaattttgtaacaaaaaaaaaggtgtaggtacggttaggcgccgccgggaagagttagggtctagtctaatctgttaagaatttttaattttcatttcggggaggggaggggacgtgcccccactggataatacggcaattgttaagattattggtggacccacaaaaaaatgaaaaacccaaaaaaaaaaacacattttaggggttatttgttgcgctgagcacgaatatgacatccatttcgaccaatgtcgaaccaggactcgaattcgaacaaaaagtcgataattcaaattttcgatttcgcacttttattttaaaattgattaaaactaacagaaaataaagcacaggcaattttaacagcaaaaatgagtcatctatgcagattcgaacatacctagaagtaaaattcaaaaatgtaaattttcaactttgttcgaattctggtccggagttcgaaattggtcgaaatgggtatatcttattcgtgaccagcgatcttgaaaacctacggaaaggcttttatttacatgatttaaaaaaaaaattatttttaaataaaaaataattttaaaaaattattcgaatccgggtttggggttcgaaacaaaatcaaacgtagatcatattcgtgctcagcgcatcaaataacccctaaaaatgtgtttttttttggatttttattatgaccaataatcttaacaattgccctggctttgaaattccattaaataaaattcgctagattttttttttgttttttttcaaattgaaaaatctttaaaaaaataataaatgacgtgccaacgggtggaagccggtgtgcaaatgggaacgaccactttcgttggccaacagcaccaaccgacggtccaatgccatgtcaatgccccagga

SEQ ID NO: 28172 - DNA, 589 bp, Heterodera glycines
tgaacgtatacggcagtgtggctaccacaaggcacgaatccatcaatttacggtgaagaatttgattgcaacagctgatgtgggattccacgtacgacttgggccgctctctgattttctcggcgccaaatgttgctccttcacacccgaactattccccggtctcgtgtacaggaataaaaagcctaaattgtcggtcatggtgttctccagtgggaagcttaaccttacgggatctcgatcaaaggaagagatagacaatgtcttcaaacacatttatacgattatatgcaatttcaaacatgatcacaaatatttgtagaaattttcatcatttacatcaataaatttgttgctattgtcacttaagttctcacgaactgaagggatgggtttagggaaactctgcactaaataaatgggatcatcgtccctcattttcacaagttctagagggtagaatcgttcattccccgtttttgtgcttctctatcacgcaagggttagtggcgtaccgcaaacagatgcgatgacgtacataaaaatgctggtctacggtcacattcttgaacccgttgtacgccatttg

SEQ ID NO: 28173 - DNA, 932 bp, Heterodera glycines
tgccgaactcacaaagttataggagtgaaatgtgatatatttgttttcaccacaaggcattttttctgaaaaccggattcaaaatctggggtttggtataaccgttttagaaatagcgtagaaaacagcttcgatatcaagaaaccaagtcaagtccagaaaggaatattttaaaacgatttcgttttgttttggcattatgataccgaataactttcggaaattatggaaacaaaattggagaaattcgaataattttttgactgcaaatttttttccttttttgaattgggttcaaaaaaattttaagagaatttttgattattattttgaagtcttgaatttatttgacaaatccaagacttaaaactgggagaagcaaggggctgtggctgggggcctaaaatttgggccacattggagaattaattctgatttctgaaaaagtcccagaaataactattttttctttccataccttcttgtagagctcgagctgctctttccaatggtcttatcccggtctcgatccgtgccgaactcacaaagttatggagtgaaatgtgaaatattgttttcaccacaaggcattttttctgaaaaccggattcaaaaatctggggtttggtataaccgttttagaaatagcgtagaaaacagcttcgatatcaagaaaccaagtcaagtccagaaaggaatattttaaaacgatttcgttttgttttggcattatgataccgaataactttcggaaattatggaaacaaaattggagaaattcgaataattttttgactgcaaatttttttccttttttgaattgggttcaaaaaaattttaagagaatttttgattattattttgaagtcttgaatttatttgacaaatccaagacttaagactgggagaaagcaggggctgtggctgggggc

SEQ ID NO: 28174 - DNA, 983 bp, Heterodera glycines
cccccccccccccattaaacgacataattttggcgctcttttcccccaaagtgccttccttctcctcctccttccttcacacattattacctaattaaataattttttcgtcattttttccaattaataaataatggctggtcaatccttcgctctctctgcccgaggccaccaaattcaccaaaaatattttaaatattattttaacaatttaaaatatgtattttaccaatatgttttttatattttattttgccaattgtattccgacgacaattccttctcctatttgacatggcaatataaatataacgtcatactgcgggccaggtcgttttcgcgacgtcgttttcgcgcctgcgtattcccactgtcgtattctcgaccacgattttttaattctaaaattagaatagctatactctcatatttttattaataatatcaaaccttaaaaaatctcttacattgaagaatcctgaacatcacgcttatgaccacacatgaactcacttcacgcaaaaagaaattgtaaaatgtggacgattttctgaatgataaattggtccgagtgtgtgcttctgcaaccgctccgcgactgatcgctaactaacgcgacgatttgttaattgagacaagcgctgacagagtgtcagtaacagccgcacgaattgcacgcggacgcgcataccatcacttcactttgctgttgtatgttgacattggcactgtccgacgcgcactctagacgccctttgatgatcagcggattcaaaccaatgcgagccgaagtgtccgtgcaaaatccgtcgactgtttggcacgacatttaatacaaaatgtagaaggaaatgccgaaacggtacggcacgaaaatacattttatttttcaagaagattcaaattggagtttcgaagtcttatggcacttttaaaaaatttttatcaagttcaccaaaaatgatgaatgcctctacaaaagg

SEQ ID NO: 28175 - DNA, 1566 bp, Heterodera glycines
gatgatgaagaacaagatgatgatgatgatgatgataagaaaaacccagcacgaatcgtaaaaatcaaaaaaacaatgacaacgaaaaaggtggcattgacaaaaatgcattttacacaaatgggtgacagatgtagaaaaagcattccgaaaacgtttcgatcacgaaaagaaacaatttttggatgcccttgacaacaaaattcctggccgtgattttggcaatgccaaaaaatgtgttgaagaatgggaaaacttgatatatttgatgtgaaaaatgaagcagaattgaacacaccactaacagtttataagagaatgttcttcattcattttatacaaaaatcattttgtgttttgttgatctggtaaaagtgttcacgaggatattcatttaattattttttataattagcctatccaaacctttgtcaattatattggaaatcttgagtgtcatcctaaacccaacatttttaacaagtcgataggtatgccatttcccgcaggaatgtatccaagatttttaggtgtgataatgggaggggtaccagggctgggacgcgaccgcgggaatttttggataaattgaatattaaattttaaataaatttttttgaaaacttcgattaatattctcaaaaaattcgtttcaaaattccaattttcccccgtcggagctgacaaaaacatataatttttcttttaaaaatgtttctaaattacaaaataggtcatttttttacaaaatcttttatcaaatattgcattcaaattttcaaaattttcccggcggcgcctatcgtcaccgccggacccacccccatctgttcccaaaacttttttagaaagagtgagccgaaaaacggtttgaaaaacaaagaaattataaggtttgcatgctggaacccttcgaaaatttggacactgactcgccttcccccacccccattcattcccttcccaaattttacatgcatcgggattttaatatttttttataataaggaaatgtaaaaaaatttaaaaaaatgagtgtttataaacttttgctgtttttttttttttgcgtttcaatttgacttcttccgtccgtccgcaccgcttcatcgttcgctcatcgctttctgttccttctaccgcgtcgtcccgcggcgccgcctcggccctccgcacgacgacactcctccggaatgtgatccttccgctttgcttcttctcctgccaattcaatttcaaatttcccttccatgagaatatggaccaattgcgctatttttcgacgattatttgagcttttaaatcttttttaacatttatctgaacattttctgagaaaaattttaggtgccagaaattttggcatcagtgaaaaattaaagaaaattaaagtgaaacattcaatttgccaaagcatgcgaaaacaaaacgtaaagcaagcataattaatccaaactatgttgttttttaatttattatgcatcaaattgtacaaaatttatccgtttttaaatcaaaaataggattatggaatttcccgactaatttttcatttgtttaatgaaa

SEQ ID NO: 28176 - DNA, 1476 bp, Heterodera glycines
  unsure (1)..(1476): unsure at all n locations
tttacagtgtcgtagtgtattttttgtacagtctgttcgtcgagagtgaaccnccttattttcaagtcgaagcaaatttcaccattgtcttccgtgaaagtttaagcccgtagttttgcagccagcgctgatgaatcccaaaatatagtggtccggcttttcatctgtcagctctccgaggtgcccctttcctgtcgggagtgggtcattgtccacgggatgaacgtagatgatgctgtccgtgtaaaagtagagaatttcacatccgggggtgtcggccacttttttaagagcttcgtagaggtagagtcgcgccattgatgtagtgaagagggaaatgacgacatttgagtatttattttcatcgacaaactcctcctttggtttgtaggtgagcatgaatacgtcgttgtcctcatccatcatttccaagtcgattagatcaatctttttatcttctgcatactgatgaattaggctttcgtcgttgtcaattattgatttggagagaaggttccgcatggagaagcggccccagagtgaattgaggcaaagtttggcgatgtagcgcttcccaggctccgaattcatcttttctttgtcgagtttaattgcaaattttttccagcactcctcaatgtattcactcttctgctcttcgctctcgcaccatgatgggaatcctgtggcgtggatcttcagggccatcatttcacttacgtaggacttgaagacattgttactccattggtcgtattggaggacatgaaaaagtttgcgagcagtgtaaccggcttctagtgatgcatttaattcaagatgggtacaggttgatacaaaggcgcggtaaatggggttaaagtggggacaggaatagtcgttgactttgaggccattgggatattttgcggtgatgtgtttggcgcacttctcacagagagggaagagaaggcgttgatcaaattttatgggcataacagtgactttgatgttgttgtttggaggtagaagtagcactttgagaaggcctttgtaggggttgtcggatggagaacgccagttgaccgtctgctcattcactggaaaactgatgatcttagggtggccgaggggatagtctgtcgtaaagttggtaaacgggtagaggctggtgaagtccttgtagctgattttttggcctggtttcgctgtgtgcagtagcttcatttgcccagtccgtcctccatgaaaagcgtctctgatttttattggtgagcggtccttccagttgtcgaaaaactccctcattgcagtgtcattctttagttgctcatttatttcatgctcccataccacctccaagtcgacgtaacggctcagtatatcgtgtttcctcacttccctctctcttaattgtcctagcgtctttccgttcggcattttcgtttcttcgtccaagtgcctcaaaacactcctcgcacccgtgccacagacaac

SEQ ID NO: 28177 - DNA, 1030 bp, Heterodera glycines
gggtctatctttttttgtacatcagcgaataaaaaacaaatatttcagtggttttgaatttttgtgtcttaccgaaaaatagttttaggcattccactgtcctttatcggagcggtctttgtgcagtataattggtctaacttttttttgtacatcagagaataaaaacaaattccaatttcagtggttttgaatttttgtgtcttgccgaaaaatagttttaggcattccactgtcctttatcggagcggtctttgtgcagtataattggtctaactttttttgtacatcagcgaataaaaaacaaattccaatttcagtggttttgaatttttgtgtcttgccgaaaaatagttttaggcattccactgtcctttatcggagcggtctttgtgcagtatgattgggtctaactttttttgtacatcagcgaataaaaaacaaattccaatttcagtggttttgaatttttgtgtcttgccgaaaaatagttttaggcattccactgtcctttatcggagcggtctttgtgcagtataattggtctaactttttttgtacatcagcgaataaaaaacaaattccaatttcagtggttttgaatttttgtgtcttgcctgaaaaatagttttaggcattccactgtcctttatcggagcggtctttgtgcagtatgattgggtctaactttttttgtacatcagcgaataaaaaacaaacaaattccaatttcagtggttttgaatttttgtgtcttgcctaaaaatagttttaggcattccactgtcctttatcggagcggtctttgtgtgggtctaactttttttgtacatcagcgaataaaaaacaaattccaatttcattggttttgaatttttgtgtcttgccaaaaaatagttttaggcattccactgtcctttatcggagcggtctttgtgcagtatgattggtctaactttttttgtacatcaacgaaaaaaaaaccaattccaatttcagtggttttgaatttttgtgtcttgcccaaaaa

SEQ ID NO: 28178 - DNA, 880 bp, Heterodera glycines
taaagccaaaagaacacattgttacaattgttgtcccaatttccgtctttccaatgaaccgccgctgtctccccaataattttgcatcgtttcattatccaaccgatgccccattcattttccttggccaatgtcagcttttcctttgtgcattcgttcaccaattcaaatggcaccattggcattgacggcgcacgaacagaaaaatgaatttcgtaactgacggaagaaatggcattggcacgaagaaaatgctaaacaatttgagtggggtcggaattccaatttccgaaattttgggcctcattttttcgaattttatagaatatttttttcgaaggctagagttgggttcaaggggtaaaccaaaaatacgtttaatggtcttaaatggcgtataattaaaaggtataatcattttttggcgtaaaacgggccgagacctcggaggaccgggaattcccgccccggtccgtacaaccctacttttaattgttaatttctttcattattttttggtacagaactgtctatattcaatgggactcagttgtccctgtgcttaggtggctcccgttttgacatttttctttgatttttagacttaactcaccaagagctttcgaatgatactaaatttggtaatactacccgatggtaccacaacttttttgaaaaaaaaaatttttgttttcaaaagccgtgaaaacatgttccctggggtttttggggttgctgatcaccaatatgacatccatttcgactaatttcgaaccccggacccgaactcgaacaaaatttcgtaagttcaaattttgcatttttcgtctaaaaatgggtaatcacatggaaacattctgaagtggtaccatcggtagta

SEQ ID NO: 28179 - DNA, 1065 bp, Heterodera glycines
tggaaaaaaaaaatcgccaattcggggttttcagaaatcatatttaattccccaatgggggccccattttggttcctcagccacagccccatgcttctcccaattttaagtcttggatttgtcaaataaattaacgatttcgaattaataataaaaaattctattttaattttttttttgtagagggaaaaattctgaaccaaactactattttaaaacccaatcaaaactgggaaaaaaatttgaagtcaaaaaattattcgaatttctccaattttgtttccataatttccgaatgttattcggtatcataatgccaaaccaaaacgaattcgttttaaaatattcttttctggacttgacttggtttctcaatatcgaagcttttttctccgcaatttctaaaacgcttataccaaaccctagatttttggttccgatgggtttcagaaaaaatcccttgtggtgaaaacatatttcacatttcacttcataactttttgagttctgcacggatcgagaccgggataagaccattggaaagagcagctcgagctctacaagaagctatggaaagaaaaaatcgacatttcagggactttttcagaaatcatatttaattccccaatggggccccattttgggtccccagccacagccccatgcttctcccaattgtggcgaaaacaatatttcacatttcacttcataactttttgagttcggcagggattaagaccgggataaaccatggtaatataaagttcgagctttacaagaagatatggaaagaaaaaatcgactatttcagggactttttcagaaatctgggaaaccaatttggccccaaaaaattattcgaatttctcccaattttaagtccataatttccaaatactattcggtatcataatgccaaaccaaaaccgaaattccgtttaagatattcttttcctggacttgacttgggtttctcaatatcgaagcttttttttccccgcaatttcctaaaaacgcttataccaaacccctagattttttggttccaatgggtttcagaaaaaa

SEQ ID NO: 28180 - DNA, 1108 bp, Heterodera glycines
tccccactaattcaatcagttcatcgactcggatcgaagatggttcgcggcttgcgctgtctgctcgatcgtctgagctcctcttgatcattcgtcggcacattttgtggttcgtcttgcgcatcaatatccggctgattctcacagtctgtttccatctcagcttgttctgccattgacgaatttgaatcggtttcggcactttcgctgtccgtttccgtttcgttggatttaagctgatctaagtgccttttccaaattcctcttttggttctgacgagaaaaagtgatggtgaaatttggcgcacgatttcgccttccatccacttagttccgtcgcggaaattcctagcgaagattttctggccaatgtcgaatgacctttcccaagtgcctcgatcaaaattctttttgactcggtttcagtaattgtccacaactttttgcttttcctccttttcttcccttttctttgggttgaaaaccggttggaccaaatcgagttttgtccttagttctctgttgaacatcattttggccggtgattgtcctgttgccgaatgcggtgtgatccgatatttcagcagaaattggtttttcgcgagttcgttttcccaaaaggggaggaagtaggtgcgtaatcgaatttcggcactgaaaagtcgagccaagttcccatcaaaagatggtgtggtagatttatgaattcgtttgtgactgagtgctcagttcagagctaaaaacttgaagttccttcaaattttccggcgccggcattttttgaatcgcttccaccttctctggcgaagtccgaattccttgccggtcgataatgtgtcccaaataaacaatgctttcttgcatgaacgagcatttttccttttttactcgtagtcctgccttttgaagtctttggagaacggcatccaatctcttcaaatgttcagcatcgtttgcagcagtgacgacaatgtcgtccaaatacactgccactccgtcaattccacagagaatttcttccatcacctgctggaatatcgctggtgccgatgccaccccgtagggcatgcgtgaaaatcggtacagccctttatgggtgcagattgtg

SEQ ID NO: 28181 - DNA, 1379 bp, Heterodera glycines
  unsure (1)..(1379): unsure at all n locations
cagaaaatgtgtcttccatatattccctatgaccancggctccattttttaaatagctactctgaaaaacgagaaaaatttttgacctcctaactactacaaatttttacatggttttacacatttggacccaaattctctgtntaaaagaactaacataaatactcgaaataagtcatttttccggttaaatgttaaattacaatctaaaaaatcgtccaaatcttttgttaacagatcagtcaaggcctggaatgcccttgataaaacgttaatgtctagctccttaaacacctntaaaaaattattagaattgactcttgattctcaaagcaccaatgtataaagcaattattaacttttgaggcatttttttgactttgacttccattttattttttcattattgtttgttttaacctgtgatctcactcgatatttattcacttactctgagactattttattgtgatcagtcatcagagtaagtggtctccgcccttctgatggcaatttttctttatcgataaataaataaattaaaaattccggtctctagtatttagtgattaattcaatgacagacgaccgtatctagacatgatcaaattttgagtaaaacatatagtctcaaattgtacagatgaatgaacacagtgagaacccagaggctatttttgtgtgtccgcggagtttcaaaagcaaatttgggtagagcatattttagtccttactaaattgggtagtactgccgacggtaggaacatggtttaaatgattttttattgaagcactaatgactcatggaccaaaaagtaaagatttttgttcgaatttgggttcggaatgggtgcggattcgtgaccaacgatcccgaaaacccttggaaaatgtttttgaattttgaaagcaaattttttttcgaaaaagagggcataaactttactattacccatattttctgtgacttctaagttaaattttgtcaaaagaggttctaccatcagcaattttcttttttcgaaataagcaagtttttggaaatagtttgtccttttgcatgaatttgatttttttaggcgccccttaattttttggtttcttcctatatgggcgtaatcttaaaaaaccacaagagaaatcgaccctgctttgttcgcgcccttcccttgtaaggaaaatcaatgtgaatgtaaaataaatcaaaatttaacgggataactccaaaaacaacaacaattgatgatcgaacgacgatcacccagcttctcagctccgtcctgggtccgttcattcttcgggtatttctatctacggagaccagcccgtctttcgttcataccgttcttcactttcttgcggtctcttggcggttcacg

SEQ ID NO: 28182 - DNA, 1253 bp, Heterodera glycines
aggaaaaaatatatgtatttacatagaattagcagccgtaatgatgaattaaaaaatgtcaatcagaccttttttggcatttttaattcaatttttgcgcactttaaaacagttttaaatcgtttatgtttaaattcccggacaaatcgtatttctggagctaattgtatctggacaaatcgtcagaagcctaaaatttattttcttatgcattgtcgtgagaatcagtttattttcttcctgcatttcttaaaggtggtataaaacggcggaacaaatcaaaataataacaatgaaaaaaacaaaaaaaaaatgatgaaaagccaattaaaaaaataaatacaaaaatgaggacaaaacattttgagtttgaaaaatgaaaatgccgcataaataggaaggaaacgtgccaaaaatcgaagtttggcaaataaatttttaaaattttcgaggcatttttccgtcttttttaacaacaaattattatggtaaagctcggcataaaatttggtacataaaaagtggtgggtaattataataattacacattaattgtacggaaagatcagttgaacaatttgaaagaaagttttctgtgacaaatttgaatgataaaaaaacaaaaaaaatgatttaaaagtaatttttttagacagaaatttctgagaaaaatgcataaaaatttctcaattaatctcctcatctttacaaattctgctgctgaagattgaagctgcccgttgtgttgtgtttgttctgattgatttttgaaaaatgaaaataaattaagaaatgcgttaaatgaaagattttagttgagaagggaggcgacaaaacgaataacaatcaatagaattagagaaaaataaaatcaataattaaaagaaaaatcaataaatttcagtgataggacggcagtgaaattaatggacatcattatgatacataattatataaataacaataggtaattagcaattgatgggcatcttaattaagggtgattaattagacaattagtgcttttgggtatcattttgacggagaattgaacaaattaataatattaatatgcaatattatcagaaaatatgccacgagcgcaatttgctgaggtgtgtttgtgtgggtgagtgatgagtttagtggttaagcggctggcactgaaattgtgacacccgccgtcggcgacgattggcgcttccgtcgacgccggggcgctccgaaagtgttgcgcgaggtaagctgattgt

SEQ ID NO: 28183 - DNA, 1044 bp, Heterodera glycines
cggcatttttttcattaactgcaggtcggcccaatacttttgatgaagtgatttttgtattgatgctgttggattacaattggttgttgtttcatttctgaagtgttgaacctgtcggtcggccactcaactttttgctcactttcgagaaaatcactacatcaactttgagcggtgacttttgtaggtgaaaggaaaaggagagacaaaaagggaaattcgtatggctcccggtaaattggacaccgaaaattggacaccaatggaaaaatggacaccagaaaattggacactgttgtaaataaaaatgaaaataaacaaaataaattactaaacaaaaattttggtttggcctaaaagatctttatcttaatctgccatatgttgtttataagcgtaaataatatggaaatgaatttgttattatttttgtaacttcaggagaagaaaaacatcatatcattcataaagaaataagttttattactcatttttggttcattttttggcccattgatcaatcatccctcatttaacccatttattctactcaaatttattttcacctaattcttgattttttttttaaaaaggaaatcttagtgtccaattttccggtgtccaattttcctttagtgtccaaaattccggcggtgtccatttttccgcttggtgtccaattttctggtgtccaattttcttgtgtccaattttccggtgtccaatttaccggtcccccacacacacacaattaaataattttaaaataaatattaaacataaaaaaatcgttaactatggagattttaataagaattaagtaaaatacacaaaaagataaaataattaataaaacttttataaagtctacatgaaattaaaactaacaaaatataatcaaaaaaatatttaaaaatttaattgtaaaggaattttttattaatttggaaattaaatttactttattaattatcaaagcgctctgtagactactacaaaataatcagagtccgtcacaagataaaaaatataaaggaatttaaa

SEQ ID NO: 28184 - DNA, 955 bp, Heterodera glycines
tgttcgacccgtcttgaaacacggaccaaggagtttagcgtatgcgcaagtcattggggtgttcaaaacccaaaggcgcaatgaaagtgaaggcttcttacggagctgatgtgtgatccctggcactgcggtgttggggcgcaacatagtcccgtctcgatcgcatgcgatggggcggagacagagcgtatgcgctgagacccgaaagatggtgaactattcctgagcaggatgaagccagaggaaactctggtggaagtccgaagcgattctgacgtgcaaatcgatcgtctgacttgggtataggggcgaaagactaatcgaaccatctagtagctggttccctccgaagtttcccccaggatagctggagctcgttaagcagttatactcggtaaagcgaatgattagaggacttggggacgaaatgtccttaacctattctcaaactctaaatgggtatgaagccagggttgcttgactctgaacccaggcgttgaatgtttgagctccaagtgggccatttttggtaagcagaactggcgatgtgggatgaaccaaacgtggagttaaggtgccaaagtgcccgctcattagaccccataaaaggtgttggttgatatagacagcaggacggtggccatggaagtcggaatccgctaaggagtgtgtaacaactcacctgccgaatcaactagccctgaaaatggatggcgctggagcgggccacctatactccaccgtcattggcttgtacacgtgcttgtcgcgtagtctggccatgacgtgtaggagggtcgtggtggttgcgttgaaggctttgggcgtgggcccggccggagcttccaccagtgcagatcttggtggtagtagcaaatattcaagtgagatccttgaagactgaagtggagaagggtccacgtgaacagcagttgaatgtgggtcagccgatcct

SEQ ID NO: 28185 - DNA, 1410 bp, Heterodera glycines
gctttgcatggcctggcaggtcctcaacaagctttctatcggcttcccaaaaacacatatgtcattaagataaattaaaatatggtaaaattctgactttttgatagtattcatgttgcaactttttttaagttgttcaatcgcttataaatagcttatcaaaagcttctaaacagactaacccgacccacacccaagactgaaggttcagccacaaggatacagtaaataaattcaaataaaaccgtttttacggtatttgaacccccgggggttctatttttcaaccccctcaaaagggaaaaaataaaataaataataaaattaaaaataactaggttagtttaactattcattgggaccaatggaaaagaaaagtgaccaaaatggtcgagcaaattgggcagctagcgaaatggttttcaattatttcagcaccgaagtgcatgcagttaattgttatttactcttcttcaaatattttttccgtgccgacatgacaaagtgatgttttgaatttggtgaggttttcgaactttaaaatgaattgaaaaggtttcactgttttgatggagcggctctttctcagctttggtcttacgtaaaactgacaaatgagcaagaaaaaaacattcaaacaatccgttaattaaattattattattatatttttaaataaaataattaattagatttattgcatttttgtaacggttaatgcatcttttgtttgcctttttttggcgattttcttttttgcttgtataatccgatacgtttggacgattaatctatgatatatgtctacaaagtaagtggctttgtcctttttgtggacttttctttatagaataataaatacataaaagaataaaagtgcgacaaatgcacactgctgtaatcaattaagaacaacaattgggcagggaaatttactaattattactcctcgtgtctttgctgcacatcattcgggtcaaacgcggccaaatgccgcgagggttccgctggctcttcggcttctgctgcgctcgtggccaactctttgtcgaagtctgaacattgctggtaattcggtttcgactcaatattggtctcgagtcttgggtaaaatattctcaattgctttgtttactttaactttgatcaaatatcccattttattcattttgatgatcaattttccggtgctatgacgaagcgaaaaaagtatgggtgcaggcggggtgaccggaagaggcgggtcatttcactacgaaaaagttattcgaataattaatgatttaaactgataattgaataattatccaataataataaatatatttggatcaatttacacgaccacaaaaaaagacacgaatcgtgtcttcaagatgttttatacaaaagttaatggcggcattaaat

SEQ ID NO: 28186 - DNA, 2054 bp, Heterodera glycines
cccccaatttccaacagaccgtaaactcccacaacctttttcgcttggccctttcgaccaccattcggtcgaactgttcagtttcggtccctttttctccatggtgtttcagtttcctcccaatttcccacttttcccttcccttgccttaattacttggccattcattgccttttgaagtgacattaaaccaattcccccatggcattactttttccatttcttccctttttttctttcctttggcatttttcggttgcccaattttattaagttaataagtgtccgtccatcttctcatcagtccataattctttctgttcgccgctttttccaaaagtgtcccccgccatttgataattggaaaagcattttcgactttccccgtccattttaatcgctgaaacttttcataaacaaacagaagcattaaaaagcgtcaaaaagagcgaaattatttaaaagagcggaagcagctcaaagggaaaggtcagcaaataattaggcaaattaaaaggatagggtttgttttaattaaacccaataaacttgatacttcgcgcgccaaatgaacaactgataaaaaagttaagaagcctaatctgtggatattagcggaatgacaataaataatattgttgatctaaaagatttaattcgacaggctaatagagaataattaggactattggacaatactcaagaatattaaatttggttgattatgaaaaaatttttatggggcaaaaagcaattttggcccgttaaagccccctaccgttaggctttgttttttgaaatttcgaaacatttaaactttaatttgattggttcgcctttcattccgttttgacttagtttctttcacctgcactgcctcccatctccgccggatgcttttcctttaatttggccaattagtgctgcccttggccctttctcatcagctgccccgctttacccccccccccccccttccattgcttatttttgttttgaacttctttctttcccagtccaatcaattttttctgacttcctttaatgaatttcgtttgtgttctttccttagtgtttgttcattctttctttcatgatcactaattattaataattagccatacataattaataattagttaattaaggatggacgccaacgccacaaatgcgacgggtgcaatgtgtctaacggaggtgcaaatgaaaatgcatggtcggtcagtgcgtgtaaaaacagccaaatttttctgaattctgttccccctttggcacttttttcctcccgtttcgttttcatgcctttcttttttggcctctttttcgttttccgttcatttgccaaaaccaaaaggttcccatgtccaagtggaacctgcagcggtaatctggtcctgggcctggtcctctttcggattttttgggcaattccctcaatttgaaaggggcccccctaacccccaaaaatgaactcgccggggccaaaatttttccgggccaaggttgcgatttttccccaaatttgctttcccttttcctgggggagttttttcccccccaattcgccttaggaacacttcccccttttttccccttccccgtgaagaccccaaattttttttgccaaaatattttccccggttctcttttccccccccccccctttctcccccccttttttttttttttaatagcgcaaaaaagccctttttttggcggacccccccccccaacttttgtggaccctccccctttgggggccccttttttattgggggcccccccccccccccccccacatattttttttaaataaaaagaagaaacttttttatatggggggggggggaaacacccccccgcggggggtttaaaaaaaattttaaactaaaaaaaaaaaaaaaaaaaaccacaccaccccccccttttttttttttctcgccggggggcgccccccccccccccctcccccagaaaaaaaaaaaaaaaaacaccccaacaaaaaaaagaatttttttttttttttttttttttttgggggggagggggggggg

SEQ ID NO: 28187 - DNA, 1307 bp, Heterodera glycines
gtcccagtgattggaatgcaagagaattgaccagtgattgaaatgcaggagaatgagtcccggtgattggaatgcataaaaactgagtccgggtgattgaaacgcaggagaatagagtcccagtgattgaagtcctggagaattgagtcccggtgattgaaatgctggtgtcttgagtcccagtgattgaaatgcaagagaattgagtcccagtgattgaaatgcaggagaatgagtcccggtgattggaatgcataaaaactgagtccgggtgatttaaacgcaggagaatagagtcccagtgattgaagtcctggagaattgagtcccggtgattgaaatgctggtgtgttgagtcccagtgactggaatgctggagggttgagtcccagtgattgaaatgcaagagaattgagtcccagtgattgaaatgctggagggttgagtcccagtgattgaaatgcaggagaatgagtcccggtgattggaatgcaagagaattgagtcccagtgattgaaatgctggagggttgagtcccagtgattgaaatgcaggagaattgagtcccagtgattggaatgccgaaggaccaggtgaggttaggtcccagtgattggaatgcaagagaattgagtcccagtgattgaaatgcaagagaattgagtcccagtgattgaaatgctggagggttgagtcccagtgattgaaatgcaagagaattgagtcccagtgattgaaatgctggagggttgagtcccagtgattgaaatgcaggagaatgagtcccggtgattggaatgcataaaaactgagtccgggtgattgaaacgcaggagaatagagtcccagtggttggaatgcgtggttaattgagtcccagttattggaatggcgcagaattgagtcccggtgattggaatatcgcagaattgagtcccagtgattggaatggcgaaagaccaagtgaggttaagtcccagtgattggaatggaagagaattgagtcccagtggttgaaatggaagagaattgagtcccagtgattgaaatggtggagagttgagtcccagtgatgtcccagtgattgaaatgctggagggttgagtcccagtgatgtcccagtgattgaaatggtggagggttgagtcccagttattggaatggcgcagaattgagttccggtgattggaatttcgcagaattgagtctcgatgattgcgatggcgaaagaccaggtgagggtaagtcccagtgattggaatggaagagaattgaccagtgattgaaatgcaagagaatgagtccc

SEQ ID NO: 28188 - DNA, 2285 bp, Heterodera glycines
  unsure (1)..(2285): unsure at all n locations
aattttagcgttcataatgggaggtataaaggcgattgtagaaggaattggaagcgctaaaatttttgaggagctttttgagcgtaattacgatttttacttacaccattttttgctaggcttagatcacatgcgattttcggcactctgataattttagcgctcataatgggatgtataaaggcgattgtagaaggaattggaagcgttaaaattgtttgagaagctttttgagcgtaattacgatttttacttacaccattttttgctaggcttagatcacatgcgattttcggcactctgataattttagcgttcataatgggatgtataaagtcgattgtagaaggaattggatgcgctaaaattggttgagaagcttttagaccgtagttgaagttaatctttactccagtaatttttactcgtagatcacatgtgatattcgtctctcggcataatcgaatgcagaataatgtgatgcattaaggcatttttcgcagaagcattttccactgaccngattttccggttacgggcagttgtaccgtcgaaaaatcttttttgaagcagctgctgacggaaaaaatcgaaatgggtcgaaatgcgtattatattcgttatcactgatcagcgacttcgaaaacctctaaaaaacttctttttgatgagtttaaaaatttttgaatttttttacaaaaaatggggggcgaattttaacaacaatacttgtaaacaaataaccctccaaaccagagatggcacggacttccgatttgcgaaaaaatagtcagtccctttcccaaaaatgttctaaaataatgttgtaaaatgacataaaaaagatttgatgaaatcatttaataatttttcaagcaaataggtattcaaatatgtaaaccaaaacatttttgaatcaccttttacttggttaagaattttaaaattttgcccattaaaatatttttaaaaaatctttggttttgtatgttgacacagacaaaagtcggtacgattcaacaggtcacccaatccgatttttaagcatacgggtagaacagatatgcaattgacatatgaaatatacaattgaatgcaagtttatgacgaattgtttaactgatttatcttatatgtaagtatatcatgcatccatcacatcgtcgtttcatcgcattgattatgtttatttggcatcgttctacttgtctctgcttaaagtcatttcgatggcactttccgttcttcctctgggtgctgatgaaaagatcatattgggcacattttcgtgtccgtcatcatttcagcacgaattttgtgaaagaataaatctcgaagacggacaaacacaaacaagacaatgctgggcacttttaaaagtggttaaattttggaaaatgtaggaatcaatggtaaatgtgacaacaacacaaactcaccaaagtgacgaacggcacatctgtgtgatccgcttggaagttgaagcaagtccaaaagtccgtccaattgagcaccaatgtggatgaatgctcagcacatgtataccagcagaagacagaacataaggcaccgacatagaaggtgaacttaaaaaacaatacaaattaagcgacgcaatggtcaatgatttttgatacttaacgaacacatgaactaaactcattccccacgacacaaccgcattacatatcatttcatcggataaaacatcttttatggcccagactaaaatttttcgtgttttccgtccaaatccgatttttttttttgttcaattatgagtcctccgatttctatgattgtcccttaattcgagtgccatttctcagaaaaccgcctccccctcctctgcaccctacaacaaagtgtcgggactcaaattgcccaagccgacacggctgatgtacacgcgcacgtcgtagaccatttcagtgctcctctccggtggcattggctattacatgttccaaatattgcggggccgacgagcgcttacatagggaatgggtgagccatacaaaaaaacggggcctttttattcgacaaatgactctctccgaaggaagggagtcacgaattggggaataaatagatagaaaattctccaaaaaatcttgcacgcattttaccggcgtggcgaaaaacgacctgcatccgtatgaactgaaaatttgcatatgttttccatataaaatatagaacaaaggtcttttttaaccacgattatttgcgattctttttgtaaatttacaaatttaccgagagcttctttcccatgttttttt

SEQ ID NO: 28189 - DNA, 1761 bp, Heterodera glycines
aagtttagacttaactttttagtgaaaattcaatcactcatttttcgagtagtgatcagaagcgcaccagattttgcaggggcctaaaaaggtcaaggaaaggcgtctctgcgttgatttagcagtagtacctatgaatttaaattttctatgaatttttaaagttttttgaaatttttttaagtgcaaaagtggtggtgtctgcaaaaaattttcaccgggtttaaaaaatctaggaaaattagtaagcatttgtagtgttccgatacgtatccctgcaaaatttggtgagcccctgatcaattacaaattatttatggacgatcaaatttttagaaatttttatttatttttgcataattaattcataaatatttttttcagaaaatgctctgaaacgctccaaattttatttacatgctagtttaggcactctgatgctttttctatcaaaaagggagatgaataaatttttaaaaatttttaattcctttttaaacaggccaaaaagtttaggcttaacttttttttcagaaacttatcagaagcgccccaaacttttgcagggatactgaaaggaaaagaattaacctgttttatcacattagcttgtcatcagtttttataaaaaattttcaaaattctgagtctcctattattttttttttttcaaaattttgaagggcgggggggggggggggtcgaagggccccccacgagggccggaagaggccgagtgagtaccttcggtgcaggaaaattattaaattttaaaaattttttaattgctttttaaatatgccaaaaaatgtaggcttaacttttttagtgaaaattcgatcactcatattttttgctaattgagcataagcgtaccaaactttgcagggatactccccggtaaaggactaacttacactgaaatgagcgccgagctagctggctttaaaaattttcgaaaatctgactttttcgtttttatttattttttgcaaaattaattcttaagtattttttcagaaagtgctctgaaacgcaccaaattttaattaaaagttaaataaggctctctgatgctttttctatcaaaagggagatgaataaatttttaaaaatttttaattcctttttaaacaggccaaaaagtttaggcttatattttaaaaagtttcatcgaacctagcgcactaaaatcgatataatctctccaaattttgcaggccttctccattgtaaaggactaacttaacctgaaaaaatgccaacgcttgttgtttttaaaatttttcgaaattctgactttttcattacttatttattattttgcaaaattaattcataaatattttttagaacgtgctctgaaacgcaccaaatgttaattaaaagttaaataaggctctctgatgctttttctatcaaaagggagatgaataaatattttaaaaatttttaattcctttttaaacaggccaaaaagtttaggcttatattttaaaaagtttcatcgaacctagcgcactaaaatcgatataatctctccaaattttgcaggccttctccattgtaaaggactaacttaacctgaaaaaatgccaacgcttgttgtttttaaaatttttcgaaattctgactttttcattaattatttattattttgcaaaattaattcataaatattttttagaacgtgctctgaaacgcaccaaatgttaattaaaagtgaaataaggctctctgatgctttcactatcaaaaagg

SEQ ID NO: 28190 - DNA, 507 bp, Heterodera glycines
ttgcttacaaatatccctttatataggcaaaagggagaatgtcgcctgcatcccctctcccgtccatttttgactcttgcgacactttttttactacataactgacaaatatcctttttcggatgattatgttcctcggtcaattggttgtgcgttggatttgacctcttgggttcgaatccccctcccattggtgaattatttaatcgattttaaattatatatatatatatatatatatatatatatatatatatatatatatatatatatatataattgctaattatcctttttcggataactgtatcgctgacccagtggtagtgctttggattaagacctcttgggttcgagtccctctgcctctggatgaattaatttaattaatcctctcatggatttggaccccggcacctgggacaaaatcatgaaaagcaaaaatgggtgtttttttaagcaggggcaggggtctggaccccgctccctgggatcttatactactag

SEQ ID NO: 28191 - DNA, 1641 bp, Heterodera glycines
tctagagtcatgtgtcaaaaataaaagtgaaacaataaattgcacgttaatgtgttgccaatttgttgattttttgctgcattaaataaatgcaaactaagtgactcacgattttaaatttaggaaggtagactttaaaatgcaattggataaaaatgaaaataatgcataaataagtcgcggacatacaatgcatccttgacgcaaaaaaagattacgctgttttccggaactcaacgcggtagttacaacaaaatgaatattttactaacaaaccaaaaccccaagaaatcaaatagcattgaatttatatattgaaaattgttaagaactcatcatcaccttttttacggaagtaacttttaagttgcacaagatttatcagcttgttgccgaaaaagagtctttattatagaaaaataatttttatatttaaaatttatagatttgttattattatatttccgtcaagaatttaaatatcaattaaattaattttaatcatgggtccgacaataaaaaaatccattaaagactcacgccgtattattgatttttcacgtaatcgatttgaacctttttggtctctttttcgagacgatttcttgtaagattattttttataaaatgaatttttttctatttttatttaaagaaaatatatacatttgtttaaattcttatttctttagcaatttaaaaatgtccatctgcattggagacacaacaaaaagccgaagttgaagtgaatgaatatttacgggaccaaaaaatcaaatccagggccgatccatcattatactgggaagttaattcacaaaaatggccaatgattggtgccgttgtacggaaatttctttccccgcctgcaacaagttcagaaagtgagaggcttttctcaacggccggcctgatttcagatgacttgagaaagagtttacaggcggaaaatctggcaaagcttttgtttcttcaccataacttgcttctaaccggattttcaattgaatgattttgcttttataaatttgctttttaatatgctttaaaatgctttaaaagatttataggattttttaaaataaaatttaaaattattttaaaaaaattttttttaattgcggattgcggattacggaaattacggaaattgcggggtttttggacccccgtaattgcggattgcggatttccgcaactgagaaaatcgccgcaattgcggattgcggatttccgtaattgtaaatccacttgcgtccagccctggtgccatacctggtgcctatcgatatctgcgagaaattttataaaatttaatgcgatttgttagcagattttgtctaaaattgaccaaatgacgcagtttttgactcaatttctacaggattattaagtaaaagcctatccggcggtgtccggcggtgccgataggcgctgccgggaaaatttcacaaattttgaatgaaatttgcgatgaaaaatgagttaactttaattaaatttattatttaatttatttaaaaatatttggcattctgtcttagaaaaattttcaaaaaaatcaataaaatcccgcataatcccgcacaaaaaatcaaatttgcggatcccgctgcgggattggaactcaaaattctttgc

SEQ ID NO: 28192 - DNA, 1185 bp, Heterodera glycines
tgaaatgccaaaaggatgcgccaaagggcctttcgtaaaaagaaatgccattttgaatatttagtcgacaaaaaatttcaaaaaccaaatttttaaaaagtggaaaaatatttcttttttcttttgaaaattttttgaacgtaaaaataaatcgaaaaaaatcaaagggttttaggaaaggacaaattgccagcacgaaaagaaaaagaaatgacaattccttccctcagctaaaggtcactccgatttaatgccaaaaaagcactaaaattccttttttatttctcggagtgttaaaaaacggtgaataaggaaatgttaaggaattaacgaaggggggaaaagaaaaaaggaaatgggcaaaaaagggggggagagggggcattttacaacggaaagggatgccatggcattttcggagagaaattgcaacaattgttcaaagataattatatacaaagtaaatcaattgattctctgtcaaaattcaaagatgacaatgaaacaggcaaaattcgtcggtgtcccttcgcttttggcatttcgtcgctctttcgttggcatcgaaagaaaagcagtgaatttattaatataaattaattaaattgaagaaaatgtctgaaaatgattgtttttgttttttgcaattagactttattcggaagcaggtgcattctgtggagtgttttggcatattccgaaatgactccgtccaaatgggcgggggggggggcatttgagaagcattcatttcccttccgtttccatttttatcaccttcatacaaaggctcattggaattgccttcctttattaaatgcttttggctaataaatggacaaatttatcgaatgcccaaaacaacggcgactgtcaaaaggaaaatcgccgatgatttcgagattcgtcacactctcgcctcctctccttgctttttatccccaccactcccgctccctcgtttatttctttcctctctttcgtccctctttcccctgctccctccctctccccctccctctctcctttcccttcttccctccctctccttcttcttctcccccccccgccctccttctgacccttcctcttctttctctctctctcccctctctttctcgctttccgtttccttatgcccctcacacttcgatctcttggtctggctcgcccctccctctttca

SEQ ID NO: 28193 - DNA, 1105 bp, Heterodera glycines
ctgtgccgtgttgttgttggtgccaccaccgctggtcactgccagcagttcctcctccttcaacttgtacagcagcggctgttggtggtggagggacagtcgaccaccacaaaattggtgctgcagctgatgttgtcctcctccaatttgttgtagttggtcatggttactgttgctgccaatgccgtgccgagcgcgcaacagtcggccaacgccggcagatgacgcggtgccgttgaaggagccgaaagtgttgttgttgccgttggtggtgatgccattgacgttggtcggcaaatgccgcagttggggcaacaaaatggcattctgtgtgaaataacgggaatagagaaaaatgccaaatgtttgaggtcggcgatgcgacagagacaaaaattgttttatgatttcttttttggaaaattggccgtccctcgtttcgatacaataatttaaatcagtaattagagttcggctttaaggcaattaatgatgaagttgaaattgcagcgaaaaaatgaaaacattaaaaaaaggatttattcattcaattccaagaaagccgagactctcgaccattgtgttttctttcgagtttttgttaaaaatttcgaagtgggacaaaccgaacggaggtgcactccaaaatttcccaaattatccacagctcatggctccgtgccaatctcgtacaattacataatcgtgacttaattattaccgagtgctgttgtcctcctccccccgccgctgccgtgccaccgaaagcgacggtcgcagcggcagccgagccgacgctgatttcgctgcccgccgaactgctcggcgacgacccgttggcggtgcattcgccgcctccgccgttgtgctgccttttcgtcaccggcttcgccgtcatggcagcaccacgtttgccaagtgataatctaaaatgaagggaaagcatggacatgagtatgtgtggccatggaatgagcagtgccgtggggaaaggtcgtttcggcgccagcccaagttttggattaaacttttcgaattttcaaccaaagtaaatagttttggttgctccattagctttacaaaacggtggggggattttcttcta

SEQ ID NO: 28194 - DNA, 1222 bp, Heterodera glycines
tgcgaaaaatggggtttgacaagtttattgggggaaaacatgactttacaaaataatacccctgggagaagggagtgggaaacatgatttcaaaattttcaatgttttctagtctaatctactcaaaacggttcagaattcaataaaaataacattcacggtgcgaaaaatggggtttgacaattattggggaaaaaaagactttacaaaataataccccttggagaagggagtgggaaacatgatttcaaaattttcaattttttctagtctaatctactcaaaacggttcagaattcaataaaaataacattcacggtgcgaaaaatggggtttgacaagtttattggggaaaaaaagactttacaaaataatacccctgggagaagggagtgggaaacatgatttcaaaattttcaattttttctagtctaatctactcaaaacggttcagaattcaataaaaataacattcacggtgcgaaaaatggggtttgacaagtttattggggaaaaaaagactttacaaaataatacccctgggagaagggagtgggaaacatgatttcaaaattttcaattttttctagtctaatctactcaaaacggttcagaattcaataaaaataacattcacggtgcgaaaaatggggtttgacaagtttattggggaaaaaaagactttacaaaataatacccctgggagaagggagtgggaaacatgatttcaaaattttcaattttttctagtctaatctactcaaaacggttcagaattcaataaaaataacattcacggtgcgaaaaatggggtttgacaagtttattggggaaaaaaagactttacaaaaaaatacccctgggaaaagggagggggaaacatgattttcaaaattttcaattttttctagtctaatctactcaaaacggttcaaaattcaataaaaaaaaaattcacggtgcgaaaaatggggggtttaaaaagttttttggggaaaaaaaaacttttaaaaaaaaaatacccctggggaaaaggggggggaaaaatgatttcaaaattttcaatttttttttaatttaacctactcaaaacgggttaaaaattcaaaaaaaaaaaactttcccggggggaaaaaaaggggggtttgaaaaattttttttgggaaaaaaaaaaattttaacaaaaaaaaacccccgggggaaaaaaggggggggggaaaaa

SEQ ID NO: 28195 - DNA, 1619 bp, Heterodera glycines
  unsure (1)..(1619): unsure at all n locations
ccgatgatctaaaaacaggacatgtacaaacacaacagatattcctccgcccatctccacccattgttggcaattgtgctcgactgcagcacttcatgatagagcaaacacagcaaattccaccgattgattttgggggtttcgtctttcattgaaggcatggcactgcctcctccatcggccaccagttgaaagtgctgctgggcagccttagtgccgagaaaccgggaaatccgtattgccgccgttgcctaagtgtggtattcagaacaattatttacccccccccccccccccttaaaaaaataatttaaaagtttcggcgattttttgaaaaattttttgagataataattcctcattcatttttgaaaaaattgctagaaagaatttccaaattttttaaataaaatttctaataaaattttgatgttttgaaacctttttgaaattaaaaatatattggcaacccaccagatagaaagagacttttcgctttctattgccagccataaagtaaagacgtgcagcatgttcgagtagtatagcgtcaaacaaatcggaattcaactgaagagatgccccaacactaatcatttgctgagccgcctcctcaaagagttcgagccgacataaaatctgcgaaaagaatggaattaattattgtaaaaagaggtcacgaaacttgagaactgttcatcaatgctcggagagcgagaaaaggaaccctanaaataaacattaacaattgtggttattcctattctgtgcatataatttttcttatctgtccctataaaacttccaaaaaatatcttggtggagcgtatctgcaccgccggatcccaatgaaccaaattttttaaaaatttgacctcaaaataggaattttatttcaatttaacgaataatcgctataaatcctgcgctttcgcctttctgcttaaaatttaaatttattttttttcgttgcgaagaacaacaaaaaaaaggctctttgggtgccttccccgaatttttttttctggatacgaactgttcataatcccagtttttaagcaacaaaagggccacaagtattaaaatcagttccctaatgcagcaaattaacatttgaaagtttatccgtcaaaattggaattcactttttaatttgtacctgcagacatttgcgtagtaatgaattgcgttgtctgcgtaccgttgcgggtactgcttcctcagccagacaattgattttgaggtggaactgtcaggctgatccgaaaacagtttccaatcgctcataaagctggacaacgcggccatttccaaagcaccggcatggtgcagctgcaacccgaaaggagaagcactggtcgaacatttcgataacatacccaagcctggtcgttagcgaattccttcttcagcgattgatacgtttggtaagcaaaaccgtacaagccgaacagaaaggcgaggtcggccatccttcgcatttgcaactcaatgctatcggaagcatagcttaatcaggaaaatgaaccaaaccaaaacccaatcgtggatttatttaaattttggtttattgttagccgacaaatggggaatttttncaaaatcattgtaattattga

SEQ ID NO: 28196 - DNA, 1018 bp, Heterodera glycines
gaattgagtgaagaatggccggatttgtgtcccgggtcgtggcaccaaaaagtttgtcggaaaaagggaggggacaaactggggggttgggaacggagggggggagattcgagactcgctcacacgagcggcgatgcagattggcgatggagaaggcgagaggaagggtgtgccgattggacgtttttggggagcttcctcgccgtctgtacccccatttcccgtgcttcccgacccttacccaaaaaaggcgaccctttttaaccacaatttattcgaagcaacaaagggaggacgccgttgggattaaagattggcgcagagtaaaaccaaggtcaaaaaatgattatatcgaagtgtgtgaatatatgagagtataggaacttaagtagccaaaaaaaggggagggacgacggccgacatacgataaaaaagggggaatgtcattatgcaaaaaggcaaagggagatgagatgggccaaaagcaaaacaaagggagaaaggggagagaggcacgatttgaaaaatagaaaattggcgggccattgacacaaaaagggggagaaggaaaggaagaaaatgtgttgacagcaatttgtgagaaaagtggagcagaaaaatggaggacaaagagaggggtaatcggtgagcatttgttagcaaaagtgaacttccaacacaaaatgggaaaattggatgaccaatggcttacatagagaaaaggaaaagcgaaggaggaaaagagggggaggggataaaaaatagatccttttttcttccgtccctcgtcgctttcgcgacaattgacaacataaaatttgtcgaaaatgttttcatgtgaaagttggatttttgacttgtgtcattcgtctcgaacaactattccagctacatacatattgatggaatttatttttgtgaatgaataacagtaaaagtggaaatccttcaaaaaatttttttggacgtatcacttgatgaaaaatcatagattaaaaggatttatttgataatctga

SEQ ID NO: 28197 - DNA, 1495 bp, Heterodera glycines
ggtctcggaaaagtgaaggccctacaaaaaattagaaaccaatttaaagttgatgaaaaaaacgcaccaaacaaaagaaacacaagaaaaagggtgctaacggcggagtgaacgcggacactccctaaaattgggaagcattgaaagaaaacagggttttaaaataaggtaagttttttggtctgaccgtcgggcatttcgtatttgaagagggggccgaaattggcctcgacaatgtccccggggttacgcaacgacacggccgggaacaagtcgaaagagtggacgagcatattggtggtgtctgaagaagcctaattgttttcaaaatccctttttggcattttctcgattaaaatggcgcaatttgtgccgccttttctccgcctcccccacccactcagtctctcgccgttcttcgtgtaaatgatttggtgccgtgccaagtcaatgccgcatccgatcacatcgccggcccggaaattggcattgcccccgtagccgccgatgttatggccaaaaatgaagccgtcgtcaaagaaggcgtaggtgtcgttgagtttgccaatgcccgtgcggtttaacggcatcgatttgggcgcgaggccaatgccaatgtcactaattgagtttgaaaagagtggattgaggggatggtcaccgtgaaaagcctttcaaaaccaaaaatattcttagaaatgttcaggtaaataaatgtctgttctttggcgaaatccccggcttttcccaaggattccatgcaaattattaatggtaaaaataattattatacaataacttcatgagaattaaattttataattaatacataatttcatttaaatattattttgtttccttttcctttttaccgggtgttatttcgctgcagcataacaattttcacttcaaaataaatgattccgagtttttcggactgagcaaatttggcacggacagagcgataaactgaaaaaatcaaaaaataaataaaataattaaaaataatattcatgtaatttacattcgtcctttccacggcaaacaatcttcaccaatttgggcatcaaaaggaaaagttcgtggtgacaatcttcggggttccaatggttcttagaattggaaaagtccccaattttaaaaatgaaaattaaataaaaaattaaaaaacgaataaaacacattttcgcattttgaggagttttccttcagctgctcaatttggttctccatttgcttaatctttcttctcaattcattcatttcgccttgcgtttcaaaattgtccgtccattcttaaaaattacaaaatgaaattttattaattaaaattattgcgttaagcatttaaaaattcaaatttacatacctccagtcccatttccgctttcttcactaattgcagtggtcaattccgattgaagggacaattgttcagcaaaagataaattaataaataattagcaatatattgcaattactattattcccggta

SEQ ID NO: 28198 - DNA, 888 bp, Heterodera glycines
taaacatcatttatggtttgactttgattcaaaattccacgccatgtttgctagggaaagaacgaacagaaaaggctcggaaaaatgatgtagccatcagccaagaacaaaaagtcgcagatgataatgttgccaaaattccgaaaagtcagcaaaagtcgtcgcaacaaaagaatcgatcgaagtggcaagcaaaaaacgggaaaaattcggcacagaaaggaggaaaattggagaaaaaatatgtgtatgaggaacgtaaatttggggaaaaagggagtgaaaagagtaggaaagatgtagaatgcaaaacagaaaagtcgattttagaggttcaaaaaaatggaaaagtctgccgaaatgttagaggacggagttctcaattggggacaattgaatttttggagggcgggaaggaattggacccgaaaaagtcgaccactggtaaaaagaatggcaaaacgaacccgatcttcagaaattttggtggatcgtacaaggaattaggaaaagctgggcatcgaatttcggcaaattttcgacaaattggcaatgtaaacgaaaatcgagagaaaggaggcggatggaagagaaaaccatctattatgcgactccatcggagccaatccctaaatttgttggatcgtcgacggcggacggcaatgtgtcagctgagaacccttcctttcgggccgaatcgaggaaattttgacggcagagacgccttttttgttgggggcgggatgtgataatgacgaatatttattttagttttaaatttattgggcgttttgttcttattattgtttgtgaattgttttagttcttcttttttcagactttatgtttttgattcatgagaaatttttatgtttattatcgtctctc

SEQ ID NO: 28199 - DNA, 1779 bp, Heterodera glycines
  unsure (1)..(1779): unsure at all n locations
atgttcaatgaaaatgccaatnngatcaaattccaagtaaatagttncagcaacatctntaatgccatattcttccaatcttttactgtcctcaagaatatgcccatttccttttttgtagtaagccagagattgttcttcgggcgaagaaatgtcggtctgctttttgggggttttttgctgtttgtggtcggtctgctttttgggatcggtctgatttttgagaatttccttcaattcttccgagtaacgcagagataattcttcctgaggaatgccgtccttatttttgaaaatttccttcaatttttccgtaatatttgccttcagtgttgccacagtgtccgttttttgcacctctatggtcaataattttgcatgacgatgcatatcactaatcactttaatttccatgccattagtgaatgacaacagaatgctcagcatcagcattgtttgaacagcaaaaatgccagcgggaaataagccaaaataattcattttggcataaatttggtggcaataagaaagaatggagagggggttaatttactttgcttaaagcggaatgaggtgatctgaaagcgagatacaccgcaattagactggctgatcaacagtgttatgatttgaaaaggtaataaaataggaatgatcggattagaggtcacttatattgacatcccctttcaaatttaggcattttccaaaatgatttctggtgatcagattgggtgatcctcagacatttcatcctcattcaatagtccaattcgaataaattttgtgaaaatgaggctttttgacccaaaatgaggcttttttgcttgccaaatgagacttttgaaaatttcatctgcgagccctggctttattttaataattcaagcaataatattaataataaaaaataaaaaattaatcaaatttttgcctttttgcttcttctcaaacccaacattatntaagggcattaagccaacgcattaatgtgaatgtgaatgggcatgaattaataaagaaatgcttccaattttataagaaaaatgacatgcgttgaatatgcaaaaattataaattgaattgatcaataaaagtaataaatgacaataaaatgaaaataattgtataaaaattattaatccgtaatcacttgggaacagggctgggcgaaatttcggtttttagcttcgaaaacgcaggaatttgtagccgtttttcgcccaaagtgctaattttggtgatttttgggtcaaattttcaaaaaaatattaataaaatttgaaaaaggtaaaaaatgaatttaagcgctaaatctgaattggaatgttgataatctgaaaaaaatgaatcgaactttgaggtatttttccagattttggtatttttcataaaaagaaaactttttttttcatttgaattatatctttgattttttcaacaattctgatttgcttaaacttataaattaggtgaaatattgaagggtaatctattgaattttttgctattggtcacggtttcttaattttcgaagttttgcgaaaagtggaaaaaaggacgaaaggaaaacgaaatgaaatgaaaattcctatctttgaacacggtctttttagggacaatatgtttacacatttttggttggaaaaataactctcttttttaggtctatctcataacaatcaattttatgtttaccaaaaacgttacataaaatttttgcacctccaaccatattatctacatatttgagttaaaaacgaatganttaatccataa

SEQ ID NO: 28200 - DNA, 1631 bp, Heterodera glycines
  unsure (1)..(1631): unsure at all n locations
tttcgatagtaagtttattatttgtttcttgatttttatgtgtccaaatggcgagaaanagcttatattgtgtcactcggaagcttaaagtctctggaatttatcaaacacactaaaantaataaatagtctttaggcttagaaaatccaaagagataaaaaaaagaataggagcttctttattcaaaattttctgaattttcatagatttatatttttttgcaaaaaaactattttcaaattaggcggtcacagtcactaaattttaaaacttgcaaatttttgctgagtaaaaatatttgagttttgaacgaagatagcactttaaattttttaatatttaaatttaataaattcatttataatttatttaagaaccgttatgtttggattcttttcacgcaaataacgcccaacgcctgtcatcttaataatgaaaaaacaacaaataatttattaaaatattttcatttattaccgttcctccggtgccaattccaaatacgcaaatgtccacttttccctgcgtttgatgccaaatttcaggccccgttgtccgatagtgaatttcggggttcgcctcattgcaaaacttgaataaatttaattgagtaatgaatttatttaattatttgaatttttaaaacttgtgcctgcatgggattgaaagaattgggaattgctcgtgccaattgtttcgttcgctctacggcgccgttgaagcccaattttgggtctagcagtaccaattcggcaccaagcgcacgtaacactgttctctgttttcataataattaacccatttttatcgaaaatagttttaattaaataaaaatgtattaaaaatttaaatattttatcttctcacacgttcaattgtttgtgacgaggatatcacagcaatgaaacgatagccgcgaatggccgccactgaggcgagtgcttcaattaatcggattaattaattgttagcataaattggttaatgatcaattaatgattgggaagattatagaataattacgttgatgattaattaatcattagcacaaattgatggctgatcaattaatgattttgataattaattaattagtcattataacaattgctcgattattaattaattaattattattgattgaccaatgcccgtgtttcctgccgtttgttcaattattgtgctgatccccggcttaattcggccttctttttccgctgcgtcgatcatagcgacgccaattctgtccttcactgagcccgaggggtttagccattccaattttactgctaaacattcggattgaattggatatccattttttggacaaatttcactttttctgatttaatgcgctttggccacttcaatatgaaaaatgttttttttataatttttagtaataagtgatgccgaatttaaatttcggtttaaaaacaaaaatttacaattggtaaaatttttcataaatttgttcaccaattttagcggcgcacccttttgacactttgttcaaataaaccattggcgtattgccaatcaatgcgcaaccatcggacccaattccatctcgtgaagccatgcaaattcagcgtgttgtgtgtgtattaattctanattccgcaaaaaa

SEQ ID NO: 28201 - DNA, 1163 bp, Heterodera glycines
  unsure (1)..(1163): unsure at all n locations
gctgctgttattgcgtttggcatggattttacgctttttcaatgctaattattatttggcttctgttactgtatcagataggacacgcaaacaacatgatgttaattttttgtcggtcttccgccactcactaattagttaaacagtggatttgattgttttcaaaaacgaataaaaaattcacaacatctcatttgtccaccatttcattggtatatttaagaatatcccaattatgtgccaaaaatctctctttttgtttggaaaacaatttgccaattttgtgatgtttattatatagatcattatgaatgttatttacctatgtttaaagtaacttgtgcaaaacttaaccaattgtggggaccaccgataaatcagtgcgctccaaagtttgcttatttcttaagatatgtgctttttttgagggaccgaatcttccaaatttataatgtgcttatttctaaaattatgttaatttttagtatggagagattttgaagttaaaaatttaaatttttcctgtttaaaattttctcggtgcggcgcctgtcggaaccgcatgtttttaagaccattgcaattaaatcagcacaaaagattgaatcatttttatagatttagtaggagaaaatgaaaaatacaattaattaattaatttgtttttccatgtcaacgtgtgtttgctctcatcagaaacaaattatttttgaaattgaaattattttaaattaattattttgctcgagtttgcaaaattagtaaagagtcagtcgttcgaaagttttgactcgaaaaatatctctgtgtcaatccaagattttttggcaccgaacgttcacacggcacaaacggaggcattggcagaggagcgaatgttgcgattgcgctcaaatatttcattaaattaatcaaattgcgttaaattatcgtataattaagattaatatattaacaaatatacttaacgttttttggttgttttatttaacaaacaaaacttctttagattttgatccttttttgcagaatatccctanatcagtaaaaaataaataaaatttgaanagaaaagctcacaaaagcaaaagcgaaggaaaatggagacgaaaaagaaaatgattannaaacaaaaataaattttccatttattttttgacgat

SEQ ID NO: 28202 - DNA, 1492 bp, Heterodera glycines
  unsure (1)..(1492): unsure at all n locations
aattatacccctaaattttgaacgttttcgtccttattttcgcccttatttctcgattttttcgcccttatttacggccttattttggactttttcgcccttaaaaatcctcgccctactgatatatcagttattggtattttggtttgacaaggcttactacctatatttaaaatattgactcgaataaaggaatacataggacatttaattctcaacagaattataacgatatttgactgcatgtatatgaatatcatataacgacgtcaaagaataataatggggatacatagaccattgggacaaatgcctaaacaaatatacaatacaacactgggcttgactttgtccataaacacatgggaacattttcctcattcattgagcggttgtctccgcacgatagagtttcgtaccattttcgtcaatccaatccacgagcgggtccacatagctgacgtacacattgtgtgccccgtacgtctgcggaagtgccaaatacagcagagcagcagtcttcagaagcagataaagtggtatcatgttggatatcaataaggtgttcacaacgaagtcgaacaagatgaacagagcgaaagagcaccagtagatcagccattgggtgtcatcatctgaaattgcatcgcaaaatgaaaattgcgtattggcgagggaatgtctcaacttttgtctgcgtacgaacagccaacacactctgataggctgggtaaacgatacctaaaaaaggacaagcgaattagcatctgctgatgatcgttgctcaagcagttagtgactgaccgatcaaattgcagaggaattggttgccaggacccatgaccaaccagcagatcacgaaagcgcagaaaacgtagaaaagctgaaaagcatggcgaattacaaaaaagaatgcattaaatgttttcttcgtgccttcacacggtccattcccgtaacatcctccagctttttgagcatcggttgctgccattctctgagtgaaatacgaagcaccggaaggatgtccttgtggcttttgatcgacgattgacgctttctcggacgcactctgtggccatgtctacgggtatgagcagtcgctgattgttggtcattggcactcgctgtcgctatcggttctctgtcgtcagtcattttaatactatgccggagatttgtaatattttgtggtaaatgaaaaatgaataacggaaatattgcttttatacataatttttggacgcaaatattttaaaagcatttaacctatacaatattttcaagtgaattaaaagcacagtggcacgtcatccacaggcaactcatccacattttcctcggattaaaataaatggaagcaaaatataaattaaaataaaaaaacttgatgaaaatcttcggttcgagttggtgatggcgcatagttgtgttgtttcacaantgtaaaagtatacatcattaaacccattggtttttgcgtacccttgac

SEQ ID NO: 28203 - DNA, 1297 bp, Heterodera glycines
ttgtttgttgttttttttgtttctattgcgtaattactaattagatggaatgaaaaagagtggtgcattatttagctaccagtaatagtaaataatttaacgcataaccaattagtgatgggagctgttggttcactatgaaccacacattcgttctcatcggaaggtgtaaagtcatgtgctttacacaatgacgacaaatgtttctgctgctttccattggaaagcactctttggacggggaaagggtaaataaaaaatccaagtgaaaaagtgccctttcgcgggaggccttccctttccccattcgtttttgttagctgtctcgtgatccaaatttaatttcattttgtcgtgttatagtgcataaattcatgctttggatttcaaatagctgtctgccaaaaagttttcttttttcatataattttttcgaaaatggctctcattattacgccattatttttagttttagtcgagtacgatttaattttagaaaacacaataacattaaataagatgcgttctcatcagtttaatttacgccaactccgtaagcctttccgaaatgtcgcctcaactaacagtgaaggccttcgtcatcggaacagcatcgtcgggccaccggtagttccatggacatcgttggccttgttggcaacagcacctccaattgttgcgcctgaagatgacatcctgaacagtctttttgctcaggttggaggaatgccaactttgaaatccaccggcaccactgttgaacttgtgcggcgccgttccttttcttgtggttcaaattgtgcaaaatgcggttggtcctcttttatgagtgcatttgaacaaggcatttgtaattcatccaacttcaggcaaaccattgcgaaggactccgaccaccaacggttggtttcattttttgtaaattttaattattattttgtttgcagacaactcaaagttgctctactgcaaagactgcaacattatcttcagcagttcttcttcgaatgacgcgtcgtccaagaaattcaacattttgaagaacggtcccatccaatcgccgccgtatccgaccgaaatttcggcatatttggacaaatatgtggttggccaacaacaggcaaaaaaggcgttgtctgtcggcatttaccagcattacaagtgggtgctggtaaaatgcttttattacccatttatagttgctcaaaatttttgtcccttaatgttggagtaattcatttgtattacccgtttcagacgcttggaaacaatcagcgttttctggatcagttttttg

SEQ ID NO: 28204 - DNA, 2209 bp, Heterodera glycines
actcgatttaacattttccaaaaatttctattgaatttggagatttgaaaaatataatccaaaaatttttgaaacggaaccagctttttaaagtactaagacagaattggccagacggaactgacacgcttcagggggagggggtgtggaatacaccaaccaaaaattaaaattaatcaaaaatttcctaaagataattaattcctttttcaattttataggaagttaattatttttgaaaatatagtatttaaaattaaaaatcatagaaaatttcaaaaaacaatattcaaaaatgtgtttcttttagaaaattattcgagaaaaatccttcacagaattattcaaattaaaattttcggtttttaatggtcgggtgagagaaatgcctcgtgttgccaaattgccattttcgtgccacttttttcttccccttcaccgtgccttgttcaatttgccgtccttgtccttgtcccggtgctccctgaacatttcccgttccgactccacccattccggttctttgcccttcagtcccggatagtcgtctggtctgtacatgtcgccgaagtactcggccatgtccacgaaaccgtccttgtccttgtcaatgtcttcgacggtttcctgtacagaaatttttaaggatttttaaggaaaggacatcaataacaattaattatttattaagcaattaggaataattaggtaaaattatatgggtaaatatgagaattagggtgagggtttgtttaccattagggaaatttagtgaatttgccctaaatccccgatatttcaaccaagttaagacaagtgaaaaatatataaagtgaaaatcattgaaaaagggactttaataagcaataatctaatttgatttttttttaataaataaatttgctaatccacctgcaccacaatgtctctcatatggtcacagtcctccgggtgcatgaaacagccgtattccgtgcggtccattttaccgtccgaattgtagtcagccacctgtaaatcaatttttgagtttactgtatggaaagcatttaaaaatttgatataagaatttaattttgggagttagccactcgaatttaaaatgtaaattagcaggtctttggcatgtttttgaccttccaccgccgttcaacaaaaaccattatagttttaaggattagtcagatataagaaaattaattgaaaaaattaaaaaaaaaatgaaatttatagcgaatcgaagattagaaaatcgatcaaaagataagtaaaccaacgaaggccgtcaaaattgtcaaaaagaagctttataaaattctcaaaaaaccaaatgaaagattatgagaaatgtaaaaagaatgtgaaaattaaaaaatttcaaattaaaaaatttcagcgaaattacttaaaataaaaaattataaattagccactcgaatttaaaatgtaaattagcaggtctttggcctgcttctgaccttccaccgtcgttcaacaaaaagcgtttagattttagggattagcagaacttatggaaaaatacatttaaaaaacgaaactaattaaaccgaagcttagaaaatcgatgaaaagatataagcacaatgcagtcatttcaaaaaatgtaaattaaattttaccaaaaataaaattctcagaaaaccaaatgaggaataatgggaaagctaaaaagaatggcaaagtcaaaaatgttcgaaataaaaaaactttcaacaaaagttacattaaaaaaatactattcttaaatcaaagaaatttttgaatatttttattaaatattacgcaccacataaaaagctttaaaaaattctcaaaaaacaaatgaagggattatgagaaatataaaaaaaaagtgaaaatcaaaaatttcaaattaaaaaatttcaccgaaattaattaaaataaaaaaattataaacccaagaagacagtcaaatttttcaaaaaaaaaaattaaaatctttcagctaagttaaaaaaataaattccctcaagtaattaattttttttttcttaaatatacgcaccacataacgcttctgcatgaaattgatgtgctcccgtagttccaactcatccacttgaccgtccgagtttaggtccatttttggcactaattttctgtaaaatatttaatacttttttttgttgtaaattttcgaaaatacgcgagtcgtttcttgctcttc

SEQ ID NO: 28205 - DNA, 1004 bp, Heterodera glycines
gatgttttttcaagttttcgaaaacagattaaataaattaaaaacacattattattattaattagatatttttagatgcttctaagcaaataattaattttttcaaacatatttttgatttttaaaataaatttcaaaaaatccaggtccaggcctggatccaggtcccgaggagcctggatttttcctggacctggatttttgtccaggaaatcaaggtccaggtccaacatggaatctaggtccaggtccaggcttttttcaaaatgtcgatctctaataattttcatgcaaacaaaaatggttttttggtacttttccattttgctggcataaatgccacagtctgaatctaaatttcagcaaaggtttatgaccaaaatgaaaagggtaatatgtaaattgccgatggtccccactttttggaagaatttattattattatttttatgggatgttttcagagttctgacatttattttgccaatttcgagtctctgaccctaattccaacaaacaatctaaaattaaaaatgtcaaaatctcacttttgttctaaaattgactgaaacaagctataattaatcaaaaaccattgcatgcaaggccaaaaaatggtcattctatacagaaacgaacataaaagtgattttaaaatcttgaattttcgactttttgtcgaaaaaattgagaatttaaaaggtatggaggctgagtgaatgcctctattttatttgtacagcgactgttggctgccggagagcagcagcaggccaaagaaggattaaaagtgtgttaagtgctaaaggcaagcagatttatttttctctttaagcaaagtgccatgccataaaagggtggattatttgaaaggtgaagcggagggatgaggatgaaagtcacgcaaatccgtcgtctgtcactattagcgatttgccgaaggcaaaaaaaggattatgatgaaatatttcaatctaattggcacttatccacttttatgtata

SEQ ID NO: 28206 - DNA, 723 bp, Heterodera glycines
  unsure (1)..(723): unsure at all n locations
gcatgttgacgggtcggcgtgccgtccggctttgctgacgacggtgagcagctcataataaccccacaggggataaatggacaaaatatctggcaccaaaattataggggataattacagcataaaaggagcgacaattgtggtgtcattctccctgacaaaatgagtcgttaatgcgatatcatattttgatttctgagtttgaaaggaatcaattttgtaaatgcgggattctgaaaatgcttatgcgcggatttgaggggattaagggtgattagcgaagggaggggggcgggggaaggcgtggtacggggatggaattaaaataattaattagattgaaaatgatgaattagatgtacagaaattaggagagaaaggagggtgggggaggtgcaatggcaatgccattatcgctaatggaagagagtgacagccggtgaaactgatgccttcggggaagctcaaaacgccgtaaaaaaaggacctcgaacggctgggctttttgaagtgatgccaccgacagcccatcctaattacctaattaaaggggttaattggttgtgaagtaaagaggttgatcgccaaatgaaggtcaccccatacatatcattttggttgtgttcggttttctaacacagagaggtaagcaccccgtgggtcgcctggcgncccaccccccgaagaagcaacaaactaaaaaaatgctgaagaatgtacgct

SEQ ID NO: 28207 - DNA, 1123 bp, Heterodera glycines
atcccgaaacatgtataaaaacccaaaagatgtaccacttaagtaaataaaattttttaaacaattatttttcggaaacaaaaaattcttcgtaaagcgtgaaataggtaggctaaaaatgagctacataggttaagagaatcaaattttagtattttaaaaattaatttttggtatttatagaggtatattttcaaaattttttattttttttacaagaaataaattttgaaattctcaaaatatgtaaaaaaaaataaaataaaaatatgtacgaaaatttgttaaattttgggttttttttttgaggataaccaaaaatttccgtaaaaatcctcaaaacatgtaaaaaattcgtcatgaataaaatgggccccagtttccagctttttaccaatttttgctcatagcatttttcgagagaagcacaaacaaattttctctattaaatttaaaatttgatttggggttaaacacacaaaaaaatacccattttggggtttggaaactaaaaaaaacattttcgggcttttaacatgtatttttttagctacttccacattttcgaataatttagggaaataaaactcaaaagtttttcctcgcgaacgaaaaaaccctttcaataactgactaaaaatttcagaaaaatgcacaatttaataacctttttgacccaatttcgcccttttcggccatatttggcagttatttggtcattaaaattgcttccttaatgagatgaatgacccccgtagggaagtttaattacctaatttgtttgtaattgttttcttttgttgtagtccgtaaatggtggccaaacaaatgtgatcagaaagaaaaagccgaatgggtgcttgaagtggagcgcgtttccttacggcaacaaaaccgtggatgttgttaccctgggtttatggtggtatggcgacaaatggtcaaagtgcgcggtgcgccgacgcggctgttcaaattattgcaaatgtccgagtgggaaatcgaattagagtggtggaaaaacgaaaaacagtgctctgacgaaaacggtaaaataaacggtagtaggaggatactctaaaaaggatacaaaaaatacagtaattatgaagcagaaaaataa

SEQ ID NO: 28208 - DNA, 1163 bp, Heterodera glycines
  unsure (1)..(1163): unsure at all n locations
atagaattnttattattaattcgaaatcgttaatttatttgacaatccaaagacttaaaatgnggagaagcatggggctgtggctgaggaccccaaatgggggccccattggggaattaaacatgatttctgaaaaagtccctggaatgtctattttttctttccatatcttcttgtaaagctcgagctgttctttccaatggtcttatcccggtctcgatccctgccgaactcaaaaagttatgaagtgaaatgtgaaatattgttttcgccacaattgggagaagcatggggctatggctggggacccaaaatggggccccattggggaattaaatatgatttctgaaaaagtccctgaaatgtcgattttttctttccatagcttcttgtagagctcgagctgctctttccaatggtcttatcccggtctcgatccgtgcagaactcaaaaagttatgaagtgaaatgtgaaatatgttttcaccacacgggattttttctgaaacccatcggaaccaaaaatctagggtttggtataagcgttttagaaattgcggagaaaaaagcttcgatattgagaaaccaagtcaagtccagaaaagaatattttaaaacgaattcgttttggtttggcattatgataccgaataacattcggaaattatggaaacaaaattggagaaattcgaataattttttgacttcaaatttttcccagttttgattgggttttcaaatagtagtttggttcagaattttcccctctacaaaaaaaatttataatagaattttttattattaattcgaaatcgttaatttatttgacaaatccaagacttaaaattgggagaagcatggggctgtggctgaggacccaaaatggggccccattggggaattaaatatgatttctgaaaaagtccctgaaatgtcgatttttttctttccatagcttcttgtagagctcgagctgctctttccaatggtcttatcccggtctcgatccgtgacgaactcaaaaagttatgaagtgaaatgtgaaatattgttttcgccacaattgggagaagcatggggctgtggctggggacccaaaatggggccccattggggaattaaatatgatttctgaaaaagtccctgaaatgtcgattttttct

SEQ ID NO: 28209 - DNA, 1000 bp, Heterodera glycines
tctgttcaaaatgcatttgccaaagtttgattagctttacgatgggaaatcttcacataattatctatctgtaacagtcaaaatctatcccacaattgcaagagctacatttattgaagaattaagccaccttattgtaggaaagaattttgggaatatttgttgataaatagaaaattccctaaacttatatctagagttgagcgggaccgggacctgaacacgtacaactgagtaccgaagtcccggttttgaccgggaccgggactagtcccggttttttcccggttttctcagccaaaaattcccggtttttcaacccgaaaaggtcccggtcccgggtttgcccaaaattcccggtcccgctcaactctacttatatctaatagtccaactgatcagcatattgcgcgttccaatcagttccaaataaagagccatgcatttgcatttgagcactgactgaattgcgcaattcaatatgatcaatctggtaatgattaagctaacgcataatgccgaattttggcactttgtaattcaatgcaaatgctgggctattccactgttccataaaaaaagtttattattattatatgcgcatcctgaaagagcacttttacagtatattttaacaactcatagttcgctattttggaaatgtctatatctctattgtattatagaactgtatctatttttctgtataaaaatacacggaaaaatcttttaataaattccacttataacttctaattttctcgccttcggcaccgccggaccaaataatgaaattcttttgttttggcatcataatctcaaaatcaaaatcataattgacgctaactaggtacagtaatctgatttaagttttcttacggtatcgcataattaacaaaaggaaacttaagtgaaaattctgcgtgtaaatgaacgttcaaaaaattgaaaaattttaagtttgcttttaaaaattaatttctaattattttttttatta

SEQ ID NO: 28210 - DNA, 1995 bp, Heterodera glycines
  unsure (1)..(1995): unsure at all n locations
gatttgtttatttgacactgtgcangcactcttccccntttctcattngatttgtttattttntcatctntaagggtactgtaattattttggattaaaataatgttgcaaaaaaaatattcaaaaatcataaattacatntagataaaaaaaacattcaaaagccaaagggttagaaaaaataaatgtgcatcaaatataaaaattcattgagtaaataaataattactacataaatacaaacatcaaaacaaatgaaatagtacaaacgaattcccgcacaacttttatgcttcagctggcgttgttaatagattagaacatataaaattccaatattcaaatttgataataattattcaatttcactaagaaattgaaataatataaacaccaaataaccataagaaaataaattattgataaaattttgaacaataaagatgacaaaaattagaataattagcataattttcttggctaattatttataaacgcaaaatctatataataagtcttctgattagaaaaaaatctttatttgaaacatcatggcggaagaagcggcagccacagcacaggcgggagcggatgaggaggacgcaaatgggtggtcgaacttgaaattgggtccaaagttcgcctcaattttgtgccggcactcaccactttttcacaagcctcatgctgcaccatcttctgtcgcgaaataggtgctccacaaaaacgacactggacaggcatttaatatcaaaatagtatataaatatatattaattaattaaatagcataaaatttattccacaatccattatttatgtactatctcttcatttttaataatgtaaagaacaacatttcgcttaataaaactttttttccgccttactgattttctttaaattttgcatatcgatggagaaaaaaatactaaatcgattaataggtcaagttaaaattaaaatgggtcaaattaaagtttttgctgttaatctatgcattttctcaattttttatatttagtaaataatttgccgtcaaattataataaatgtttagttttgctctcaaaaactatgttttataatgagttttgacgttttaaacttttgatcagattaaatatactttgtttttcctttgaattcattggaattttgttttttacgcaatttttttttggcaatttttttcgttttttaccgtccatgtattattttatttgttcattttttaaaaaccttgttgaaaagccataaaatcgtattcaaaatattatcccttgtcattatccccgaaaataaagaatcacctttgggcctttagcattacgatgaaggctcatgtggcgcttcaagtgagctttttgatgcgttctatgtggacacaattcacactttaaaaatcaattgttatatttgaacgtatttattgttagctacttttacctcgaatgctttgaagtcagaatgtgtacggtaatgccgtttgaaattccacaatttcggaaattccatcgggcatttgtcacaacggtggggctgaaaaacaatgaaaattttctcgggacgtaattttattgcgatttattaatagtttttgtccaataactgaccaatttttgcgatttttgggcgtatttttttaaaagaaaaattaggatttttacgcaccgctggggaaattttttttgaaattttaaatgaattttgctaaggggttttgctcaaattttaaaattttttctttcccgcttcgaccccccccctcacgacgaacgaatgggaaaaatatattttttgataaattttttggaagaaaattgttttgctggtttctcaccacttttggcactttgcgtcttctcccgtcgggccgtctgttccccttctcctcgtcatccactttgatgtccgcgtgcgatctgagctggcgaaggttaattgccttggccactatccttggctttttttggggcggcgcagacagcgaaa

SEQ ID NO: 28211 - DNA, 1424 bp, Heterodera glycines
atttttgatcatcaaaattatttcatgccaaatgaaaagatttacgttataaattgttaagattttttggtttcttgatatcattcgctagccctacgtttcctcgattagcctgcaaaatttcaaaaaatttcgttcagtttcaaaaagttatgaccaaaaatgtctgaaaaactggttctttgactacttttggccataactttgctcaaacttgaccaaattttttgaaattaaagtgagctaatagagaacccataggctatcgaatgattccaagaatgtttaatttggttgactttgacaaaagttatgagtagttttttaacaaatttgtactggaattgaaaattaaaattcttttgctgaacgcggtgctggcgcgtttcttaaaaactgccacccatgcgcgtttcttaaaactgccagcgcgtttcttaaaactgccaatgggtttgaaaacaaaaatgggtaaaataattaaattaatagcttggctcaaattcaaccaaattaatatttcgtggtatcattcaatagccttaattgtactctattagaatatgatttttcaaaaatttttacttaagtataaaagaagttataaagcattgaacaggctatgttttttgcaatggtaatgcatatataataataaacatttaaaattttaaagtctttaaaatgcaattgagccaaattaatttataaattcgatagccctaagaattctctatttacctttaaaattttagaaaatttcattgagttttttctctcctaatggcattttgccactggcagtttctctcccattgacactttgccattggcactttacctgacatggtccctcctttaaataccggcgctggacggagttttggctaaaaaggcattttttgaattgtattcagcgggtaaaaacatacgggtcattttgatggattgtctgcttttcctgctgatcgctgggctgatcttcgccattcctttgctcgcaatcacccaaaaatgaatgagacgggaatagagcgaccatccttcaaaacggggagcggaaacagtgaaaaactattctggcacaattattctctgttttcccttttcccttttctctctctctctctctctctctctctctcttatgcctttcattctttctcctccctgtcaattcatccacttttgcccctgtctctcctattctttcccctcctctctgctgctgtctctctccatttccctcgctcttactccgctttctctcccactcactcagtctcttccacttcttcttccgcttctgttccctcttctccccttttctgctgttgttgctggcgttcattgccaaaacggatggaacggcgccggaggcgaattgttcggaactaatggtcggtcaaagaactttttaaatt

SEQ ID NO: 28212 - DNA, 1606 bp, Heterodera glycines
  unsure (1)..(1606): unsure at all n locations
tctttaaaattttttttataatttttccatttttttnttgtaaaaacctagatanattgaatatattaaattatttttttntagaatcttttctcaattttcttttcaaaatgataactcttcaatatttaattggatttttgttcgccgctcttctggcccattacgtcaattcatgttggtaggaggaggaattaattgggatttgataagtgctaatgaccattcaaattaaaataattcgccaactttaatgacaaataaggcccaagattagacaaaatgattctgacccaaaaaataaccaaaaaaatttgtttgttcgtgggtttatcttggctagccaaaaacccgaagatattacaaggctgaaagctcgggaaaacccgtaattcagttcttggcacatgattacagtcaactacgtattagtgactgataatgactaaaaattcatgagagatacggaaactacgagaattttctgtggtcgtgattaagaatttcgatataaataagatttaagcgataattaggcaattattatttttttaaatctttattaatttaataggttggttaatggacaaaaatgtcgcttggtggtgctgcaattgttgggacagtggaaaaagtgttgacgaagatgttgttggtgtacagcaacaacatctacaactaccacagcagcagatgttgctaagcggggcaaaacttggacaaaagcgctcattacaaatacaaattgagtttaaaaaattaattttaataagagtaaataattcataaattttaattaatgatacttcaaattataaaaataattttaaaatttaaaaaaatattttgacaatgttaaattaattattattatttttaaatttgataactcattacgaatagaaattgagtttttaaaaattaaactttaaaaatataatgaattcaaaaattttaattggtgatccgccaaacgaaaaaaaaatattttaaaatgcataaaaaatatagtgttaaaattattattatcatttaatcgaataaaattatgcctagattagcgaaaaataaatttcaaaattaaatttcagagccaaatttattccaaagggacaacagaatttacgcgcttcaagacaatgccatatttgatgaccaagaccaacaacagttgtataacagcagaatgtaagaatttttagtaaaaaatgtggcgaaaaataattttaaaaaactttcacttattctaatatttataacctaaatataattaattaataaatgaaaaaatgatgtcaattgtagcaaagtctctaaaaaaataatttattttgtctaaatttatttgtttttcgctttttaatttcgagcgccacaacagaatataagaatttttttggtaataataaatgtgtttgaaaatatattaaaatggtttataactaatataagttaattaagaaaattaataatgtttattttcgtttgatttaattttcggattattttttcaaacatttttttgttttttactcgatactttaaaaaaaaataaaccccaaacaatttattttaggattacttcctccaaatttaactttttttt

SEQ ID NO: 28213 - DNA, 681 bp, Heterodera glycines
cttcccttcccttcccttcgtctgatggctctttcccctcctttggatggccaaatgagagaagaccacccccttcacattccatcgttgaatctgctgctgatttgatccttcatcatgaagatggccgcttcccattttaactgccgaatttcttcttttcgtctttggcattgccaatggccaaatattctctaatcgatctgatggggtcatccgccagggtttgtttgtcctttcctttttcttccaccaattcaccgtttgtcccccccccccgtttatccctcctctgtcccattgtgtcctgtcctatccgtcctaaaatgtcctaaatgaatgctcccccgccgggggatgttctctctgccattaatcccttcgtctgtttcggcattcgtccccttccctcaggcttatatattccgcccgcgttgttgccccgagccgaaatccgatctgtcccttctctctgtttccctcccctcggggaagggtcactttccctccgcccaaaacgcgtcgtttcgtttcatcgaaattggcaaagggattcatttattcattcattcgtttgttccttcgttcgttctttttatgaattttgcctttccattcgttggcatttttctcccttttttttgccggtttaatttattttcctttgtctcttttcatttt

SEQ ID NO: 28214 - DNA, 1365 bp, Heterodera glycines
tcaaatactttcatcttacaaaaaattaaaaattattattttaataaaaaaatatatttcaatttctattatttatttgaaataataaaaatatttagtaataaccttgataaatatataaagaaatatttatataaatagttcttttaacattatcgagaacgagttaatataaataaataatgaaaatataatttaatttcaaaaataataaaacaaaataaaataaaaattaatacttgaaggacaaaaatttggatttaaaaaaatcttaaaagacttttacaaaaaaaaggagtattgcttataggataaaacgaaacttaaagctttaaattggcaaaagaaaattataataaaaatgtaaaataaataatctgtggaacataatttattagcaatgataaaaatgatataatggatcctacaatgacatcaaattccgtttcagaacatgaaattagaagggaaacaaaataataaactaaaacattctttattctctttaaataaattaaataaaattaaatcaaaaataaggcaacataaaataaaaattaaatgttttcaaaaatagaataaagaaaattgtatttcgaagattctgactgcgactatttttttcattgtcacctttccttttattgttaaaaaatatttttatgtaaaataaatgaagatgtgatgtttttttaattttgaaaaaatcatttttacagctaaaaacctaagaaatttattttagcctttgctttttgcagatttacaatattcaacatgttatgtttttaaaatgtaatttaaaactcacgatattcacaatataaaattttaaatatcgtaacactaaattttatataaatcaatgtattcataaatatttaatttgtataaatgaaaactttaaaacgacatgatttaatatttagttgaaggagaaaatggataaaaaatattttatttgttaaaaatgattaatcacttattttacaaaaaaataaaaaatatatttataaataaccaaatattcattcacaactaatagcttattcagcactatgtacaaatcaccgaaaatgatgcaaatacacaaataaacccattagcaaaattacttggttttttataaaatttacttaatttagtttactaaagacaaataatcaacaaattatttttttcaagcaatatttgtaatatgtatttaaaataatttaaaaatatataaataaagaataagctacaaataatttttaattgttatagaaaataaagtgtttgtaataatataatacgaaagataatattcaaaaataggacaattaaatcataaatttaacatcatttaatagtcacaaaaacatt

SEQ ID NO: 28215 - DNA, 1212 bp, Heterodera glycines
gatcactcccaacgaaatgtgcctggcacggacagtgtgatttctatgcccggattgaccggctcacacaaacaatgaaaatgagtcaatgagatcatttggagttcattttgttatttgtccgtcaattaatttgaaagtttcttgaattaactaaaaggatttagagcataattttgtgccattttaaaattattattaatattcaattaaaaaatagctttaaaataattcaatttaaatatttttattgacactgatttttgagactattttcaaaatatgcacataaaaagtaaaaaatatgcacataaatttttccaaattgggcaacattttcacaaattcttcaaattcgttaaatttaagctaaaaatctcgaaaatagctaaatgcaaaaatatagctaaaatttattaattttgaagaatctgagtaaaaatagaaaatttttaatttttggacatattttccattttttaaaaagttacattttttattaatatttttgaaaaaccccaaaaaatgaaatttttgaaaatttttcggtccttagagatcaaaagtttctgttccttgtttatgaattttgcaagctcttctcgtcatttttgtaccagtgttatcctcgggggttatcgatggcgctgatcacgaatctgacatcagattatcatataaatcatctaatctatgatttttcatcaagtgataacgtcaaaaaaattttttgatggattttcacttttactgttattcattcacaaacataaattccatcaatatgtatgtagctggaataattgttctagactaatgaaactatttcaaaaatccgaatttcttatgaaaacattttcaacacattttgtgattgcttataattttaaggaaaataaagtctgtacgttctgatgaaatgatagagaatgtatattaattagtaggcaataatttttcgaccaatttttctctcccggatgaacacattccgactggtagcctcatcatatttaaaaacagaaccagatcagtagataccacgtcatgttctttctcactgctagtttctgaagaaaatccagtggaactttgctgattggcataggcatttttgtccatgcttaccgcatagctgcgatatataaatgctcaatttttctgagtgttttaactccatattatgtattaatagcattttatttgcttact

SEQ ID NO: 28216 - DNA, 805 bp, Heterodera glycines
tgcgcaggattttgcaggatcccagtccgcaatcctgcatattttggaaaatacaggatttacaggatttgcaggattaatcctgccggatcctgtcctgtaaaaaattttgaattccaatcctgcaacaggacccgcaaatttgatttctatgcaggattcagcaggatcatgcattgattttttgaaaattctcaaaaatagaatgacaaatattcagaaacattcttctttcaaaaattctcctcttaataaaaatttggtcgtatacattaatctccttatccgggcaaagtttatactcgtaaacggtcattggttatattccctgaaaagcgatttatatttctaatacataaaattgaatttgtttagctaaaaatgaataaagcgtttgtcaaagcagcactctgctccaaatcgacgaatgtttgcctcttcaaacgcctcgtcagacccgtcgtccaaattggctcccgtccaatcaccggcgccggttttggccatccgatgaccaggcaaaagatgcaaatgtacagcccggaaatgagggcagtcaattaccaacagaagcgcacccacatgcatgtgaggcaatttttaaatttaggggtcacaaaaaaattcaagaaattttggcacttttagaaattttacggaggcattttgatattttatgggaaaattacgcacgaattaccaagttgcaatgcaacatttcccatcttttgaaaatagacacctataactggcattagggttattaattgaaacaataaacgggaattaaggcaatcctagaaat

SEQ ID NO: 28217 - DNA, 1017 bp, Heterodera glycines
ccacacgcatacttttttcgcttcgtcatagcacctatttttgtgcatatttggtctttattttggaatttttgtgcatatttcatgactttatttcagatgtattgaaaaataaatatctgatttaatttaaataaatttgataagcataactcttaataaaaataataattttatcaaaataaaatgcgtttcattttaaaagagaatttgataaaaaattgaaataccattaaacgagggaaatattaaacacagacatacaagttattaaaaacaaattaaaaaaagaaaaaaagaaaaatatttaaaataaataaattaaataatgaaatattagtacaaaaacatagataatttttgaatgattatgacctttttacaagctattttattattgtagctataataaacaacaatattatattaatataagaacttcattacttttataaaaaaatgattgacatgaaaattggacaaagaataaaattttttaaatattttatttgaagttaaaagaatagagcccattttttgtgtgttaaacctactgtataattaaaaaaaaatattaaaatcgtttgattaaaatttaaaataataataaatgattcgactttttaaatgattttctataaaaaatgtatggattttaataaatatttaatattattcctaaaaaacaaaattaatgagttttataacgacaatgatgtttactagagttgagcggtaatcggtaattgcaaaaaaaccggtaccggtactgaccggtactgcaaaaaccggtaccggtatcggtaccaactttttccaccggtaccggtaccggtaccggtaaaaaccggtaattttagaacataaaaatttttggacaaaattttccaaatacaaaatttttattcagttttcgcgcgagtgcctgttttttagcattagaattgttcagaagtatatgtatattgagggtgaccaattttttttttcaaattcaggacatagaacactaaaatt

SEQ ID NO: 28218 - DNA, 633 bp, Heterodera glycines
ccgccccccccccgcccttcaaaattttgaaaaaaaataaaataataggagactcagaattttgaaaattttttataaaaactgatgacaagctaatgtgataaaacaggttaattcttttcctttcagtatccctgcaaagtttggggcgcttctgataagtttctgaaaaaaaagttaagcctaaactttttggcctgtttaaaaaggaattaaaaatttttaaaaattttattcatctccctttttgatagaaaaagcatcagagtgcctaaactaacatgtaaataaaatttggtgcgtttcagaaccctttctgaaaaaatatttaagaattaattttgcaaaaaataaataaaaacgaaagactcagattttcgaaaatttttttgagccagctagctcggcgctcatttcagtgtaagttagtcctttaccggggagtatccctgcaaagtttggtacgcttctgctcaattagcaaaaaatatgagtgatcgaattttcactaaaaaagttaagcctacattttttggcatatttaaaaagcaattaaaaaatttttaaaatttaataattttcctgcaccgaaggtactcactcggcctcttcgcggcctcgtggtgggccttc

SEQ ID NO: 28219 - DNA, 1273 bp, Heterodera glycines
ctctctctcatcttccctctccctctctctctcccattccctctcccattcccctctctctcatcttccctctcccatcgcctcctctctctctcagcttccctctccctctctctctcaccttccctctccctctctctctcaccttccctctcccattcccctctctctcatcttccctctccctctctctctcccattccctctcccattcccctctctctcatcttccctctcccatcgcctcctctctctctcagcttccctctccctctctctctcaccttccctctctctctctctcaccttccctctcccgttcctcctcctccccattcgtcgtttcctcgtcgtattctcccgcctctttccctccgttctttgccctttcttcgttcggactttcgtaatttgggtaaatgtcctcctcgtcttaattggtgtgctttgtctttcccttttttgctgtgatttgctcactttgtcctttctctctcctattttctcgtccgtttggcctttcccccgcctttaaatggccaattttcaaatttgaattttgctgtccatttccttcgtttggctttgtgttttgaattgtctttggcgtcgtcgtcgttttcgttgtcactatgtcttctgaagttgtgccgttcgtcgtcccttctccgagtgcgtaatttgtcgtccttttcgctgttgtctcataaactgtcgttgtctttgcccccttttgcgtcgtcggtgcgttttctttctctgtggcctttggtttttctgccaatttaaaattgttcactgtgacggccaaaggagaaaagttttgaggcgaaggcggcaaaggggcgaatgctttcagctgctggtcgactttggaattgggcagaagaaaggaagcgattggcttaagaaggcattcttttgttggtcagatgtgagtgattgtcttaatggtcgtttgtttgcctttgcctctcctccgactgaattcaattcggacggacaaggacagaatttggcgtcggcgccgtcctcgcccggggggcccttctctccgcgctgccccggctttccctccaatccgtctaatccttgcttgccgacccttccgtccggtccgggcattccgatgacaaagtttcgttttcctctctcgccttgtttacccgtctgaccgggcggtcccttcaccccgggtaatcctgcaaattcagccctttattttatttaggcgtttttttcagagggttatctttgcactggtggacctgca

SEQ ID NO: 28220 - DNA, 291 bp, Heterodera glycines
ctgcggacatctacatttttgaattgaaaaaaagctcgtttttactctttctttttctccatattgaccatcatactcatactcccccacccttttcttcttccgccacccaccctttctcctccttcattttttttttcctttccttctccaaccctctcctccctctcttgatagtttaaactgaaggcgggaaacgacaatctgatccccatcaagctagcttctgcaggtcctgctcgagcggccgcccggggatcgatccccgatctagtaacatagatgacaccg

SEQ ID NO: 28221 - DNA, 1562 bp, Heterodera glycines
cagcccattccaccttccgactgggcagagatcgtgtccctttgacaaacttccaagcattccacttgagagcttctttgcccgacggattcgtgaagcacaactcatcatcattgatgagatcaccatgcttcacaatacggtgattgaggtcattgaccgtgtgtgcaaagaaatggcaattccccagtacaaggaccttcccttcggaggaaagacggtcattttcagcggtgacttcaaacagtcactgccggtcgtgcctcatgaaggcataaccgcacaagttacggcctgctttcaaacttctccgttgtttcgtcaattcaccacaatgaaactgaccatcaaccagagattaggccaaggccagcaagcgtacttgcaaatgtgccgccaaattgggctcggagagaccggagaacacttctggattcctccgcagttcatcgtaaagagcagggaagagctgataaactttgtttatccaaactttcaacaactccttggcaatgaaaaggagctgctcaaccgtttgatactcgccccgcacattgatacgtgcgacgaagtcaacgaaatgatgatggcgaatgtgccaggtcaagtgcgggaatatttgtccacggacaaacctcttgacgatcgcccattggacatcgatgagatcgagtccgaagtggcagcattgaacggacgcacagactctgggatgcctccacactgtctgcgactaaaggtcggaagcgttgttgtcctccttatcaacaaaagtgatagggaagggctgatcaatggcacacgcattgtcctcgaagaacttggcgatgatcgccttgtcggtcgtgtaatcaatagcaatgctattggtggccaagtgaggtttttccttgaaagatctcgcaatgtcttcgaggacaaaacgcctggtgggctgaaatacgagcgtttgcagttcccaattaagcctgcattcgctatgaccattcaaaaaggtcagggccaaacaatccgcactgtcggcattgacctggaaagggaagtatttacccatggtcaattatatactgccttttcaagggcaacggacggcaacaatgtccgtgtgcatgctccaaaaagggagatcgatgcccaaggtcaagcgaaagtgctgaacattgtggccaaaaacatgctcaaattgcaataaaagagctatccaagccaggttggcatgccaacttcattacacaaagccttgggtctctattgcataaatcaaacgagctatagtccagtgtgtgcggtactgttccgatgccgccccattctcacctgcacttaaatatggatataaagtactgccacctggactaagggagggaggagggatgacgtgcgagttagggcacttccggtttccattgcactgaaatatgcaatgtgtcagctcattactgagtgaaaccaagtgcatgtcggctgacgcaaagaccctaacacaagactaggtagcgaagctcaagaagcgcgcagcgctttaaagcagcagaaacacgcaagcacacacccgctagttt

SEQ ID NO: 28222 - DNA, 394 bp, Heterodera glycines
ttttttgtaaatgtacgaatcttttttaaaaattaacaaaaagtttatcaagaactttcaaactgtaccaacaatgtttaatttggttgaaaaggaaaaaaaattatgattaaaacaacgtccagtgactgtttgtccaactccattaaaaatagagcccctggtggctcaattagaaaaaaattgtatccaaatttccatatatttttttcaccatttgtagagtaagccaattggtatcatggcagttcatacaattttttatattaaaaaaaaataaataaattttactcatttgtcagatgcgttcattggtccgtacgcgcaataattttgaggttgaacgcatcaaactcacttgtgagcaaccacttgcccaatcagtcgccgatgc

SEQ ID NO: 28223 - DNA, 1041 bp, Heterodera glycines
tatctattgcctatttctccatattttgtgtctaaaattgttttgcttattgatttgttcatcaatggatttaatattttctgaaaattgattataaacaatgagtaccaatagtttaaggaaatgtcccggaaatagattatagataattttgcactaatgattttagaactttttcgaaaattgaataccagtaattaagaacctcaaagggcgcccgtgtgattttgaaactcaaaaccataggggggaccccatggttttgcatttcatgaaaaatttttttactcctaaattagctaaaatgcatttttatggcataatttgaggtgctgaatacgtatatacgctttattttgcgtttcagattttttggaaggtgtttaaattttttgaaaaatcgtcaaaatttgagccccggaaaatccagtgaaaatttgaaaattcataacgctcttcgtttttggtcaaatttagtggaataaagtttgaaaaatagcaaaaaattaggagaattttatgagatttatttggaatttctatcttccaaaataaaaaagttattccagaatttctggaaaaattagatttttcagaaaaaaattcctaagtccattctgaaaaagtattttataaaaataatatactcaaaaaatccgcaattttttgctctattttataaattttatttaagcttattatcacttttttgaaaaaagttatagaaataaaagtgattttggcattcgggaccaaaggggtgtgaccatgatttctgagtgaaaaaattttttcaacaaaaatcttccaaaaacatgtctttaggggttatttgggccgctgatcacgaatatgcaatcagattttactttagagatggttaagacctcagaatccccgtgttattggggattctgaggggtgggagcgcccgtcctgaggccgcgaagcggccgaacgtctcccaaaaaaattacaaaacgggcgcgaagcgcctgtcctgaggccgcacagcggccgaatatccccaaaaaattaaaa

SEQ ID NO: 28224 - DNA, 939 bp, Heterodera glycines
attaattgggtgcatccacttccacaaggtgacaaattttccgaagaaattgccaccacttttcgagaggagtgggccggatttgaacccaaacggggaccaagcgagaaaacagaggcacaaccaactgagccatgctcacatttaaacgaggggggaattttaattcttttaaccatcatttaaaaagtatttgcttgagaaaattcaaattttagtttgattgacatttccttgaaaattaaaaacataatcctcgataagccatgcttagcttaaacgatacctttttggcaattttttaaattaatttttttttaaattattacaaaatagagaatttatttcttggaaaatataattatggaataatattttttattttttctttaaattatttccgtcctatcatatgtatcaatttgttcccttgagaaaaatcaattatttatgggtaaaaaatgtaatattccttttgtttcattttgttgccaaaaaattatcctcaacaaatttaattataaaaaaaataatatttatgattgattttttttggtaacaaaacaaagggtcgaaaaaattgtaaattttttatttgacgattaaaaaaatggaaagatatattaataagaaattttataataaaattttttaattctcaattttttataaatttttattttttaattatttcatttgccttcatttctccgtcacaaaacgaaaaatttaaaagaaaatgaaaattttaacgaaacgaacactaaaaaaagaaattttatttaattatttttttgccatttttattttatttaaattaatttttttttttcattgttttcatttgccttttcttttccccacccctacacacttcacgacgctgggcttttcataaaatcactgacaaaaatgagatgagaacagcacagttttcag

SEQ ID NO: 28225 - DNA, 1232 bp, Heterodera glycines
  unsure (1)..(1232): unsure at all n locations
ggtattcatttctcgtcatatctcttcccttcccaaacaattagacagccgaaaattggaaataaaaatttacttgattatatcaaagatagatagtgattagtgaatttatcttttagcttcgatactcgcaacactcagataacccaaaaaaaaacagcggtactgatcttttcgagcatcccgactataattatttcactaattggacagacaaattgccaattgttaaatatatcatgtattcaggaatgaatttgactattgatcgataattttaagtaattaaattttttattcatttttgtttcttacattttaaaataaacaatttggtatttaatttacggtgtccaatactcccccccccgtctcccctccccaaaatgcctcgtcgaatgggcttcatcttgatgcgcagcccttggacatgtttgattgggtctttcttgtcttattgcgaatccgtaatcagtttgtacagtttctttaggggggggggattaaaagagcaaatacggtaggtgtcatattagcagaccgtgaggaatcgattggtatctaccgtatttgccctaattatcccccaatctttattaatcccccaatctccaattatcctccagtctaggaggggtttgaaaaataatcccccagtctccatttatcccccagggggataaatagaattttcagaaaattatatgccgtcaatttttttcaaaaaaacaaacaaaatcgacagtaaaagtactacaaatgccaaaatagtggcaaagattattgacattttttaaatccaaaattcttgtcaagaaaaaaatgagggatgaatagcttgcaaaaattttgaaaaaattagttaagtttcttaggggtgtatttttttcttgcattttgttgagaaatttttcaaaaaaatgtcggaatagtgaaaaataggtggcaaaatgctaaatttgtggcaaaaaaaaactattttagtggccaacttccaaaatgttttttgtagtggcaagcccaaaatagtgatttaaaaatgccaaaatgacgacgaaaacccaaaatttttcatatttttggggtgtaatttttaaaaatttccaaaaattgaactttaggtgtatttttcacttttttgcatttttcctgggaaaatttgccaaaaatggccgaaatacngactaaaaacccaaaaatggcgaaatatggatttatccccgaaaaccccc

SEQ ID NO: 28226 - DNA, 1460 bp, Heterodera glycines
tcacttggccattgtgttttgttacgccttctgtgatagttgatccatcaattcggcttccaattgattggcatcactctgcctcgttgtctgctgcttgatttgtttcaacttttacccccgggggaataagtagttggctggtgactgggcaattgttggggacggatggatcattggcccattgggaacggcgacggtgccagctgtgggttttgctggggcgaagggacggccaattgcccccatttcctcctccgtcaaagggttctctcttctcgccattccctcgccttcgattgtttattttcttgtggcccatcattttttggcagagtgtcccaaagtcaatcactcgggatgactttttcctcctctcccctcccgccctctccctccctttttccctcctccttaattaagaatttccgatcaaataattacttctttgtgtcactaattggccctcgggcgttaaacgacgactgacagagtaattaaatttttccgacgccaaaacaatggcagaactcatcaccaaattgtgtacgacaaaactggccattttgaaatggcttcaaatggtgcgtttttcgcactccctaagttcggaaacccttccctttttgtttggtcttttgaattttcgcccattccatgccaaaatttgtccgtccctttgggggtgcttttgtcagatgaatgaatgaatgacttttcgtcccccgcagctttgtgccgtcatcaccgtcctttttctgattgacggtcagcgccagtcgtggttctacactttggtaggcaaaacaaacgcatttttggaattctttaccatgccctccctaattacctaattagcaattaattaatccctttctctccctttttctctcgtggttcaaaattctcaattgctctttcatttggtcaggtttttgtcgtttccattgtgttcggcctcatctcgttgctcactctgatcgccaactttttcctccactcgcgcaatcagtcggtccctctgcccgcctttgtccgttttccgtcctatcgcttccaaatttccaaaatcatttatttctccaggaaattggcttcaatgcgttggctgcctttgtctgtttggcatttgccgttttgctcaccatcgattcagtccgaatgttcggcgacgacttcagccaccaccgctttttggtgggcaatttggaaaaatggcaacaaaatgatttgcccaaaattaaaggatttaacaaaaaaagaaatgctttagccaccagcgaacattggcaaggacgggtggcgcaatcggactttggtggtggcggtaagtgaacaaaacagccaaaatggaggtcgtttcagtctagcgagaatcccgaacacccaatcataaagcaaagggattgggttcgatttttaaagtgagagagggacagtgaattgatgccatggattta

SEQ ID NO: 28227 - DNA, 1312 bp, Heterodera glycines
aattatcttttcatttccctcactgcgacccctgtcctccccgtccactttgttttctcgttcgaactctgtttttgaattaaccccccccccctctccctctggcaattacccatacgccccattaatcgcattaattaggtgccgttttgcactgttcctgttggaccactcgtcgaattgtctcgcaaaaggagggcaaaaaagaccacgtgcgcgagaatccacagctcactttcaacgccaacacaaacattttggagcttggagacccaatgccaattgaggtgaagccctcattagattattaattacaaactttttaaccaaattaattctcagaaattgatgtctgctgacaacggatggtacgacgaggcggacgacacggtgacggtggaagtcgaagtgattgtggacgagccgtacctcagagagtcgcggtggcgcgccgtccccgtagatgatgccattgacgcggaaggctttgggaacggcggttttgcccagcccgttggatttggcgatggttgggcggcataagctgatcaatgcttcaaaatgccttttcttacctttgatcattcctttgtttaatcctgttattttaattaacatcaacatttcggctcttatatggcttcgcctgctactctttgctgtcctcattttgaactgcttcgactgttgccatgggtaagctttcggatttggaagcattttgcctcacttttttgcttatttctcggtcaattattttcccatttttcagcagatttcatcctaagtccagcacagttccaacgactacgacgaagtcgcctccacctccaaaaaaagaaaaagaaactggtgtcttcaaactcctcccaatgtgggccaccattgtcatcgccgttttaattgggtgagtttgtctgctgcttttttgccgtgccattttcctccgtctgtccgtcttcaatttgttccccatgttcagcatggtcatcgcaattggcattgtttgctgcgcgtggtggtgctgccttcgtcaacgatatgttcgccgttctgcaactgatgggccctcctcgtcactgagcgacaccgaaaagtcaaagggcggcggatattcgtcgaagccgagcggattgatgtccaagctgcctttatggaagtcgtcgtcctcttcgaccaaaaccaaaatgccggacagtctcaaatcggacatacaaccaccaagggcatcatcatcaaaaacgaaagacaagtcttcgtcaacaatcccggacagcaaatataccatgctgacgcagaagcatgaacggaa

SEQ ID NO: 28228 - DNA, 1840 bp, Heterodera glycines
ttgaaaaaatataatttatttcttgttgtatttttttggtctattggttaatttccggaaattttttgtctgcaagatttataaatttgtaaacaatatttcttcttaagcatttattattttccaagagtaaataaaaattgtttgaagcaaataaatataataaataaatattattgaaacaaattattattatttttattgaaaaaggattatattaaagaaatgctaaaatttggcatttttgtaagaaatgaaacgaaatgtaaaaataaaatggcaatttgaaagatgacgtcaaaatggaatcattgttacataaatgcatacatgtaagcataaaatcgctaaaaatattaaaataaaaatgtgtaaagcagaaaaatttcgataaaattgatgaatcgaatcaatcaatcaaataatatagttgcaaaaatttccatttgctaaattcttatattctactgatattataggattgactgatatgcatatgaaaaaacatttttaattttgtttgagatgagtagaaaaataataaaataagataattttgtgcaaaattaaattattatttatattttaaatttgtcaaaaaatttgttatttaaaaattagttaatcaattatattacttatcaattaaaattggaaaattaataaaataagataattttgtgcaaaattattatttatattttaaattcgccaaaataaatttattgttaaaaatttttgataattaactcaaattttcatccccaattaattggttgaaaaattgatgagaaaatgtaaataaaaattaattgtaatggaaaaatgaattgaaaaagtaaaaaaaaataataatttttttatatttatttattaattcaataattttcattttaaaatattttattttttctaagactgcttggacatgtgcctggaagccgtttgtgtatctgcgcttgctcggcgccattgtgcccccatgtgccgtgttgtggattagcattgagcgcttctttgccatctttgcgtcggcaatatatcggaacaggatttcgccaaagtattattttatatttttaataattaaaaatacaattttttcgggttttaaaagtgtagtcctaaaaaagaagagtgaaccctaaaaataattccaatttagctgtaaatttggtgtgaaaaataaattttaaatttttaaatttgttgttattattattataattgttttaatttgtccatcaatttcaccaaatattatcaaacaataattaatacacttgttacagcaaaattctcggtcaattttctaaaaatttcatataaaaatacaacaaaatcaaaaactctctaaaaatttacttttagaaatttaattataaataaatggcccaagaaaattcgaattaatttaagttttaaggaaagaattttttttgcagttgatttgttatatttgcattttcacatcattacacttttggattatttcccattttttggcagttttaagggaatattttagtgcgaatttacaatttttcgaatttaggctttttttttggcctctttagtgcatacatcttaaaatttagtaatttaatttgaattactaaaaaatggccttaatgccaaaataaataaaatattatatattttttgtgattttatgatccaaaaaatagaatatctcgtatgctatgcctataaattatacattttgaagcaaaaatatcccgtccatttgcattcttgtatacaccgctgtggctgtgcttattgcatacacactatcgtggtacaaccgttgtgttcatgtggaggcatactgtggcag

SEQ ID NO: 28229 - DNA, 1874 bp, Heterodera glycines
aaaaaatcgattttttcaagggttcggttgggggttctcaaacaattatggggagcaaaaatcccacggcagaataaaagtacaggctatagggaagctattccgggaggatttcggtctccccataaatctgggcgcatcgttcggggggactgccccgaaaacaaaaaaatcgattttttcaagtgtccgtttggggtactcaaacaattatggggagcaaaaatccaacgcagaattaaagtacaggctatagggaagctattccggaaggattcggtctccccataaatctgggcgcatcggttcggggggactgccccgaaaacaaaaaaatcgattttttcaagtgtccgtttggggtactcaaacaattatggggagcaaaaatccaacgcagaattaaagtacaggctatagggaagctattccggaaggattcggtctccccataaatctgggcgcatcggttcggggggactgccccgaaaacaaaaaaatcgattttttcaagtgtccgtttggggtactcaaacaattatggggagcaaaaatccaacgcagaattaaagtacaggctatagggaagctattccggaaggattcggtctccccataaatctgggcgcatcggttcggggggactgccccgaaaacaaaaaaatcgattttttcaagtgtccgtttggggtactcaaacaattatggggagcaaaaatccaacgcagaattaaagtacaggctatagggaagctattcccgaaggattcggtctccccataaatctgggcgcatcggttcggggggactgccccgaaaacaaaaaaaaatcgattttttcaagtgttcgtttggggtactcaaacaattatggggagcaaaaatccaacgcagaattaaagtacaggctatagggaagctactcccgaaggattcggtctccccataaatctgggcgcatcggttcggggggactgccccgaaaacaaaaaaatcgattttttcaagtgtccgtttggggtactcaaacatttatggggagcaaaaatccaacgcagaattaaagtacaggctatagggaagctattcccgaaggattcggtctccccataaatctgggcgcatcggttcagggtactgccccgaaatccaaaaaaaaattttttttggataaaaattatttaaatgaactgactagataatatttaaaataggttatttctcttcctttcagtatccctgctaagtttggtgcgcttctgatcagtttctgaaaaaaaagttaagcctaaactttttggcctgtttaaaaaggaattaaaaattttttaaaatttattcatctccctttttgatagaaaaagcatcagagtgcctaaactaacatgtaaataaaatttggtgcgtttcagagcattttctgaaaaaaaatatttatgaattaataccacacaagtattatttttttaaaattatttttttcatttatcacccaacgttctagactgatcagaagctcaccaaattttgcagggaaactgctgagaaccctacaaatgcttataaattttcttagaattttttgcctggaggaacacagttcttcacacttaccacaccagcattatttttttttaattatttttttcattttatcacccaacgttctagactgatcagaagctcaccaaattttgcagggaaactgctgagaacccttcaaatgcttataaattttcttagaattttttgcctggaggaacacagttcttcacacttaccacaccagcattattttttttaaattatttttttcattttatcacccaacgttaaagactgatcagaagctcaccaaatttgcagggaaactg

SEQ ID NO: 28230 - DNA, 1050 bp, Heterodera glycines
ggggggacgcccccggaaaccaaaaaattcgaattttccagtttcctttggggtactcaaacaattatggggatcaaacatccaacgcaaaattaaactacagcctatagggaagctactcccgaagggattcggtctccccataaatctaggcgcatcgtctcggggggactgcccagaaaacaaaaaaatcgattttttcaagtgtccgtttggggtactcaaacatttatggggagcaaaaatccaacgcagaattaaagtacaggctatagggaagctattcccgagggattcggtctccccataaatctgggcgcatcggttcggggggaatgccccgaaaacaaaaaatcgattttttcaagtgtccgtttggggtactcaaacaattatggggagcaaaaatccaacgcagaattaaagtacaggctatagggaagctattcccgaaggattcggtctccccataaatctgggcgcatcggttcggggggactgccccgaaaacaaaaaaatcgattttttcaagtgtccgtttggggtactcaaacaattatggggagcaaaaatccaacgcagaattaaagtacaggctatagggaagctattcccgaaggattcggtctccccataaatctgggcgcatcggttcggggggactgccccgaaaacaaaaaatcgattttttcaagtgtccgtttggggtactcaaacaattatggggagcaaaaatccaacgcagaattaaagtacaggctatagggaagctattcccgaaggattcggtctccccataaatctgggcgcatcggttcggggggactgccccgaaaacaaaaaaatcgattttttcaagtgtccgtttggggtactcaaacaattatggggagcaaaaatccaaagcagaattaaagtacaggctatagggaagctattcccgaaggattcggcctccccataaatctgggcgcatcggttcggggggactgccccgaaaacaaaaaatcgattttttcaagtgtccggttggggtactcaaacaattat

SEQ ID NO: 28231 - DNA, 1859 bp, Heterodera glycines
ttagcttctaaacatgttacgctttcgaatgttcctttgatttaacatgtttttttcggaaaatgcccaaattggtcaaccaagatttcgaatatgtaagcactgtttttgataatcaaatgcagaattggcgcaattgaatgacattaaattttgaattttagcccagcataatttttcgggtttcccggtttcgctcccggaaaattttggactctcgcgcttccgccaattttctcactaaaagcggaagtaaaaaattcaatgctaattgtaagaatgttggtaaagaaattgacctcagaacgcaaaatttacctatttttatgacaaaattcatttaaaaaaaggccactcaattttctatttccccgccgcgacgccctataaaaggaggcattttccaccgaccgacccacaaatttctctcatttgtcacaagtacatttattgtgcctaattttatttgtgtcgtcggcatttgtacatattacgacagttcgtcgtcattatttgtgtcttcaccacacactcgtcaagctgctggttgagcgcaatgtccaagagacggcttcgacaggtgtcactcatttggggatgacgttgtttttcaatttgaaaaagtcattcttggcggcatctcatgaatccaatcaaaatttgcgaatccgatcaaatccaatcaaaatttatgagtctgatcgcattttgagtcaaaaattaatgaacagttccgaattcattgaacatttctttccaaatgcaaattttttcggagtttaggcaactgccaaaaagcgaaatttttcggaaattgtaattccgatgtccaaaaattccctggaaatctgttcttccagggcaggactgtttgtcatcaaatgctgatttcttttttccttttccaggaactcaaggacatggcgaagaacccattgcctgagggatgcactgcacggccacttgatcaacggaacatgaccagctggacggtaaccatccgaggccgggccggcacaccgtacgcaaacggcaacttccaactgagcatggcatttccgagggactacccgttcaaagcgccgcaagtcacgttcaccacgcgcatcttccacccgaacatcgacacacggggcaaaggtgtctggacattctgcaaacgcactgggcaccgacgttgaccatcgaaaaaggtggcgtggatttggtggtggatttgatcatgttttaaatggattgatcactttaatgctcttaactttttcaggggaattaaaatccgctaagtgtgtttgattagcaaattcaaaagatttcattgcgtttcatcagagttagcgaaaaagcgagcgaatttttggaatttatggtcttaatcgggcatgaatttgatggcgttggttttgtgtggtatttgtgaagtttgagtgatcaattttttcacatacaatttttggctgcagaaatcgttaatttgtttctctgtctttacagttgtgctctccatcatcgttctgctgaatgacccgaacccggacaactcgcctgtcaatgcgcaagctgccagtttgtaccggactgaccgtgcggagttcaacagacgcgcccgtgagatgacgctcgcctatgcacgatgagatgatcagcacgtctttctgattccactaccaattatgtattactcattcattgtatatattattgtactgtatgttgtaccatatttatttgtgtgccactactgtgtgtctatttgtgtattgtatttgtttgcgtgtatgttcaaatccggtaaagaattttgtgctttttctaggggggtatccaaccttcaggaattttttttcgaaaactttcct

SEQ ID NO: 28232 - DNA, 1490 bp, Heterodera glycines
  unsure (1)..(1490): unsure at all n locations
ttgacaaaaaattattcttgtatatatgcgaaaaatgatcaatttaggattttctcgttgtaattgttattattgttataagtatttgcttttttcttacattcatgaattcccgggactttaagcattcgtttgataccaagaatgtagatattgaacaagtaaaaatttatggccaaagacctaaaagttcattggacgtctaaagtgtgtttgctatatctttttttgtgatagcatttgaatttatttattattcatttttatttaatttatttttcattttttaattttgtattaatgcgctgctattaactgctttttcaccaatttttgttttggcgctaccaaaggaaggtctggaggtgtccgtggagtttcggaatgaaatttagtgggtggatagagcacccatgggttcttaagaaaaatgtttttattttctgcgaaatgagtctgagtgccgagttatgacgtgccaaagtttttagttttttactattaaagaaaaggaataattatttcgttcctttgcaactgtgtaatggtgtagaggtagtgcgttagtcnaaaattttttgtgtcccaggttcgaatcctctacatgcaaattcattttagacttttattttttgttttttttgagcaaggtcaattataaaaaaatttttaatgaatcatctttatttttaattttattaattaaaaaaattcattaaagataatgtttcaataaactttcagttaaaaacaaataaatttttgtcgaaaactttatgagtaaaacttatttttcaaaatgaataaaaaacagaatttttatcattaaatttttcgtgataatgaaaattgactttggcataaaaagcaaaaataaaaattaaaaaaatgaatttgcaagtaggggatccgaaccgggggtttagaaaacgctgactagcgcactaccgctgcaccactgtacacggcaaagcttcacaaacaattatttaatttgtttattcattaaaaaagtttggcacgtcataactcggcactcgtactcatttcgcagaaaataaaaccacttttcttaagaacccatgggtgctctatgcacccaccaaatttcattccgaaactccacggacacctccagaccttcctttgttagtatcatcgagtgactcactgctgcagaaatcctacctgcttagaatgattaaaatctttgattccaaaccatttgagttttagtcataaaaattaataaaattatctttttattacctttacgctatatttttttgctggtgttcttgtgatcactaaaggataaagataggtccattaaaaaaatcaattctttagctaattttttaaagaaagtatgattggggagacataagcgcaaaaataaaatgtcaagaatttattttttataatgagcaaaatttcgaatttttcttgaaaatatgcaaaaccaatcataattttgggtgaatccgaat

SEQ ID NO: 28233 - DNA, 820 bp, Heterodera glycines
catcacattgcacacgtatcatcacattatactcgttccatcacatattacgcgtcccatcacattttacgcgtcccatcacattttacgcgtcccatcacattttacgcgacccatcacattttacgcgtcccatcacattttacacgtcccatcacattttacgcgtcccatcacattttacgcgtcccatcacattttacgcgtcccatcacattttacgcgtcccatcacattttacgcgtcccatcacattttacgcgtcccatcacattttacgcgtcccatcacattttacacgtcccatcacattttacgcgtcccatcacattttacgcgtcccgtcacattttacgcgtcccatcacattttacgcgtcccatcacattttacgcgacccatcacattttacgcgtcccatcacattttacgcgtcccatcacattttacacgtcccatcacattttacgcgtcccatcacattttacgcgtcccatcacattttacgcgtcccatcacattttacgcgtcccatcacattttacgcgtcccatcacattttacacgtcccatcacattttacgcgtcccatcacattttacgcgccccatcacattttacgcgccccatcacattttacgcgtcccatcacattttacgcgtcccatcacattttacgcgccacatcacattttacgcgtcccatcacattttacgcgtcccatcacaatttacgcggcccatcaaattttacgcgtcccatcacattttacgcgtccccatccattttaaccgtccccacacattttacgcggcccat

SEQ ID NO: 28234 - DNA, 1223 bp, Heterodera glycines
gccgggtttttgaaaatttttgccgggtttttcaactggtttgccgggtttttgagttttggcgatagcacccctgtgcgggattcgtgatcagcgaccccggaaaccctatggaaggtattctacccgactctttaaaaattgtattttttttaaatcgtcagacaattcagtcccttcaaagtgaacattttattacttgatttttttggaaaaaaaagcatgaggacgcaaagggaaaatacggcaattcaatggaatatggtaatagaggaataccaagggaaacatggtaatggaggaaggggaaatacaataatagagggaatatcaagggaaatatggtaatggaggaagagagaatacggtaatgggccctataaaaagcggattgttctcgtggcgatgtcatcggacttggcattaatttggccactcgacgtctcatttttcacgaaaatgtaagtgttgcaattaataacacgatacaaaaagagcaaaatagccgttccatcatcggattggccatcaaacatcagtcctcattagctggaaggatcacaatttgccgtggcactttttcttatgagagcgacggcgattgctcaacggaagcccgcaatagaggcaatcgaagaaggaaacggttgacggggacacggtcggatgtggcatcaatttggcaaatcgccatttgttcttcaccaaaaatggacagcgaatgggtcaataaaaaacaataaattatttattatttaaaactaattgccaattttgtgtgtaattaagatctcacttttgtggtggattcgttgccttctgatccgccgttattcccttttgtttctttgggtgattctggcgacaaaattgaggcaaactttgggccgaacttcaaattcgacctcgccacccttctctgatctgataaaaaaagaaatttgttggaagatggcgtattttgtgttttaattgacattttacaaatatttatttttcttttttttaaatttattcgatttttatatttttttaaatttatgcacattcgaaaagataaacaatttttatttttgaatacaaccaaaacatgcatccatctttccaaatacggtcgaagttaagcgattctgctgttggtcggttttacgtgttccatatttatgccatctcgtcggatttattagatttttaactgttttttagcggatagcattttaact

SEQ ID NO: 28235 - DNA, 646 bp, Heterodera glycines
ctggcggtgccggtggcggacaaattgaatttgcctgcgggtgttgtgccaatatatgaattatctttcatcaacacacccccgctttatctctcccctccctgaaaacacttctggattatccaatgaataatctgtccaaagattaacctgagtgaaaaatgtttgcactggttaatatgtcaaaccgtaaaaacgcacaaagcaaattcaactcaaaattaacggaaagcctttacttgaaaaaaaatttaaacccataaaacagttagactcggtaaaaaaatcaaaattttttttttttaattcaaacaataaatttcttgaaaatttgtgttatttttatttatgccacttgtataaaatcatcccccccccccctctccactgctgaggcaggtcgtggcacggaaaacatttttaattccattttctcaccaacggtccagccatggttccgccaattgcttaatcaaactaaacgatgttgggtttgccgtgaattaaaggcaaccaacagcaattcgccagtgccgatgccggtaaattaatgataataataggtggtggtaatctgtgcgcgaccaatgggctttggcccgtgggaaaatcaccccccccccctccgtaccacccccctccctcc

SEQ ID NO: 28236 - DNA, 1629 bp, Heterodera glycines
  unsure (1)..(1629): unsure at all n locations
atcaatcgggaggtttatcagtgactctgctgttatcaanaaagataatttttgttctaataagaaaggatgctttgtaagctgatcaatcggctgatcactgatcagttaaactgatttcaaatcaaccaaattttaaattgtgtttaaatttgcaggtattacaacggctgatcaaaacgcggggaaagtcgcagatgcgcaatatgaatgtgcaaatggtggcagctgagaaattggcacaatgtcctccggtgaaaaaattgttttgcttattgtctatatgcccccacggaggagatgattagaaaattgaagctaattagtatgatcagtcgagaatagaacttttccgaggctcgaaaaccgagaccgttagtcaagagcagccccaacccgcctaattagttctcgggattctgttcgttcgttttttttggcattaccacagtactgacaataattaaaatcgccgcccatttaaggacgcgttcgacgtcattctcgacgagaatcagctggaggacgcgtgcgaacacctcgcggactatttggagtcctattggcgtgccactcatccgcccgtccgctcgccgccgcgcataaaacgcggcccaatggccaaccgcggaccggtggctgccgcctttacgcccgcccaaatgatgcaggtgggagaagaagctgccttccagcattttcgttcttatcaatcaatgccatggcatttttgatagcactagctgatcatttgctcgtagaacatttatcccactgatcactgaccagggctcatttccttgacatttataaaatgcttaatattatattaacaaaactacaattcttaaattgatcaatcaattaattgggttgatcagtagctctgaacattgcttttcaaaatgttgatcagtgatttgtatcagggatgttacgaaatttttttcctgttcttagtactgagtcgacaatttatctgtaagtcaacaaattcccaaggaaaaaatctgaaaaaatactaaaaatttcctttcttacaataatgaactgagataaaaacaaaatgccgattttcgattgctgacatggccctcaaatggaataattagtaaaaaaacaaagtcgaaatgatgtatgtatgctattgctcgtcggtgttcaatcccaatttagttatttagccaaaaagcgctgaaaattaataaattttgatttttttataccgatcaattaattaattaatcgagttgatcactgctgatattgctttacaaaacatcgatcagttgtgatttatttattcattaaataaccaattggttccttgaataatcgtttcttgagtaatcagcagctgattagcttatgtgtaactctattatttctctttttcagggtgcccatttcggctcgcccttttaccattcgtccgccgctgctcagaattcgtccgccaataacactccgccccaatcgcaacgtgtgccaaccatcgcagtacagcaggtaaaagcgactcgaaaaagcccaattagcagncaagtggccaaaacaacgaaagcaccccgagtctatgctttttggnaccatctcccattttttgggtaattctcatattcattttgg

SEQ ID NO: 28237 - DNA, 1375 bp, Heterodera glycines
  unsure (1)..(1375): unsure at all n locations
cttctgacacnagctgaactccaacagcaaagtcggcgaagtgtcttcaaccgtcccaccaatcattccttctcacaatgcgtccactttcgctccgtctgcggatgaagaagagcatcagcgagttcgctgctcttcagtagttccgttcatcacttcaccaacagaggatgatggaaattgtgagcaggaggaggaagagaatgaggcgaacgaagaggaggaggaccaattcgacagcgaagtgttcaccattcaattgtgccgttgcccgtacacgaaaagcttcggtttttcggtttgcgatggcacagccgacgaaacggcaaggggagagagggaacagcagagacagggcggcatttacgtgaaatcagtggtaaaagacggaccggccgataaaagtggacgattgcagccaggggaccgaattctgaacgtagggcaagcggaagcagcctctggccagcaattttggcattttattttcagataaacaggagaagcatccaatttctcacgtgcgatttggcacttccgttgttggccaccgatcgcgtggaattgcttttgtcgaggaaaagaacgaaaaaaggcggattatttaaaaaaataaatggctgattaattggccatatttatgtgaagagaaaaattcattgtgaaagaacgggaaatgctttgtattgtacaacaaaatcaaatttaagcataaattctgctactttaaattatcatttctagagcccggtagtaaaaaaacacctgaacaatgaaaatgggaattcaaaaatgccgggaacgattcccgcccttttccccgctcccctgaaaatgattttaccgagttattctcgagaaaaagaaaaatttaaacctcacttcaaactttttctgttttatcctgttctaaattcaattgcgaaatccaaattatccagataaatggagcaaaaagattaagaatagctctactttacagaccaccaaacacttctgctagtctcactaaaaagattctgaacctcattggtaattatttagaagaaaattttatcattatgggagattttaacctaaatgcaaaagatataacctggaccagtggaacgaacaccttttgctaaatcggaaaagggaaacattttttgtgaattttttaataagtatggcttatttcttatgacgaacggaccaactcgaggcagtgcttggcttgatctgattttctcctctagtcctgattttgttaataatgttttaattgaggatatttttagttctgatcatcttaccactaacttttcattatcttttcccagtaatagaactaaaacaaatacattactgtacgcaattataattctacaaaact

SEQ ID NO: 28238 - DNA, 1240 bp, Heterodera glycines
cttacgagacaactccatttgctccaggctgtccgggttggcctggtgctccagaacgtccgggctgtccagaaggtccttggggtccgggcgcgccaggcggtccctgtcctccgcctggagcgggtgaaccaggttggccgggggctccttgttgtccgggcggtccctgtcctccgggacggccaggcgggccagccgggcagcgcgggcatgggatgtgctggggcgcgcatggagcagctgcaatcaatgtaggagtgtgaagcaattaccaatcaatcattcaatcctaccaggttgtccaggtgctcccggctgtccgggctgtcctgcgcctccgggctgaccgggttgacctggcgctccggccggaccaggtgggcccggggggcagcttggctgttgcagcggaccgcattggcaatggccgggcagttgacgcttggcacggaagatggagctgaaggggttggcacggggcttcgacggcggtgacacggccacttgcacgtccatcagatcagtccaggccgagtcggtgttgacgcggaaagcctggcaaagcatatatttttaaattttaattgttgttacctcaactccagcgtgcactttggtgctcatttcgttcatctccgagtacagcgatggcaaagtgacgacggtggcgatgatcgccaacagagagcacaccgtgccaatgcccaggacaatgtgagtctcttgcatattttacgctaaattttgcgaattttcaattttgagttaaaattttcaaatttaaaatgctttttggttggatacaattttgtataaataaatcgaaatgtgcattttatggaataaaatattttgagttgatgagtaaaatggaattttttggttccttttaaaaattaaattattttttcggtagaaacaaataaataaattttagaaatataatttatgtttaagtaaaaaccgaaatgttgttaagagaatgaagaaatgctggctgctgataaggcgagaatgtgtccccttttatattggcacatttcttacttttttgcccattcgtcccgcggcgcttcctttgtccctgctgattgggccgttccccctgagggcatattctctcctttccgctcttacgttgcgatttggccgtttttcgtccgctgtgcgaaagtgcctttttttgtgccccccccacctccaccattcattccctttcatttctccattttattca

SEQ ID NO: 28239 - DNA, 1446 bp, Heterodera glycines
atttgactatgtcttctcgctgtttttcttcgattcattccattttccttttgagttatacgattgattggttggtaaattgattttttatggacgaaaagatagaaatggtacttattccttttgtgagcccctgaataaattttaaatattctaaggtacagtaaagccgtgaagtcccatacccagtgcttaatgagggatttagtccagaggagccctcttacgcgtccgtaattaggccccgcagggcttggaagggaagggatgatgatggagcgctgggggatgaggggaaggcggggatcgattggccgttccactgagatgactctcgactgatccgactgacccctttgactggctctccaatgccttttaagcgcccctcgggatgggaggagtctatcggagaaataaatggccgtgggaaattgccatttccggtccaggccttacacctccgaccctccaaaagaccgtccctggtcgttaaaataatttccaaaatttgaatgaagtcctcagaccttttttaaacttattttaagatgaaattttttttttttgagttgagcctaaacgaaatgatgaataatttgataatttatttaattatttaaaattagaaatggaaaatgccgtgcccctgattggaacgaactcattcctccaaccaacccacggcagctctaccattgagctaccaaaacaaatccacctcttttttaaccttctttttttttgaccatgtttctgaaattctgattaaatttaatttgaattaaattggttactgattttcgaaatatgagactgataaaatttgccaaaatttgaaagtttaaaaattagtttaataattataaatttaatgtttcgcgtccaaacgactgaagtttagatttggatatatttcgcggtgttgagtccgagttccataccacggagtgatttgaccaagcgtgaccgtatgattatacctccccttcatatcagcggatcgtccctgatccaaaaacttaaatcccacgggattcatgtaccaatccttcatttctttaattaaaaaaaagttatatttttttttgagcattttagctttgagttatcaattctcacttctttttttaattcattaattagctccgcagggcttagacagaagtgtgtgagtaatatgagagtctgttccaaaaattgcaaagacttagcttttatatttaaataaaattaagatgtgttaaagttcctcagaactgataaaagagagataaagcgacaaatagtcccgcgggacttattgttttttaacaatttatcattaattccggaactgatcaatttctgttggcatttttcaagttggtgtggcttctcatggttggtccacatacttaaaatatagggtgattaaggtgtgagaaaatggaagtgtgctttaaa

SEQ ID NO: 28240 - DNA, 1217 bp, Heterodera glycines
accaaaatcatgtgactttacgaaaatataaaccaaaatcatataactttccggaaaatacaaaccgctgcgaaataaaccaaaatcagatgactttccggaaaatacaaaaggcttaggaattttaaccaaaatcatgtgactttacgaaaatacaaaccaaaatcatataactttccgtaaaacacaatcaattataatcaaaatcttgacttttcataaaacctaaaccgcttcagaattaaaaattacatttatagacagcaatgaaaacagaaaaccggaagcacaaggttaacgaaaatacaacggaaccgggaccgttttacaaaccagaatcatgtgaactttccgtaaatacaaaccgctacatataaacttcggaaaatataacccgccaaggaatgtaaaccaaaaagcatatgactttccggaaaacaaaaacctctacgaatttataataaactagaaataaataatttaccgaaaaacccattaatggaatataaaatttttttgagaaaattttcttcatatattcaactatttttaattattattcccattttgtagccatatttagtgtttatatatatatccgatcaaattcagaatttatattcatcgaatttctgaagataattttttttaaaaaatttcaagccatagataataatgaaaaaagaaaaaatttttttgaaattatgcaacaatttttagaaaaaaataaaaattcatccaattaaaatttcaagttcagccaagcagtccatcatccaactgctcaatttttgttttgacaaatttgttcaacacttcccatgccacaatcactgatttgttatcatcatcattatcattttcatcggtcgcgtggttcacgcccaatttaaaaaattccgccaaatttttgaagaacaatttgtacattttggcatccgaaagcaatttgagttcatctggttggcgttgtgccacaacaaaattaatcaacgcattaattcgtgggacaattggtaatctgtgattttaaaaaatggaattaaaaaggtaggaaaaatggaaaaaacggtacaaaaagtaagaaaaagtcttaaataattgataaaacaggttaggctaattaaaacttttagagaaaaaaattaattgttaaaactttgataaaaaacagtaaaagtaagaaaatgggaaaaataaatttaaaaaaaattcaa

SEQ ID NO: 28241 - DNA, 699 bp, Heterodera glycines
tcttaaatttcccaaattttgagaccattgtgatgaacctgactcctgctccatataattcactggcacacggcggcggaagttgtaatgtcgttgattattatgaccactgtccattcattttactgcaaaatggaacaaaaacctgaaaaatttgagtcaagactttccaaaattaacacccagtcaaatgcttttgtccgcgtcagcgccttaaaaacgctgtccaaaaggatgggtttacgtcgtaacccaggagcgccaagtcgtacctctccgggtgcgggataagaaaaggggtgggactgactgtattttggacgattggggaaggaaatgggggtggtcaggtaattaaaactcagaaacacaattacggggacaagattgaatgcttagtcaagatttaacggagttgaagagaagcggagagaagacgaagagaattgttgccttacaaattggcagcacctcgtagtcaaaaagtcgtctgatgacaaacactttgtgatcagaacaaattaaggcgatttgaagaacaatttatttttaaaacacggagaaaaaaagacaaaatcggagaatatcaagaagtaactaaagacgaataaaaaacctcaaaacgaatatgaaatttaaacacaaaataaacgcgaaaagtcatcgttttaaaataattaaattgtcattcccagtacg

SEQ ID NO: 28242 - DNA, 1566 bp, Heterodera glycines
ttttgagttaaaaattggaaatttcttcagcgatgccatttgatcagctgagacattctctcccaatcgccaaattcgtcgcctttttctttcgccccttgcaaaatgcttctgaattttgaatttattccaacatatttcacgtaaatgaacggctttttcgttcccatttttgccttttcttgtcattcaattgcattttgcctcggccgacccttttgctcagggcaatttggcattggtattcgatgccaaatccggaaggagctcggaaaacagcgcacagatagcaaatttgagcgctctttggagtcaggccacttccgacggaagtgatcagcttccgatcaaaagtgcccgattcagtaagcatcaaaactgaactctttaacaattaatcggttgcttttcaaagtttgtaatgcttccattaagtccaattgcaccctccgccgctccgacaccaccaggccaggtccgtcttctcatccccaaccgatcagtggtgatcacccatcctcgcctctccctttcagactcagtcccgaagggaatcgcgcttttctcgactttggcctcgtgcccatttccgtcattggcaaataccgatgtgaaatcacaacggaggacgacaaactcgtcacgggcaatttgtttgtgtacagtaagcgaatccgaccattgcttaaaagtggaagcaaatccaatttgaagtgcgacccgttttggtcgcaaatgcatcgatgagattgacccaagcggacgaagccaatgcattcgcatgggtcggaccgacaaacaaagcgacggccggcgaaactgcgactgttcagtgccccgtggcgggttacccaaagccgacactttcgtggtcgaaagacggaacgccaatcagtgagaaaaagggacagaagcagtagcaaaggaaggaatgatggaaatgttgacagatttgagtgccattgtggaggacggagaacggccgcagctcaaatatttgttggaaggacaaaatttgcgaattcgaagagtttgtgggaaggacgagggcatttacaagtgaataggggcacaatcaccggaggggggcgggggtgccgaaggcgcctcgggcattgccaatggcacaggccaacatttcgggaggacggggctctcccccgagcattctttgctcacttgccaatcgcatttcctcaatcaatccatcaggttttttgttgttcagatgcgttgcgcacaatgaattttcctcaaaggttgacttgccgaaggaacggcacgaactcagtttggagcagaatctgcgcgttggcagtgagttgcccacgtcgctttcctccgcaaatgcctttctcccctccaaaggttccctctcgtggctgcccccgcttttggtgatcgtcgtttgtttgctcttgctgatcatcattatctttgggtgttcagcctggaagaagcacaaacagaagcggtacaatgtggcagaaaaagagtgagtggaaagttaagagagagagagacacagagaaagagagagttaaggaaaaatatgggcaagagaga

SEQ ID NO: 28243 - DNA, 1614 bp, Heterodera glycines
  unsure (1)..(1614): unsure at all n locations
cacgaattaaaaaaggcttttccatgtctgacgtttgcttgataaatatgtaatttaagcaacaaaaaaagaggaaaaatttcttaggaaaagcctcaaaaaatgaatttaaattataaagagttataatattttgaaaaaatctcgagtttcggctcgagaaaagtcttggatcttttttttgctgaggtcaagtctttttctcgtgaatttccatctagaacattatacatattaaagactaaatcattcatttatatttttctgtatcaaattagagagttgaaacccggatccttggaagccccagtattttgctcgagtcgagaaggttcgagaccaagactctcgacttcactaccgccaccaaccccttcccccttcctctcttttcccacctgctgaagtgccgttttacttggcattgcttcaccctcgttttggcattaataccttctttttatacaataactttgttgatgttcgaacaaaccctatgtttttggtatcattcgaaagcacaaaggaaagaagcaaaaatatataaaatctcagcgtttaggcaattgccaaaaagatttgattaattaattaattgttgtttggtcgattggactcataaagtgcaatagagccgaacttttctgtatcgaatttagaattgaaacgctcatcccgaaaagtattttgctcgagtcgagaaggttcgagaccaagactctcgaacttgactactagcgccaaccccttcccccttcctctctctccccacctgaagtgccgttttgcttagcattgcttcgccctcgttttggcattgctccgtcagctgctgctgttcgttctgttccgtctccaaaaacaggtcaatgaagtcgactttcgctctctgctgctgctgttgttctccgctttccctcagctttttgcgtgcctttaattcgtccattagctgcttcctcagtataattagcgggtctttgcgcaatattccgctccaactgatgaacggttccaaaaaatgaatgccgaaccacgggaaagcgaagccgacgtaatcgaacggagtgttattgtatttttgcatcgactcaatcgccaggtgtgccatttcagtctcaaactgtcgcgactcgcgctgccccaacgccacacgggcgatcacatcgaaactcatttctacgaaatgcctacaaaaacggggggggnggggtaaataaattttgactcaaaacattgatggatttaattgatataatatccgaataacttggaactgaggcacccaatcaaagcacagtttgtccctaccgtaaccgtagggtcgtgaggcaaaaaggtatggtatacggtatgttaaggttggcgactttagaaaaagttacagctaatagagaacatttatttgttagtgcaattgaatgatttcaaaaattaaaaatttagttactcttctctttagcaaaataatgtttggcaaattttctatttgatgggtttgagaaacgtccgtcccatggcacctccgaaacggtgcgttatcaggggatggttgcaaaagaaaaaataaaaagcgaaaaaagcgaaaaccaaataaaaaaagcgaaagcgaaa

SEQ ID NO: 28244 - DNA, 1559 bp, Heterodera glycines
tgtcaatatcccatatatagtaactatcgggcgcgtggcacaatgcgacccagtcccaattcactgggccataactttatcatttctaactgaaatccctcccaccataaaaattggcactttcataaaattaaaatttctctaatgacaaatgcttgagttgcgtgtcgtcatatcggtaataagcaatgtgcaaattctggtttttgtggttcatcttgcgcatggagtgacgctgccaatgcttgttgttgcgtggggcgaactgtaaacaaccaaccaaccattaaacaaaaatattttgaaaattatattattaattaaacattattatttattaatagggttgtaaattatatggactaaaaacgctaaatttggacataaaatatggactataaaaaagcccaaaatatggactaaaaatctcaaaaatggccaaatatggaccaaaatatgggctaaaaacttctaaaatttacattttaaaacctcatccaaaaatgtgtatatttcaatatttgctttaaaaaataccctataaactaccaaaactcagaaaatgcccaattttggaatgcattttttaaaaatttcgaaaaaagtctatccttagggctttatttttcacttttttgcatttttcttgtaaaaattttccagaatggccgaaatatggacgaaaaacgcaaaaatggcgaaatatggatttttcccaaaacccccaaaatatggatttattatgtactaaaaacctgcattaaatcaaaaattttaacgtagaaagaaaatttttgaggccctttctttatagcatatgcgcagaaaaatatgttaatccatacaatttactaccatatttatttatataaattatttaatttcaataattttgttaaagagcgattatcaatcctactaattacatctaattaattagatcttttaaaaaatttttagccaactgcatgagaagcaggacacgtacaaacgggacgaatgaagcgatttcaatcgtactaagacaaaccgaaaaaaactcattgtggccgacccggaataacccaatgtaaattccgcttgttaggccttaagcaagccgtataaccatgatttattcaattctctaatttttctggttcacgcataacattgaagtaaataaaaattttattaattttttaaaataacttcaaaatacttccatacaaataatgagtgtaataattatatggatttagttgatcgcataattaaatttaattatttatcgatcagtgagactatttctgaactcccaacactaagtttttttttcggttacaccgatcactaatttgaatgccgtggagcagatagaaaattacataagaaatttccataattaaatagtgataaaatgataagttcgaaaaaagttttgttcaatagcttatatattcaagagtggcaattgatctagagcaattaagataattaatgttggagtcagatatcattttttggcccttttacatattaaattgtattatgtattaatgaaaaacaacgcaaatttg

SEQ ID NO: 28245 - DNA, 300 bp, Heterodera glycines
cattttgtcagaatgtccagcagacgaaaaggggcgccggcccgtcgactgaccaccccctcagttttggcatcgccttcgtcccccaaaagcattagcccaatttccctctcacatccttcctcttcttgttctacagcatttgcagctgattctaatactcttctgcttgaacaacaggtgcatttggacaaactctaaaaaatagcttataatttcaccccaatttaaaggcttcgacgagcggagaaacacaagaaatgatggactgctcgacattgttggcccaaatggcggctg

SEQ ID NO: 28246 - DNA, 1475 bp, Heterodera glycines
  unsure (1)..(1475): unsure at all n locations
acaaaaattttatttnnaatacattttntaatgtaactcttttttttattgtattcgtcgctagtttaatgcaatttttntattatttttactttacccattaatttntatgagtccttatttcgaaacatcttttagctcttttttttaatacacataaacttatcttattgattaaaatgttttttgacttttattttttaaatcagaatttctgaagagtctactcaatgctcgggttttgtattaaaagctttttgaaaaacaatgcaattttgaaattttaaatcattttaaagaaaagaaattaattttttgattaattttgtttttaatatattttaccaatataatcacatttgccacggtaattttttatatatttatatattaatttttatttaaaataaaaaacgtgaactttcaatttagtttttattctgatatttaagatttattaaattactaaaatttatgcgcatcgcagtgcacctcacggggtaggtaggccctcttgacttagaccaaatctcgcaacgtcaccttcgtaagtcatgccgcgagccgcattataatacttaaataattcattatttccaattaaattttaaaaaaagctcatagcaagatgttggcacggctataattttataaaatcatttttttaattgagtgccttacctgccgcttagcaaattttggtagccagtccgcttgcactagagagtaaatagctcaaacaagaaatcaagggagaatgcgcgaaaccaaaaagatattttaaaataaaaaagcaaatgagaattgcccgaatatatatatatatatatatatatcaggggtgtgacttgtctcagaaaagacgagagcgagagtttggcgagaggcgagagtccccaaaaagacgagagcgagagtttggcgagagacgagagtccccaaaaacacgagagttggcgagaggacgagaggcgagagtttttcaattttttctgtagccttatttttaatttaaaaaacttcaaaatcgtatattaaattaggggtacgggcctgggtatttgggcaaataccgggtcagggtattgccgggtacagaaagccgggtcagagtcctagtttttaaaccgagtccaagtcatgaaaaatccaaacaaaaatctttaaaattttttcatgaaaattaaaaaatattttcatgaaatatatttattttagaaacaaactttattatttgtccattttttccaccttttttttgcggtgcgttttttaaaacttcggggacagttggggtcgggcggtgccggtaggcgccgccgaaaaaattttgaaaattgtcttcggatttgttaacagattttattcaaaaaatgaccaaaacttgttttttaaattttttgtttttaagtcgctttttttgtggcgctgtttttccaaaaaaaaattttttggaacattgggtgcgggggtcc

SEQ ID NO: 28247 - DNA, 962 bp, Heterodera glycines
tgttcacgtctgagttctggtagaaaaatcaaagcaggaatgccagtaattcaggctctcctccacagcatgtgaagcaatggaacgcccgagttacggtctgtaaaatgtgtattagaatctcaagttcgtgcttgcacaacaaaactacgcagccgagccgagctagtaacgtaagaacacgtcacaagtacatgatccctcgaagcaacgcacaaccagtgcattttattgtatggaccctgcaccaggcgtgtcaatggatgtaaattcaatggtgcaatgagcattggaatggttcgtgtataaggcttctgcagttcgcaattattattgcagttggcgaagttgatcctagattcgagagtcgagagatacaaggataacattatataatgatttttcgaggtcgctgaaaacggttataacatccattttgaccaattaaataaccttaactcgagaaatcggagttttttttcagcaaacacaaaatcatcaaaatattggccaaactgccgagaaatgcgtaataaaatttgcgctaatttggtggcatgtatctaggcttaggcttcagcttgcctaggcttagggttcagcttaggcctaggcttaggcttcagcttgcttaggcctaggcttcagcttaggcataggcccagtacgtattcagcgacctcgaaaacccataaaaatatgttttccttgtaatttatgaatttcaaatttatgttcgaattcgggtttcggaattttgaaaaataaatgccatattcgtgatcagcgccccaaattaccctagaaatgactttttatttgaaaatttcaggggggggtcacaaaacagaaaagtacccattctgctaaccatcccattattaacattgttcttttactagtatctccccgcccacccggcaaaaggatgagtcatttttggccaatactttttagcctaa

SEQ ID NO: 28248 - DNA, 828 bp, Heterodera glycines
tttaggcttttacctatttttttctgagctctctaccctcttgaaacgcaagaaaaacatttatttttttggttgtcgcctaggctacttctcgtttagtctctccggataaatatgagatattaaaatccaccaaatcaaaatggaaagactttaaaaagacaaagaaatgagaatatatttgaaatcccaaaaattcttcagcacatataaacatctattgttttcaaacattctcagctgatgatgccatattttcaggcttcttgattaatgatgtatcttcgcggcgaatctgaaaattgtgaatatcaaacagcagggccccgatttgatttatttattaaaagatcccaaaatatggtttaaaccttaaaagtgcctaatatgtgctaaaaaattggaagaaaaaagttgtttaaaacagcccatttttttcagaatgcttaattttaaatattgtttatttattaaaaaaaattttctaaaataatttttatgtgccaaacccccaaaatattttgtacagtaaaaaaaattatttttttggaaaattacacgaaatgcttttggaatttctttttccatcgtttccaattgttcaattccgatcatttgtttcaagaatttggtaattgcatttttcagctcattttcaataaaggttgttgtgagctcgggcatatcttcctcattttccaaaacggataaaaattctaaaaagaatgggaagaaataattaaaataattattgtacattgaacagaatactgtcggtccaatagggaataggtacataatccaagataactctaaatttttcttgat

SEQ ID NO: 28249 - DNA, 1507 bp, Heterodera glycines
  unsure (1)..(1507): unsure at all n locations
tttttttttatttaaaaaaaaaaaataaaaaaaaaaaaaaaacccccccccccccccccgaaaaaaaaaaaaaaaaaaaaaacccccccccccccccccccctcttttttttttttttttttttttaaaaaaaaaaaaaaaaaaaaaaaaaaatttttttttttttttttttttgggggggggggggggggggagaaaaaaaaactccccccccccccccccccccaacaaaaaatttttttttttttttttttttttgggggggggaaaaaaaaaaaaaaatatgttttttttttttttttttttttacatccccaaaaaaaaaaaaaaaaaaaaaaaaaaaaaaaaaccccccccccccccttttttttttttttttttttttttttttaaaaaaaaaaaaaaaaaaaaaagaaaaagggggggggggggggggggggggggggggggtgtttttttttttttttttttcaaaaaaaaaaaaaaaaaaaaaaaaaaaaaaaaaaaaaaaaaaaaaaaggggggggggcggggggaaaaaaatggaaatattagatttcattagcattctggtttggaaatttttatggatttctcatgaccttcaatacgagggagtatcttagaaccatattagagcccctcttttcctcgatcttcaaagagaaagtttcaggagaaatattatatttttccccctagaaagccccccatattctgaatgggaattaaaaaaggactggaaaaaattcaaatatttatccctagatgctagagcatttccctcagctcatactccctggctaacatttctttatactcttttctgaaaccccctccaatcacctttcgaaatggtgtgtcgggggaataagatcattgaagcggggggagtgagggagaaagaggggagggggaggggcaatagagagaggcaaggggaatgacgaaagagagggtggccatctgctgaaggacttcggacattaaattgggagggggtggacactgacactgactgccgtttcgtacgcattgcgtccgctgatccgcttgatccccccccccccgcctaattattgctgctgatcacagctgtcctccacccgaatgtaatttaatgcctttaaaagacaataaaataatactaatttcactactgcgatttaatagcatttgaaaatttaacattttttgccccttaaattagggtagggcccaagatcccgtaaaattattgccaataatttacaagtaaatatatttggaaagctttttgactgtctgacataaggcaaaaattgagaactccgaagcctgaccccgatttagctaaccccgactttctcacccgccgaagggtcgggtccctaatcctcctttaattttatatttacattcaattatttctctctgttggtcaaccaatgagcccaatttcaagtctcaaatgcttcttccggcaggcctatttgtctcttccngttgcctaattgtcccttttccg

SEQ ID NO: 28250 - DNA, 1139 bp, Heterodera glycines
cccggatttttatgtttttacatattttttttgcggcttagttatggcgagagaagcccaaaaatagcattatctccgaacaatttttgatttagagcgacttataaaaacataaaaacacatattttggcgttttgtcacataaaatatgttagcacatattttggggtttggcacatattttgcacatattttggcatttttgagaaaaattgcaataaaaatacaagaaaattgaaaaatacaccccctaaaaatcgacttttttcctaattattaacataattttcaaattaaaaaattttttcttcgattgtagaaactaatgaaatctcgaattcattaattcgtcattggatttcgaagttctctgctggaactttcaatttatagaaatgatttatcaaaaaaagacaattttaccccaaacacttcgaaatgtatttgatttgcgttgtatgggctaaaaatgataaagaatgagatttttgggaatttttatgcaaaaacacacttattttttcaatttttaacacatattttagcacatattttggcatttttgggggtttttagcacatatttcagcattttttagcacatattttattacatatttcaggatttttagcacataaaaatccgggccctaatgatgaccaaggacaattattgcgcttttgcggatctgctgctgttgcaccaatctgagtcaactttccgtcgatggattggacaaagttcgcccgcttcacaccgaaatttgtcgctgagaattgagcttaagtgggaaaattgggggaggataaaacggagacttgaaaaagcagcggagggaatgagacacataagaaggagaaaagaaaggggcgaaggacatggaaaagtcagcaaaaacgggacgaaatatttgaggcaaaaatgggttggggggagtaagttaaaaagcaaaggaaaagtgccgggaaagggactcatttggcaagaaatgaaatgccaaaattaaaaagaaaatccgaaacaatgctaatagagcaaaagcaaatgcatcgccgcgcaagcgattttgtgctttatttggcgatgaatgagaaagagaaatgaacagaagaaaggcgaaacagagagaaaaaagaaag

SEQ ID NO: 28251 - DNA, 1041 bp, Heterodera glycines
  unsure (1)..(1041): unsure at all n locations
tttatttatttttatcataaatatttttgtatagaattatttaaaatgataaggaatttttaaaatgaacaattttcagtgaaaatctaaaaattgtcgaaaagttcaaatttgtcctccggctccgggtcccaaaaacttattttttcttacaaaaaatttggggtaatactttagatggtgggcccctttttggaaaaatttttttctgttataaagttcgtgcaatcacgttctatggggtccttaggctcgctgatcgagaatatgtcactcagaatgatcaatttcgaatccctgatccgaacccgagaaaaagttgaaattaaaaattctcacttttgttccaaaattgaccaaaacaagctaaatccaggcaaaaacggtctgcctcagttgggcgcgcacggttgggcgccagcatgtttttccattataactttctacaacttttttctttgtcaactaaatccaatcttgttggtatcgtttgaaagcttaatgtatttagaaactttttctaagctattgctttgcgattagacaaaaccaaaaaagttatacagtcatggtcataagtgttgtcccatcatgctttgaaaaaaataattgcgtataaaattgtcattttccaatttcaacagataagtagcataccattggatagcattttttatgggctttccaatgataccatatttgcatttgtgacataaacatttatttgatttattttaccatattcacaatttgatcaaaatataggtgatcaaaagtgttgtcccatttcatttttaaaatattgcttctctggatcagcattaaaaaaatctaaaaaaattcaggtaagcataactttggatgctgatcaaaaaaggtagcaacaccaagttgatcagatcactccttcatggtgatctgatcagcccattttggctgggaacgaggggcaaatttcaaaaaaaatttctagggggttgggaaaatttttctggaaattttgagtaggcccattttatagagcacaaaatntctctacaa

SEQ ID NO: 28252 - DNA, 1087 bp, Heterodera glycines
gctaccattcactacaagagctgtacaaggacaaagaatttataggcttcctgtaccaataataccctcattggcaagatgcccatgaggatatcatccatacaaattttcttattttatttttgttcgagtccgggtcaggggttcgaaagtggcaaaaatggacgctgtattcgtgatcagcgacccccaataccccttaaaacttattttcactaatttctaaaacacatttattggcatctgaaaatgtatgtgaaaagtacccggtaaactagacaagtacccatttctcaacaaaaaaacaccttttttccgtccgggttttcggctcgtgtcaaaggacaaccggcatttccgttggatttgaaatcgcataacaaaatgggagacgacttggacgcaattgcgccgctactgttcgacttttgaaactgttggtcctcagtaatcggtaaattcgtcccgtttttgggcggtgtcggacgttgccaacgatccaagaagcgttccgtttctaaaattgaaagaatcgtcaaaatcggcaattttcacaaacaaattaccggtcaacatggcagcctaaaattgccacgggttcagttagagctgttccaaaatgaagtcacaatcaatcagccaaagaaataaagaaaatatccttaggaattataaacaatagaacattgaaaaaaggtaatcaaacagataaaactgaattgttgagactatacaaatataaaagtaaatttatatttatcacagggtaaaaaaaaagaatttattttatagagataatttagaggatgatttatgaccaaggcaaggaaatgatacaaaaacataattgcctggaatggtttcgatatgtgtcactggtgatgagcagctgtggtggtggtgatatttttatgaagcagcgcaaaataaagaaaagccccgagaagagaccctcccaaaacatcggtcgggaaatgccaagcatccgtaatgcgggaaatacaacaaaccagagtgaaggcgatataagcgatagaaacaaaaatgaacagaaatctcaaaaaaagagtagggaatcgactctgaa

SEQ ID NO: 28253 - DNA, 891 bp, Heterodera glycines
ctaaattgatttgattgagatatttttaggaaataccccaacccgcccgcaacgtcctattttttacatttaattcccccccgattgtccaatgtcttattgtccacttctgtcggattgtcctcactgtcggattgtccaactgtcgccccctccactgtcggattgtccactgtcggattgtccgggagccctttaatttggtaactgaagcaaagcaaagcaagaaaataagatgactactttttgactctttaaattcaggtttttgccaaaatctaaatttatcagcttttttcattaatatgaaactcgcttggattgttaaaattttagaaatttatcccaaaatcgtcaaactttcatttctttcggcattctttgcaaaaactttcacccgagctaaaaatccttggatctaaacaattcggattcggaccaaaattcctatccgggagggaaccgcccacttcgccgccgtttccaacaacttttctcattataaatcgctttttacagcatttcataggctttcttacaggccgcgtccggttcccggtccatttaacaataaaataaaagtgtaactgaatgaagtgtgaaaggtgaatttgggtttggggtttaatgcactttaaaaattgtttaaaatcaatttcgactaatatttaaaaaaataataaataaattattcaaatgatttacctcggactgaaaacggccctttcttgcaaatccaccacatcttttttcgcttcagatcaccacgttttcaacaattttcttgtttctcccttcgccaccgtttaaatttctctcttaaaagttcgtcagaaaaaaaattgaacgtttttcgtaaaaattttgtcatctgaggggtgggtggggggg

SEQ ID NO: 28254 - DNA, 697 bp, Heterodera glycines
attttttctagtctaatctactcaaaacggttcagaattcaataaacataacattcacggtgcgaaaaatggggtttgaaaagtttattggggaaaaaaagactttacaaaataatacccctgggagaagggagtgggaaacatgatttcaaaattttcaattttttctagtctaatctactcaaaacggttcagaattcaataaaaataacattcacggtgcgaaaaatggggtttgaaaagtttattggggaaaaaaagactttacaaaataatacccctgggagaagggagtgggaaacatgatttcaaaattttcaattttttctagtctaatctactcaaaacggttcagaattcaataaaaataacattcacggtgcgaaaaatggggtttgaaaagtttattggggaaaaaaagactttacaaaataatacccctgggagaagggagtgggaaacatgatttcaaaattttcaattttttctagtctaatctactcaatacggttcagaattctaataaaaataacattcacggtgcgaaaaatggggtttgaaaagtttattttgaaaaaaagactttacaaaataatacccctgggagaagggagtgggaaacatgatttcaaaattttcaattttttctagtctaatctactcaaaacggttcagaattcgataaaaataacattca

SEQ ID NO: 28255 - DNA, 1491 bp, Heterodera glycines
tgaacgaccttttgaggggagaaaagggaaaaaagaaaaaggaaaatgaccacccattcactccgaattataataatacaaaaggggcactgatcgaacgaacgaaagaacaaaaaaaaggaaaagcattgaaaggggcgattaaattgtgaataaaaacaataaaatttctttccctttttatgggttttaaaatgcgtttgaatttttcattgttttcttttatgcgtttcctttttcgcccattttcccatttttctcccaaaacttttcaaaaaagtgaccgattggcggcggacatgcgccaatggaactgatgaaaggaaaataacaaaaatgcgccgaattatttattttgaggattcccaaattaatttcatgaaaaaggcgaccatttgtcagccaatggataattaattaattaattgcccaatttgcgtttgtttgccttttgattgattaattggacggcaaaacgatgggtggcaaaaacaaaaagcaaaaaacaaagacaaatgatgggaaaatgacggggaaataaatggagggggggggggggggggtttgaaggcatttatttattaattgcttttctgccgtaaagaaaaaaggaagtaaaaatgattgaaaaatttataaaaacaaataaataaataatcgattggttttattaattaataatgttcagcgttcccatttgcctttgtctgatcactcgtgccttctcggcgtcggcggatcgttggaggctgctgcgccggcgatccgcgtgttcgaccgggggactgtgatcactgcgattggcacggcacgggtggacggacatggactggtgacactcggcacggcacggggagaactcatccaggcaaattggacaaatgggaatgaaatcggaacaggcatttttaagaggttggggaatcaatcccgatcattcaaatcaaattatttcctccccatttccaatggtaaaatccttcacaattttctgtgccaatgccaatgcgttgttttggcgttgcgccaatgtttctcactttcgccacccaaccaaatgataaataaatatgaataacatccgtacaacacattttgcccacttcccgtgccattctcctctcattaattttgtttgtcttgtgccttttgctttcatgttatgttggacaggaagggcctcggggaagggtcacttcggcactcattcgcctcgggggagggcaaatgtctcacggcggtcactccctccccccatcgccctcccacccatttttgccttgtcaatttccgttcccgaagagactgaggtgtgaatttgtgagcattgagccccaagtcgagatgggttttgatggtttacgatggttctgatgggataagccaagccaatggaaaaaatgggaggatgccaaaattgacatgattaatgcgagtaatatggtcatacagtgactcgatatggaccaaaaaacaatctgagaattcctc

SEQ ID NO: 28256 - DNA, 536 bp, Heterodera glycines
tttctttctctcttttccctcctttctttctctctctctctccccccttctctcacttcccttctctctttctctttctctaactccctctttctctctctctcccttttcctctttttttctctctccctttccgtttcacctgaagcggaggccattcgtccaaaagtgcgtaaaattcgctggtatttccgcggtcgcgccacaatagtgcacagtcggcgaggacaggcaacatttgggggaagagagtgcggattttgtggcggaggcgccacagaaagcgctgctcactctcagacaattgggtggagtccaaacaacggcggagggcaaccaaatggtccaagtcggggtttcctaccttaaagaattgtttgactgcagcggcatctatggccggtacaccccaaaacacagccgagacataacacagccgggaataaattttttaaaaattttcaaacagagattttcaagaaaaaatcgctgaaaatttcttgaacaatctctaactttgaaaattttaaaaaatt

SEQ ID NO: 28257 - DNA, 1071 bp, Heterodera glycines
  unsure (1)..(1071): unsure at all n locations
cttcaaatgccctcccaatgggaggcggtgtncggtttgcgctctagttttcaaatggcatctttaatttgccatcatttgccattcggtcattcattcccttaggccatgggtctgttcaaccatgctgatcgggcggtgatcaaaaagcgcatcaaagcgatcaaacagcgaattgaacgcgaacggaagcaattggagaaggaggcgaaacagcgaagcggcggcgtcaaaattgtcagtgtccaatgaaaaaagcaccgacggtttgatcagatggaatgaacaaatgaatggatgaacgatcggatgaatgaatgaatgcccttctctccccccaaaaaagcgttgccataagaaaaacagagagagagagagagagagagagagaatacgatattccaaaacagttcttccattactgtacgttcctcttttcgaaagcattgcttttgcgcctaaaagcttgtctaaaactcacattgctttgattccgtttttgaattgttcaaaattcgctggcgtttttccgtcaaatgaattaattaattaattaaggaattaattaatagattaattctccgtgaaaattcaatcgcaagcaatgcttttcttttttcagcttttttcccatttcaattttcttcgagtgtttctgatcagattcgtgccaatccgtcccccccccctcccccaattctttttgtccctttttgttttcttttgtccctatttattttccttttgtctcccctacagtattctcccataccgtatgccccttttccatccaccgatctttcactgtgtatgacaacaaaattatcacaccaccagcacacaatgtgtaaatgtaaaagttagagcggaacattttcaccgtgcttgttcatttagttaattaaggtaattaacacgaccatttaaaactctgcatttccctaattaatgtttcattgactatttttgtttagtaaaattttaagataaataaatatttatttattcatttattaattcggtcgattgccaaattggcaaaataaaaagcaacaaatgatcaatgaaaga

SEQ ID NO: 28258 - DNA, 2143 bp, Heterodera glycines
caaatatgcacataaatcgcgaaatatgcacaaatatgcaaaacatgcatatggaaagtcatcctagaagcttcaaatcaagctaaaaacatgtttttcgtgcgtttcaggcttcccgcagtccaggaaaaaaatatgcatgtgcatatttttggcatccctagtgatcaaattatgcaatttttaggttttagtctattttttcttgagctccaagtgacctgaaaagcatgaaaacatcttttttcggttgttgtcaagctagttttcgagtttttattaactattctagttttttatttttagcacctaaaatcctaaaaaaagtttttcaaaaatacaccccaataatcggtccgaaaattttcaaaaataaacgggactaacgggactaaatttcaccagtgaaactgccccaaatttaaattcgacactgagtattttcgacactaggtaatttcgacactacgttttcgacatagagaaatttcgacactgaactattcaaaaactttcactgttttccagcattttcgacactggaccatttcgacagtgagtaaattggacactattgagaattttttgaaaattaataagaaattttggtgttagtattaggtatgataaattttcctatttcattttctaattcgtactttttaaaaggttaggttggtataactgagtaaaacgtcaaacccagtgtcagtgttagacaatgactcataatgccaaatagcgatattttggggcgataattcaaaaaaacctgatcagtcagtgatcagtgatcactgatcattgcaatttttaattgatttcaaagcgctttgtagggcttctagggcccgaaaaccgaaaatcaccctaaaacatgttttcatgacttttgaagacggaactggccagacggaactgacccgcttcgacccattccacggtcggggtcgttttcgcgtggccgttttcgcgtgagggccgttttcgcgtggccattttcgcgtgagggccattttcgcaaaattttttaattaatttataaaaatccagaattttgggactcagaaaatccaagattcccccccccccccgaaatgaaaatttttaaaaattttcttcgaattcgtcccccaaaacgaaactacaatatttatgggaacatttttgaatattggcaattttcgtaacaaagtgcactcaaattttcaaaattttttcaaaaaaaattttctcttgaaaaaattcccggttggtcccggctagggatcggatttttagtgataaaaaatcccaaaataattaactaaatagtgagaaaaaaattccaaaatagtggcaaaaatagtggcgaaaaagttccaaatttaggggtgtaattttttaaatagctgttttttaatttgaaaataatttaaaattaaggaaaaagattttattcactgattgctagggctaggatttttatgtgctaaaaatcctgaaatatgtaataaaatatgtgctaaaaaatgctgaaatatgtgctaaaaacccccaaaaatgccaaaatatgtgttaaaaattgaaaaaataagtgtgtttttgcataaaaattcccaaaaatctcattctttatcatttttagcccatacaacgcaaatcaaatacatttcgaagtgtttggggtaaaattgtctttttttgataaatcatttctataaattgaaagttccagcagagaacttcgaaatccaatgacgaattaatgaattcgatatttcattagtttctacagtcgaagaaaaaattttttaatttgaaaattatgttaataattaggaaaaaagtcgatttttaggggtgtatttttcaattttcttgtatttttattgcaatttttctcaaaaatgccaaaatatgtgcaaaatatgtgccaaaccccaaaatatgtgctaacatattttatgtgccaaaacgccaaaatatgtgtttttatgtttttataagtcgctctaaaccaaaaattgttcggagaaaatgctatttttgggcttctctcgccataactaagccgcaaaaaaaatatgttaaaacataaaaatcctagccctactgattgcagttacaaaatattttcttagaaaatatgaacaagaaaaca

SEQ ID NO: 28259 - DNA, 1415 bp, Heterodera glycines
catgccactcataaacgatttttcgccttttggcgttgctcactttttcgccttttcgttgactttacacaaacgtcgtcatcactctcatccaaaatgctttcatttaacattttcttttgttcttccattccacaaaccaaattttggcataacaaaaaaatggcaatgaatgccgaaaatttgacaacgcccttaattgccaaaacacggttttgattggcatttgcttttaccgtcagttttagacgcccgtcagccctcttggccgaatttttctcttgctcttcctgaaaaaattctgattcggtttcaaattcaattgaatcaccatcagtttccatgaaaaattcgatggttttttctttttcttcatttgcttttattatttttgtttcatccttttggcaatttttagaattttgaatttggtgttttccttttcaatgttccaccaaaattctcgatatttatcgtaaatatcgagtactccttcgagcattattcccgaaatcgggtaaaattttcggtttacgactaaacctggtccgaattttgacaaatttggtcgaaagtcatcatttatttgtttgtttaattcgaccaccgaattggtgcctccaaattcggtgtcaaagggcatgtctaaaacaaattcccaccaattttggttcaaatttacttttggttttgtgtccattttgctccaaatctttacaccattgaagtcagccttcctcagttccatgatcaatttctcgcgtttttcggcacgggtcagtacaatgcactgcacaaattcggtcttgatgttaacaactcggcggcaaatttgatcagactggttcgtggttcgatcattttgaaaggcttaattaaaaatattgaatttaaaattaattttaaaattattttgtttttaatgtgtttaaattttattttatctttgcttttatacataaatattcgtaatctttgttccatattctttaatttatttctcatcttgtttatttgaacacatttcttgtgccataagcattgcttgttcaaatgtcgacataatttagtcagttcatatgacttgaaatgtgccttaataagccttgaataattttttaaattctgatctttaatttttatttgcaaaatgttccttgcaaaaatcttagtcattttatttgtgattttatgaacaataatattttgtgattcattaaattttggcgtttgctgatcagaaatttcatatgaatttttgtcacatttatgtgaccctctcgccgagaaaattttgtcgttaattaataaaaaagaaataataattgtaattaaatttcggcttattaatttgtatcctcttccgattggtgaaaactttatatataaaattgaaataattgtcaaaataatta

SEQ ID NO: 28260 - DNA, 1055 bp, Heterodera glycines
  unsure (1)..(1055): unsure at all n locations
gaattcattatgtttctaanaatttataggcaaaaatgttcgaattttttgaagttttttggtcatcattttttgaaacacaacgaaattctttgaaattttgcataattaaagagggctattttggctgtcaaatgatacaaaatacaaagatgtttaattttgatgctcggtccattaatatatcgaattattttatggtcgtgtaaattgcattagagcaacgcaacaaaaaaaatgtcgtcctaaaatttggccgatacggagacgaaccgcccccgaaaattcaatggcatttctgttaacttttgactttcaaatgattgccaaatgaacccgagacacaaatgagtgttaaaaatttaatgcttttggttaacctctgcccacattccatgcattgcgcctcgtcgcttccgtttcggaattggcggcgttcaaacaaatcgatttcccaaattggcgacttacaaatgtgaaaggaaatttaagagtttattcttcgttctttcaatttcttaccagcttattttgctgtggcatttgtcactgcttctttggtcggataataaaatttattaggtaattaccaaattttttttaaaactggaaatttctgagtaatttcattagcaaaaacagtgaatcaaaaaaaaatgcaactgaaagtttttcgcgtccttttctaaatcaaaaattcttttagagccaaatgtttttctggcataatgttgtttcaaaatgctgacggaactgaattgggtcagaggttacctatcattttgtcactattctcgttttaaaccgtggctaatgatttcctcagtaaaatggaagacatcaaaataaatgaaatagtacactgacgaaaatgtttattgacgaaaatcactgacgaaatagttcattgacgaaatcatacagcaccttttaaacgtaggcttagacgtaaactattttctgtttggactttaacctgaatacccggcttatttgggcccgaaaaatcaagagacccatctttttctttttaaacttaaaaaattttaaatctt

SEQ ID NO: 28261 - DNA, 1438 bp, Heterodera glycines
cgaaaaaaatgtatttattaattcattcaagaaaagtagtaaaagtgaaaaaatattctatttaatgtgaacaacaatttactattatctgaattggattaatatattacgctaaaagttaaaaaacgggttaacagacaatttatatatttaacataaattaattccatgaacagttaaccaaaatgcaaattaattaattaaaatttattcattgcaattcacttaaaaattgtcagaaaatacgaaaaatcaattcacaaaaaatttacttacaattagcattaaaattttaaaattttcattctcttattaaaagattaattgaaaatattgatattattacatccctggattttcacttacaatttatacttgtgagttacgagagattaaaaaaaataaataaggaataataaataattaattacagttacacctttggattattaacaaattcaataaaaattccgaatccttgatcaatttaaaatttttataattttttctgcattttactaccgacaaaagataactaaaacttttttaaatacattttttaattttataagaattaaagacaatttttgaacttttcaaggcaagcgtcgtaaacagttcttgaagtttaattgacttataggctgattttatttaataatttattaatggttttgatacattgtttggagattatatatgaaaattttgataaataccccaaaaaatccaaaattttgcaaattttttcgtacatattttcatttttttaatataaatttatttatttatgtagccgacggttaaacagccaatgcatcatgacatcatcaagactctcggggttatcggaaaattatagaaattaaatttccaataaaatgatcggttaatataaaattaacatttatttgggaaaaaattactaaaaaaataaaaaataaaaattgacgattaacaaaaatcagaagaagttaattaattagtttgcttaaataataaagtaattttaaaaaaacagttctcaaaagttattaatgatgaaaaagaaagtgagtgttagaataaaaatagaaaaattgaataatttttcaaaatgaaaatagactaaataatattttgaattgaaaggaacagaaatgaatttaaaaaataacccataagagaaaattaatgctaaaaactaaataaatgattaataattaatttttgtatatgaattactatttctaaaatataatttaatattttaatgaattttaataactaaggtggaaaaaacctgtcatttacatcagtttcctgatgttagtgtctgaccatcagaaacacggaccgggtcagtttagtacggccggtttagtacggccgttttagtacggcacggtttagtaaagaggggtacggtttagtacgagggtcagtttagtacggcaag

SEQ ID NO: 28262 - DNA, 901 bp, Heterodera glycines
aatcccatgaaaatcccacgcggatgcgcatcgccggttcaaattgtcgcggtcgcggaccacgaattgcgcgcaaaaaaggcgagagtcgagacaggatcttaatcacgccgggattttcccgtgatcccgactcaaaactccgaagctcttttcactggtagttttctctataaaagtaaccggtgattaccatttatgttcgtaacaatgagcgctggtctgcgacggcaaatttgtctcacgcgtagttgtgcattatcgtatagataattcgagctcataatctcgcgaatatcgggtatttcctggtcacggtctcatctgttcaaaaccgggatctcggtattcagttgtccgtgttttgatcccggtcccgacggaacccggccccagcatgtttttggtctataacttttttctttgacatccaaatcaaaccttattggtatcattcgaaagcccttcagatgctctattagcttgcaaattccaaaaaaaaaattcgtccattttgaacaaatttatgtccataaaagttggaaaatctggttttttgaattcttctggccataacttttttgaacctttacataatttttcaaaattttgaaggctaatagaggacatttacaggtttcgaatgataccaacaatgtttgacttggatgacaaagaaaaaagttatagcccaaaaaaccgctggggcccaaacgtgccggggtccaactgacgagtcgggggcgtttgggccccagtttttgggcccccgcgtttgggcccccgtttttgggccctcgtttttgggccccagggtcgtttgggccccaagtacagaaaaatgaaaaatcacagtaaaaacaactttttaaatttcagcataaaaatgtaaaataaacat

SEQ ID NO: 28263 - DNA, 652 bp, Heterodera glycines
ccttgtttttctttcctctccctttccctctccttctttttctttcctctcccttccctctccttctttttcttcactctcccttctctctccttgtttttcttccctctcccttccatctttttctctacattctttctcttctctcccccaacccacccgccttctttttcttccctctcccttccctctccttctttttctctctccttctttctcttccctttccctctccttctttttctctacattctttctctctttctcttctctcccccaacccacccgccttctttttctttcctttcccttccctctccttctttttcttccctctcccttctctctccttgttttttttcctctccctttccctctccttctttttctttcctttcccttccctctccttctttttcttccctctcccttctctctccttgtttttcttccctctcccttccatctccttctttttctctacattctttctcttctctcccccaacccacccgccttctttttctttcctttcccttccctctccttctttttcttccctctcgcttctctctccttgtttttctttcctctccactttccctctccttcgttttctctacattctttctctctttctcttctctccccc

SEQ ID NO: 28264 - DNA, 919 bp, Heterodera glycines
acaccgcaacagcaggtgagaaattggtacctcggacctttaactctaaaatgccatgaaattcacttaaattgccatcggcaaaggatttcggcaattattggtcaaccaacgcccatttcagagaccaatggacactcatcaaacagaagggcatttactgaaattaaaaatgccaatggaagttgacgacgtggaagaggaaaactttgtcagattgagagaaacgaatcaaatcaaaatggacactttaaacaaagaaattgccgaaacagtttcacaggaaaatataaccaaattaggtaaaatcacaaattacacagattaaaaaacaaataaaataaattaattccagaaaaagtcatttggcaaatttttgctctcacttttcaaattgtcggcattgaactcaatcccactgatcaaataacgcgaattcttcaacaaacattgaatttcgatcagttggcattggcactttgcaattccaattccgaattggttctcaatagcattaagactcatttggtcaacaatgagcatttgaaaaagaaagcaatatttgctaacatttttagccgaataaatagtcaggcaaaagacatttttggacaaccactcgggtagtgcttaatattttaattaatttacacaccaattctgtcgtatggggagcattttaggaattaaaataagaaaataaatataaatccaaatttaacggttcgaacgagggtttctatggcgttcaaaaagccggcaaaaacgcggcatggccaccctaatttggacgtttcttaaatcagtcatcatttgaattttgacaattcgaaatattttctaaaaagcaaatcaaattgacattattagtttcaattgatagccatggaccgaagattcacttttcataggcaaaaat

SEQ ID NO: 28265 - DNA, 1779 bp, Heterodera glycines
tttttttatttgattcacccggcctccggatttcttccggtcagatcgattggccctttttcgctgacttttgtttaacggcacactgacattactgtttgaacgtgccctttaacacaaggataattttaaacgtcagaaccaatcagttctaaccgaggtgccctcccgtggctgcttttgtccgtcgcacatacggataactcggacacattgccatcttgtggccctatttcttcattaaatgtcggctcattctccctgacaattggcactgtgcaattctcttcgtagatcaggccggaaatgcgcttgacgcccccacaatgatccaaactgcgaatggccggattattgatgccttgaatgctgccaatgcgcggcttaaaaacggcactttgattaaaataacccttattttcatccgaaaagcaaaaacttaagccacaagacttgaaatgttttcgcgcatctttaccgttttttccggaagtgatccgtcaacaaatatttcaattggtggcaatcgaaatgcaccttgctgaccattttggacagaattggcgaatgagtgatgatcacccatgctaaaattggtgattaatatcatttttaagtaaaaaatggcggcgtgtaaataagaattactattacttttgcatgtgaaaaaataacaattgatcgttttttgatcaaagaaaaaatcgcaaaaaatgttaaatttttgaccacaaaatctaatttttggatttgaaaaatttttgaatccagacccaaataaaaaatcattcgccagatattttaatttaactgaggttacctttccgaattttcttcctcaaggttattgttttccacgtccatgtttaatgccaaagcattttggaattcgtcgtgcagaacgatgttttggtttggcctccaggcatggtccatttcactttcctggtgttctccgttggtatttgcctaaaaatggagtttaatgtaaagaattaaagtttttctcgctgcggcacaacactgttcataaagatttgtgaaaaaatgtttcgcaaaagatgattttttaaataattaaaaatcaccgcctgacttaaaaatcacaaaaatttttaactatttttagtgacaatctattaacaaattatattttttccatcccaaaatctaattttctataaaattttgctaaaattgaagaattcgccttttttgaaggccaatttttaaataatattttaatattactgtagaattttcccttgttgattttgccaaaaaatcgaattgcactttcacaaaaactggtagttgacttaccgaatcgattgtgatgttctcaccaacaacgatatccgaaattgtgtccataaaattttcgagttcttcgttcgctccattgccagtttgttcgcaacgaatatttttataaggtgcaattttcatttttttcgacatattctaaataaaatatttgtaagcatttaaaacgggtaaaaatcccaaaaaatatcgaatcacaatatatgatcgctgcgcagaattaaaaacgaaaaggcaaatagcggggagggtggaggaggggcgaaccaacgccgtatacccaacaaagaaaagattgtgttgtcggctgccagcaaccgacgctgtgcacaacaaaggggggggggggactggcgatttcatgagcgataaaatgaatggaatgcaaccagagggtgggttttggtaaggaagggggggggggattttggggcggaaataatgtgtctgata

SEQ ID NO: 28266 - DNA, 1223 bp, Heterodera glycines
gaaactgtacacctgttcagtagaaaaataatatatataaaggtttttaaagttttaatggtatgggggggataaaagttttacgggaaaatatatcgtataaattaaaaaaattgcaaaatctatgtctttttttgtcagtttttggattgtcgagaatttcacacgcgcatcatcaaatattaattgtaaaataattgtgcattttttacaattctaattttgagtagagtgggtacaaaggagctctcgagcgtcaagaaggtttagtactttgcgcaggtatgatgtgatagatacatttgtcggagcactattaccttctttgatcatgatcatctcggcatctaattggcactgatttcgacacgttcggttgctgtggtggtcatacagtggagcggagctgtcgaattgactctttggagaggtatcatgattgggaagatcattggtgcaaaagcgaaaatgtctgttatgatcggtgcctaatttgtggcatttcctttatccgtcggtgcgctgcgcaccagaatccgctttaaggatcttcacattgagtaaatcaaaaacaatgcagaaatcaatttattgtggagtccctttttctaacaattttcggcaatcttaaagaatgggtgtccttaattctaatttgtttttattttttaaattttgggctcaatccagttgttatggtctttagagagattagtatcttttagaaatcagagcaaattttggtcgttaccttcaatcagagcaaatattataaatcaggacactttaattttatcagatttggaccctccaaatcaggacagatggaagccgttgttaaatccccagccttaaacattagttgagcaaaatgttggattaattaaatggttgtgcctcatttgcgcctccacacttgtgcctccatatttatataaaacaatttaaatatttaaaaatattttttataatacatttgttggacaaaccacaacacatttatttttatatattttctttgtttttgtattatgttcttgttttttattatttcttatttttttaaaagatgctcattcgagccaatgatcaattccttttgtggtgagtctaaatgacggagacccccccctatcaacgcaaattaataattacttgacaagttttaatagtcacagttaagctagatattatcgattagagatgaagaggaataccaaaga

SEQ ID NO: 28267 - DNA, 1068 bp, Heterodera glycines
ttttgcaaaattattcataaatatttttttcagaaaatgctctgaaacgcaccaaattttatttacatgctagtttaggcactctgatgctttttctatcaaaaagggagatgaataaattttaaaaatttttaattcctttttaaacaggccaaaaagtttaggcttaacttttttttcagaaactgatcagaagcgcaccaaactttgcagggatactgaaaggaagagaaataacctattttaaatattatctagtcagttcatttaaataatttttatccaaaaaatttttttttgggttttcggggcagtccccctgaaccgatgcgcccagatttatggggagaccgaatccttccggaatagcttcactatagcctgtactttaattctgcgttggatttttgctccccataattgtttgagtaccccaaacggacacttgaaaaaatcgatttttttgttttcggggcagtccccccgaaccgatgcgcccagatttatggggagaccgaatccttccggaatagcttccctatagcctgtactttaattctgcgttggatttttgctccccataattgtttgagtaccccaaacggacacttgaaaaaatcgatttatttttgttttcggggcagtccccccgaaccgatgcgcccagatttatggggagaccgaatccttcgggaatagcttccctatagcctgtactttaattctgcgttggatttttgctccccataattgtttgagtaccccaaacggacacttgaaaaaatcgatttatttttgttttcggggcagtccccccgaaccgatgcgcccagatttatggggagaccgaatccttcgggaatagcttccctatagcctgtactttaattctgcgttggatttttgctccccataattgtttgagtaccccaaacggacacttgaaaaaatcgatttttttgtttcataaatatttttttcagaaagtgctctaaagcgcaccaaattttatttacaacttaattttagcactctgatgctttttctatcaaaaagggagatgaataa

SEQ ID NO: 28268 - DNA, 1808 bp, Heterodera glycines
  unsure (1)..(1808): unsure at all n locations
aatcaaaaatttttcgagattttccggcttaaagctcatccgattgtctgcaagaatatttttgtatgccgaaaaggaacgctccacttcgcatgattggacgggtgcatatttgaacatcgcgataacgtccggaggcaaatgcgtttgaaagtgttcgccgcgcaacaccataccaatttcctagataaaatatgagtttaaaactttttgcacatccaaccaaaattctgtcaaatcccgggttgtttcgcaaaacagtgttaaatttttcttgaaccaatttgccgacactgcccggtaccagtttcaattcatttccgacatcgcttactatgtccaaacctagaaaataataataaaaattttcgagtttttttcattaactttcaatgagtgtgaggttgcgggattccaattttccaattgctccaggcaaaatattaaaatatgtttttatgaaggccaaatctccgcgaatgccaggagagtcgaaggcaatttgtgattgccgtattgcatcagaatcggatgggttgaagtctcgaataatcgctcccacttggttaaaattttggcagtaataatccgctgcgttgagccaagtcccccaacgcgtgatgattgtacgcggtgggagggggagatcacaaagttcgcggaatttggccacacgcgacggcgcttttgaaaaagttttcttggtactcgcaaccaatttgtcaacactcgggtagaggccacgaatttcctcgcacacacgattgagcccgtgacacaagcatgttagatgaatgaggtttgggtagaaaattttgaggcccttanaaaggtttttcgtactacttttctgtaaattttttatttaacctgtgctgccttaaccatgtaacgcgcagcgtcactgacaagtaaccaaaggtcgtcagccgagatcaactccctcagattatcgttgacaaaccgagcgattgtttcatggttagttttgtccagaaatttgacggcaaccanatgcgggttgtgcaatttcccatccaaaatgccaatgatcaaatttgcgacatatctacctttagaatcagtagtctcgtctactgatgccaagattttttgggttttgaaatcatttttaacctcagccattttctgaattatggccaagtttttgaatatgcagagggggtaaacctgctcaaaacatgctgccaaatagcgttggtgcaacacatcctcatgaggaatcacacgcttgcaatatttttccagaaagcctaaataattttttgggtggcccatcccaaaaacacacctcgaaatctctgattttccaatttgaaaaatggaatgtttgccgaagtnaaaaccnaacacanntccatcntaaattcntccaaatttttcnttncttgantatncaaaaattnttntttttttncncttccacttnnccncataaaaanctcaacatttncttnntntttnncaatttcnttntnttntttaacatncnanaacatcnttnaananacctnaaaatactttttnccnttnntnttntcntcnttnttactnttntanntnacaaatntcnatttaacctnttnttnncacnnctnacaataaatnacctttccatcanttntntanntcacttttccatcaactcttttnatccantcnttcaaccaancanattttnattttattttngncattttcacacaaagttgtagcaattccttaaaatcctgaaaataggtctagttaagccgaaataggtataaaaataggtacctcggtaatag

SEQ ID NO: 28269 - DNA, 813 bp, Heterodera glycines
tgagtaccccaaacggacacttgaaaaaatcgattttcccccctgataaatatttttttcagaaagtcatagcgcacccgctccgtatctaggcaacgttagagcaacagatgtagctgactagccaaaaggttcggtgccgtgatgaaacgaaccagcactgcttaccccgcggcacccggcacggtcccccgaaggaatggatttaattaaattctctccttcggggatttttttccattaggtcatccgatagcggtcgattgctctagtatctttttcaaaatttttgatgaaatatttgtcgggctctgaagggcgtggaagggggggacgaacactgatatgatggaggagaacacataaaaattggaagaaatcactaaaaaattattggaaaacattgagaaaatgaaggaaaatacacgacaaatgaaggaaaacgccaaaaaattgaaattggaggaaaagggtgaaagattggaggaaaatgccaagaaattggaggaagacggtgaaagattagtggaaaatgccaacaaaatagaggaaaacggtgaaagattggtggaaaatgccaacaaaatagaggaagacggcaaaagattgattgaaataaaaataacagaaaaattcaaagaaaccgctgaaagattgatagaaaacaataagaaattgttggaaattcgtgaaaaataggaagaaaacggtaaaaaattgtaggaacaaaatgaaaagatcactaacgaaaaaagggaataactgaaagaaagcattgaaactgataaaaacgccaagaaaaatgtgaagaac

SEQ ID NO: 28270 - DNA, 1340 bp, Heterodera glycines
ttcaaaaaatagatttaccaaaaattcttttaaaattttctgttttattgtacatgatttaagcatctcccgcatcttctcttgtttaaatgatttaatcatcatgctttttggttaccaaaaacttttttcccacacacaaaaaatttattggtgaaaatcaattttttgaaaaatttaaaaagtaaaatagtggtaaagcgtgtgccgaattcaatttattttcccagtttaaactggttcaaaaatcggtttaatgacctttctgcaattggagacctaattttccttgcttaactactcgaatcaacacgtttggtacatatcactggtgccattttttgtgtaggaacttcaagacatcaggcgggagcggtacattggacacctgaaaattggatataaattcctctgttaaagatagtcgggcaacagccgaaaaagaagtttacactgtctaacggcggcggaagactgcgacgaactctttgctccgggaaacgaattccctccgccgacggagagcaaagaaaagagttcatggcccggcaccccaaagaattcgcaatgcgcggcactctctcccaattccgaaatgccatcgcaaatgacataacttttcctttcccgaattgcctctctttccccatttgccattgtcccccccccccctttagccaaactccgtcgccctcccctcgccccaattctctgctcgaagtcctttcccaacggctaaagcgaagacgacgccgatcgctgctgctttcgcccgtctctttccctccttcggtcgccgcttttccatcagttgccgagagccgaaaagatcgccgaaagcaaaggacgcctcggccaagctgcgcattagcggaagaagaggagaagaaagaggcattaaagcggaggaaaacagcgactgaggcggcggaaaaaccgaggcgaggagggacactcgttattaacggggcactcattaattagggagaggacagtgcccttggtactagcatgccataaatgcagagttcccaagtgcgcttatttctatattttgatttttcatttttttctgaagcgaatatttgaattaatttgattttaaaaaaaaattacattttatttcattttttgagtgaaattcccaaaatgccaccaaaacgaaaacatgtttatttggaaagctacgcaaaagaattccggcatataaagaaaaggcgaaaaggcgaagaatttgccccttgtgtcgcctgcatattttttcacaaaaatgggctcaaaatctccaaattggtcctttttctttggtgaaattctgttaacaaatttcttttattttg

SEQ ID NO: 28271 - DNA, 1738 bp, Heterodera glycines
gggggcaaattggggaaaagcggcaatgatctacgtggggtaattattaacgaattaattaattcgactatccacgcaattttttgattgagaatagcttaaaggcatttgtaaagccgggattctgctgggtttgccttcccctcgtcctctgtggtcattcttcgtcccttttggtattcatccgctgacaattggacatcggaggaaaaacactggtccattcacaaatatttgtttacttgagaattgaagggatttttcggatcgatcagccctttttcacctttgtacaacgtgacaatcaactaaaattatattgcaattaataaagtaaaaaaattaaaaaaaaatttttgagaaatatttatttggaagatttaaatcaaaaaaaaaataattttattgaatttcaaaaaagttatggataaaaaatatctgacttaagactttgaaattttacaatcataccttttatatccttttaaaaattaatattaatcaccattattaccatgtaagcaacaaaatatatttaaccgaaaagaaatttacctttaaaaagataaaattaattaaaaacagaataatgaaaaaatattattatatagtttgtgtacataaaatatccattaacagatgataaagtgaattttattaatcatttgaataaattcagtgattaagatcaaaaattagaagaagaaaaatttatggttatttaatttattcaacctaattagataacataataattaaaacaattgaataattatcatacactatctgactaatctattgtggtttctccgactgatgaaaatttctaataaaatatattataataattttttttaattttaaacggatttatttacatttttatattctccgcctgcctttaagcaaacattgtgcatggagttgaaatatagcaaaaaaaaaatgaaatattttttaatttataatcaaaatataattttcacgaagtaatatgtataatactttcgcttcaaataaattgagaaaaatttaaattatgaaaataataaccattgaaataccaaacttataatatgcaagtgataaaaaaaattgtttaaacgttattcaacccaaatttacttatacattttgcgcataataattgctcgaacgtaattttacatttttgttttttaaaacgtataaaaattttattggaaattttactttaacaattcttctacgccgtaatcaaacgcggtagcctttaccatgagaataaatcaagcaaaaatttaaatctcaattaaaaaatattaacaaaataaattaaaaacaaattctaacggcaaaagtataacgaacacaaaaaaatttagtccaaaatgataaatttttgaaataattaaagaaaatttgatttgaaaattttcattaatttaatttagttttaactttttgatttataaaataaaaaacaaaataaaatttaattttgtattattttcacttgaaataaatcaaaatttgaatttttaaaattcccggttcccggtgccggacgaaaagcgaggtcccggtcccggcttctcaggtcccggcaagtcgctgtcccggttttgcccattctcggtcccgctgcactctagtttagatatagtaatataattttattttaaataggttttctaactagttgttttcttttaatatttaatagttatggaaatggtgtttgcttgcatataaaaat

SEQ ID NO: 28272 - DNA, 1025 bp, Heterodera glycines
caacaggaacagcaacaaaagactgctgcaaccgaacaaattgcacttgagcctggcacgttgtacagggtgagccgtaatgatttactaaccagtcaattatggtcttataatcgttcaatgaaaattcaatatttgataggtgttatgtggtgataccctccttcaccttagattttttgtaatttttttctgctgtattgtaaaaaaaaatgaaaatttgaaccttcattatcatcgtcttaaatatcgaagaaaaaaaataggggagccgggtcacaaaagaagcaagagcaagtatgaaaattaaaaaaaaaattttgctttatctcgaaatagaaaaaaattacggggttgctgacctaataaattttcttaaaagatcaattaatgtattcatttggctaaattggccaaatgtgtacggctcggcctttacattttttaaaattagattcgtgttcgggcaatcaattcggtgggctgcagtgcatggtcacagccggtcagcttcaagacttgtgttcccggattcccaggctcgccgacaagcatcaaaatcacaaaatgtgagtctcaacggtgcctgatggattttgttcgttaatttaaaaaaaccatccaaaaattttcaaataaaaaaaaccattcatgcttaatatcattcgataggcctcccttacaaattaatgttctctattaacctgcattaacgaaactttttttgtgctaatagagattattcaaggctatcgaaaggactcagaataaaatttatttgttcttttcagcaattttataaacctttttttaatttaagaattccaattgtgagtaaaacgggtgcactacgtttccccccccgccgtttcccccccgagaaaatttaaaaaaaaaattgctaccttagaaaaacgatgcgaggggggggggaaacggcggagggggggggaaacgagctgctcccgagtaaaacctttgggagattttttttcgactgcctacatatatatatatattctgat

SEQ ID NO: 28273 - DNA, 1216 bp, Heterodera glycines
caaaatcatgccaaaagcatgccaaaagcaatgccaaaagcatgccaaggcaatgccaaaagcaatgccaaaggcactgccaaaagcaatgccaaaagcaatgccaaaggcaatgcatgccgactttgtatcttagcaggtgccgtccacttcgctttcgtcccttcctcccgcgtccgctccctctccctccgctcgtgccgtcgtcgacttggcacgttccgcgcttctcttcggcactgccggttacatggtctacagatttgttcgttcgtggctgctcccgcagcttctcaatgtgccggacccggccgaggagcgtatgcaacgacttgagcaacaggtagagtcattggtcctctcttctgacggattaattcgccattcttcaaaaagtgattttccctctcaggtcgaaaggctgagcgattccacgcgatgcatcgccgaatcggtgacacaaacactcgttgcggtgacggaacagaacgagcagctgagccgaacgatgatgatggtgcagggagggacgaaggggacgggtgagtgatcagaagaggacgaaacgaacaaattgatcgaacagtgatcagggaaaagcaagggcgaaaagagaaacaaaactaaccgattaaaagtgatgtaataatcgaaaataaaaagcggaactgggtccggattttcaacagggacaaaccgggaatatttccaagaaaaaacgaaaattcaaaattttcaaattaattattttttttgtaaaaaaataaactcattttttcacttttcacattaaattgcatctgtatatgagcttagaagtaaattctgagatggaatcgcttaatttttattttccaattattattaattttttagtgatatttaaaagaaattgaggggccgacggtgctcaaaaggcgtcggtaggggaaatttgaaaattttggctggatttaaatctgatttttttctcaaagtttccttccccaatttcctcattaatttgccccccctccccccaatatttgccagtgcctattttcccccgttctcggtggccctttcatggagtgtgagaaagctgtttcgggctcggtcttggtcccgtggaacgcaatttcagattattttaagggattacggaagtttaattagagattacggcttccagtaattgaaaaactctccgtaattatgggttatgattcctgtaatt

SEQ ID NO: 28274 - DNA, 1079 bp, Heterodera glycines
aattgtgcgatatattctgatttggatggtccaaattctgacaaaaaattactgcttttatcataaataaatatgttaaatttgtctattttaaaaattgtttttagaaaaaagtgccatattttcgcaccttctttttttaaattgactcttaaatccgaattctaggtgagtttatttgagaccatgcatacgcatataggcgatataatggaatatacaatacaatggaatacagctgagaaatacatattatgctttatatcatttcatcgcattgaatgtttgttggcaccagcaccatcattcttcatcccactcgtccgtcctctgcttaagtttgcatgatgatggcacttccgttcttctgctgctgctggcgatgaatggcgacattggcacattccgtggcgacatcgttgcgcaatttgcgattagcggcagcgactgaagcattctcgggccgttttttcaccagcgaattgttgaagaacatctcgaagacgaacgaacacaccatgacgatgtcgaacacctgaaaaatccagaaattggaaaatgcagaatcaaatgggcggcaaaactcacaaaagtgaccaacggcacatttgtgtcatccgcacggaagttcatgcaagaccaataaggtgtccaatagagcagcaaatacgatgaggcccaagcagagcaacaccagcaaaagacagaatagagggccatgcaatagtcgaagcacttaaaaatgaaaaacaaaattagtaaccgactcaatggaaaacaagcaaatttttgcaactcgtaacccgacaaaagcaaaactgatttcaatttggtcaaaaaaagcataggatttcgactgaaaagcaatttgttcgcgtaaagcaaaactgatcacaatttggtcaaaattccaccggatttcaactgaaaagcaatttgttcgcgtttttgtcgggctgatgtgctgtctgtgttcacgcattgaactcacttcatattctgccgcagggcgtaacatccgggcgaagccatgcccatggtgagaagcgagcacatgcgagccacagttggccggaaaa

SEQ ID NO: 28275 - DNA, 1854 bp, Heterodera glycines
aaaaatttgggggaaattttgaaatttgccaaaaaattttgtccttaacggccacatcaatttggaggatgaaaatgtgagaatttaaggcgtgaaaaatcattaaaattagaaaaaaatgtcaggaaattgggcctggcatggaatggggacgagtggaggggaggggcgacgaatggcggcgaaaaatgtgccgaaaacgacgacggcaaaaaatttgaattgctttggcccggcctagcaacaacaacggcaccggcaccagaagaagaagaactgctcaaaattgatgccaatgtgatgggaaaactttaaaaaatagcgaaaacgatggaaaatcgagccaaaaaacgaaaaaaaaaattcacggtctttttagaacaaaaaaaatttttttttaaacagtgggcggggaccatcggcagtattaccaagacaatttaacaattagttgaaattttttggcaattttagggttccatcagcctcggcaaggccttcttcaaaaattcggaattttcaaggcgtaattttgagaaaaatttcccacccgaacgtcctgttgagctgctggtccgtgctgcgaattgcgaccaatcgcagcacacgcatttgccggtaaagtgaaaaacgaattttaataatgaggattaattaacgcgaaaattaattttgaaaaataaaaaaataaattgtttaatattaaaaataattgaataaatctcaggtgcgcctttggttgcccaacttggaattgctcagcagtcacagtcacaaagtgccattgccatcatcgcctccggtgccaaaagcgccgttggcagtgccggaaacaatcccgatgggtcattatggaattttatttaaaatttaaattttccaattttccctggcgatatcaccggaccataaaagtccttaattgcataaaaatcgtgctaaaaatctcaaaatttgttcattttggacattctgttaataatattagttagaatttcaaaatttttcgattttttgtttttgacggcgcttttcggccccccccccgccccgcttcgctcagcaaaagttatttgcggcacagtatccgccagcaaaagaaccatgccaaagtgcatactgtcttttttcttttattttttaaattttctacaggttcctatttgcactctgtggactttgcggacacgccgcggctcgacaatttccgactccaaattgagcgacaaaacggcacaatgccaacaacaccagtgttggcgttggcacgccgcgccaattcaattgttgtccgaacggcgcgcccattgaacggaattttggcacgggatcagcccattgaagtgcgaattgtggagcataaaagcaatacggtagtgcagcaaaatgaaatacggtataattaggatattgaattttgtcagcaaattggacacttttcactccaattggagtcagccgctccgtgccaaccgcgctttagcactgatcagctgttgcgcttcagtgttgatcaggtgcggtgctcactgatcaatagggttcgaaaaaataagcgaataaaaagtgaaaaatatggatataaatgtttccaaattgatttctcaaaatttcttcaaatttattaaatttaagcctaaaaatcctgaaagtagctttataagtgtgaaaaatcagtttagaagaaaaaatacaaaataaagctaaaatatattaacattgttgaaaaatgaatttaaaaaatcgaaaattttcacttggacttatttttggcacaatttccaatttttaaaagttatatttttattaatttgttcgagaaaataacgaaaaatgaagttttttcgagaattt

SEQ ID NO: 28276 - DNA, 1070 bp, Heterodera glycines
tttatgagaatgtcaaatggaaatgcggaagaattgccctccctttttattttgaaatggaagccaaaaaattacatagcgaaaagagaagggaaaacaatcgattgagatcggttggcattaaaagttgaagaataaatgccaacaaagaagggaaatggaagcgatttgcacgaaagaatggcatttggcatagcaactgacaaaggaaagcccaaaatggaaattatagcaaagcaaaagaaaggggcaattaaaaagaccaattgaaggcaataaaatatgtgcaaaacccaccgaagggcggagatgtgaaagagcagggcactgtcggaagaaaacaattcccgggcatgggattggcgcgtggcatggaaatggccctctgaaattcaaaaaatgacaattaataaacacaaaaaaagaactctgattaataatgatcagtcgattgttcacaataatattctctccgtccctttgctcaccttcgattcgctcttgggtgatcagcgagaaggacaactcgggcacgtctggcggacgataatagcgcagcaatttgacgagcaattggtcacgctttttctgaaaatgggccaaggttatatatcggcagcagaaggaacagccaattcacagaagggagagagagagagaaagagagtctattggaagttttcatgtgaagggctgcgaaaacaaaaagaaaaaaagggatttttgtggccgataaaaatgtttgctcagaaaattgtggtgtcaaaatgagtggtcaattagtgctctgtgaggcaatccctcgtttcgttcgctctctccgtccctttgccgctcgctctctctatttttctctccctgctgctttctctctcccccccctccgctcgctctctctatttttctctccctgctgctttctctctcccccccccctccgctcgcctctctctctctcgcgtaatatttatttgctttttcccttttgctcccctccgccatttgtctgtttgttgactttgtcatttctctctccggtggttgaaattgatgcgataaatgaacgaatg

SEQ ID NO: 28277 - DNA, 1599 bp, Heterodera glycines
ttgaaaaagtatcgcaaactcgaattacagagactcactcggtattctcgaacatttttgttgttcaattcagcaaacccctcacataaatcgacccatttcagcttggaatcggctctaaaatccccgattctggtgatcagagtagtgacatcacgcgatacttcactttccattgcttcatttgtttctttctcactaaatatttttgcgttaatgataaaatgcataaaaacggcatacggggcatgaaaatgtgcaatttttaacagttttattgcagaaaattgactattttaaatttcagtcccaaaaagtttgttcttttacaaaattcgctataaaaattccaaaagaaactgtgggtaggaaaatatgagttcacgtgaaaaattagtttaaaaaacacctttccattggttgcgagtccgcccttagtcggagtttccgcagtttcttttggtaccgttttttgctttcttcaacagtgaaatgccttaaaaggaaagtaaacgaataacaaatgcttccgattgacctgtaaatgtccaacattgagtcggaaccctaaaatgcactcctttccttttgttaatttactccattaattaccgaccacacagcaaacgattgcttcgtcgctggaaaccgccaattgaagtgcgcgaccttttgcttgtctgatcaatgctccccgcttaatgcagcgcaaaattctctaaaagaatcgttgataattaaaagccaatgatggaattttgctcgttggcaaaacctaatacagaaagaattgtaggagtgagacattaatttatccaaaattaagcataaagattgccctactttaatttaaaagtttcgttatttttcatttattaatgtgtgagggcacaatcactgacattcgcttgctgttccgtgtcaaacgcatcacccttttcgacagagtccaacagcagcaattggtcgtggcccacgagtgtcgttcgtggcctcttttccccttcgtcttcgttctcctcgtttcgctccgttcgttcgtcttcccacccgtcttgtccttgccagcacagttcgaacaccaaaagttcgatctccgcattgcccaccaacagcagacggtcatcgtcaatcagtgcgaatgtgtacacttcggatgaactgctggccaaggtatagaagcaggactttgtcgtcagacaccaaaatttcaattgactgtcctttgaactgaaattttcactgttttcggagggttttcaagtcaaacctggacaccaaaaaacggtcgcgttgtgcaaattgaagatgtgttatggtacttttgtggccacccaaacggcaaatgcccgattcgttgaccaagtcccaaacaacaattgaagagtcttttccaccagaggccaaagttagggagtcagcactgaatgcaatgcaattgacaccagtacgatgtccagcaaaagaagaacggatctctaatatatgaatccaattaaccccattaaaccaaaaatcaatgactcaccatttttgcccctctgatacaaatgcacctccccctcatcataaccaataacgaccaaacatttgtccggg

SEQ ID NO: 28278 - DNA, 1668 bp, Heterodera glycines
  unsure (1)..(1668): unsure at all n locations
tttaggagcatatgctttatttcatgatatttttaacgctttattcggctggagatggatttgtttggcgaaccaatttggaactatgcgcgaatgattggcattgactctaacaaatgcattggtgtgttattattttttaaatttaagtataaattattcaaattattaattttatttatttataactgtttgactttttaaacaatgttaagcagtgaaagaattcggagaagcattgagaaaaataattcatgcgaaattaaactcagttgaaatgaacaaacgccaacaaaaacgaattgaaagcccaatccaaatgaatgaattccaaattttgaaaaagattttagagaaaattaaggacaacgaaaattatgggaaaatggaaaattatggacaaaaattcaatagcattctcttagataaacagggaattgctgcgttaaaggaacttttggccattttgaaccaaatcattggccattactccggcactgatgagtcatgcccgatggaaaagagaagaagcatttatttagaaagttttagagagaaaataaaattcagcaaaattttatttgaaactctcagcaaatattcggaaaatgtgaattatgacgaaaagcgtcaattgcttacgtttcccctgtcaacgggcgaacacattatcgcgcgactcagtgcattaattgaactaattggccaacaacggttggttaacgtacaataaatatttaaaaataaatacaaattaagtgtttgaattttgtattatttttgattaatttgctatgaaaaaatttctaaatctgttgatcaaataaatttgaattgcaaattttagtcgcacagttcgaaatgatcatattagtagtcaaattgatgttgtgaaaacaattcaaaacattgcttcaatggagccaattcaattttatgagcgaaaattcactttgtattggcgtgaatgggtacatttcgacttgtttttctccatggcaattcgtttgagtgcacaaattgagcggaacgatcatttgaacgcattattattatccgccagcccaaattatcactcctattgtatgtaagtaaaatagattaattaattggtactttctgctggcttttagggtctaatccgtggcgcagatcccatttgaaaaattcttagctcaaattgtggcatttatctttgcgaaataatttgtaattggcgcgtagttagggctacctaccgccacaccggcgggatgcgctaacggaaaaacttacaaaaaatgttcatttcctgaaattactccagcgaattgttttcgcttatcaccagaattattttagctttttcgattataaaattcaaatcaaaaatggcaatttggtggagataaacaccccgacttggcatgcgccttattatgtgtattggggaaacgacaaagatcagatggtgacacaatctcagcataggaggagcaaagaagcattggtacaacgagaagctatgggtaaaaaaacaattaattaataaggcacacaaatttattaagaggtcgattttcgagaaaatttaatatttatatgctttttaaaaattaatatctcccttttctaacgcgtgtacaaaatataaaatttttttataagaaattggagaccnntgcaggc

SEQ ID NO: 28279 - DNA, 2072 bp, Heterodera glycines
aaaattagagaattagaatgcaatttggttaactggtttcacaaaaaaataatcaattttttcgactttgagccaaatttggtaataatttaattcactttttcattcatatctgtacagaaattatttttcgatgtttcaatgttttttgcccggaacctctcagttgggcgcgcacggttgggcgctcacggttgggcgatcacgtttgggcgcgctcggttgggcgcgcacggttgggcgcgcacggttgggcgatcacgtttgggcgcgcacggttgggcgcgcacggttgggcgcgcacggttgggcgatcacgtttgggcgcgcgcggttgggcgcgcacggttgggcgcgcacggttgggcgatcacgtttgggcatgcacggttgggcacgcacggttggacgcgcacggttgggcgctcacggttggtcgcgcacggttgggtcccagcatgtttttacgcttaatcttcaataatcatcataataatacatcgcagtcaatcgcactcgaaagccagccccagtctcatatggccctctatggattaataacagaaatttcaaacaaatgatagatatattaaataacttaacatctgtaaagattcaatagctcattagaaagctcttttaagctttacaacatctgggtatgagttttttacgctaattaattttcttaaattttttgggaacaaatcaaatacctgataaaaagtcatagacaaaatcaatgatttttcaaaatctgagttcagattcgtgatcagcgtatttttctaccccagaaaaaatgctttttaaaattttactattttttcctatcgggaccacaattctgcacctttgccaagcggtagaaaccaaatgggttaaagggaatttactaatcaagtaatttagtctaatttctcagacagattctggcactgaatgccgaaattgcaacactgcggcataaaatcaaaaggggcgcgggtgttgcgggcattaatcagctcactttttggaaggacgcgctggaaacatttggacggcataatcacaaaaagggacttctgccgaggtgtcaatgcatttgcctaattagcagtccgtcagtcattccccccccccttaattattccttaattgttttcctccgtcctccctttagacaacccgtaataacggcactcaatgcgtttggctctcgtgcggatgtgcctttgctccttcggttggttaacgcgcgtcagcaaacgctcggcgaccgtccgtttgccaatgttcacgctttggagagccattcccgagaattgtacggcacactgatcagtctgcaaatgcgagcattgaatgacgccatttcaaaagtgcggggagtaagcgatgacaaacaaaaagaaaaataccaattggaaatgacggaggaggccaagtccgcagtggacgcgatggcatgcgcaattggcatcctcactttgataaggttggaatggaagtttttgtagggtaagtttaggagaatttagaagatttccaccctctccgaaactataaaaatattgtagattagcatgtttaaagtttgaagcaattttctacaaatttcgaatttccggctgcgcctgagggcatcgtcgaataacttttactttataaatttaaaatatgataatttttggctaaaatttctaatgaaaaagttgaaatctttttctggatgagctcggacctttgaattaatttccgatctctcctcacattgcaagcggagtgattgttgatcagtccaatcattgtaattttgtttttggtgaagtcttcaaatagaattcaatccgttctcacatcacttctgattccaagggcaaccgtgctgctgttgcgtgatggcgttgtgttgctgccccaggacttgacctcaattcacggcgtcactgcgtcgatggccctccgcgagccgaacagtctgaaaggcggtggtgcgcgatttgtgcgaggcatgggacggacaagtcgctttttgtttttacattttaagcattttcagataagtgatcgccatttgagcatcgcgc

SEQ ID NO: 28280 - DNA, 1058 bp, Heterodera glycines
tcgtttggctgcttcacttaggatttgctgtacctgtaccactccttctactgcttccgcttgcccattctgttcggctccgtccttttccctctctattctctgttgcccaattggatgatcggcggattacctttttttatcaccggttacactttccaggccaacaatttagccaccgctttcatccttctcaaccgacttaccgcgattgccgccccattgaaacatgacaaagtacaggacttgtcccaagtctccccggacatacatatcttgctcataactagagcaaagaattttaggagcgacaaagttggggggggaggggggggggtgggagaaatgggcgggagtagcaaaaattgttgaaaatttttgaaaaactgctttgaattaatgaatgcgtcgtcaggcatttctgccctaatatagctgattgtgaggatggcattatcttttttcagttgtggaaatgttgtcttccgctgtttgggttggttgttttcgtcttgccaatttgtactaattggccaatgttcaaaatgacaggtagaaagaatagtgcagaaattcccggttcccgactcggaaaatttttcccgtacttattttggtttcggtttctatgcttttttcgtcgtttggcgacaaatatttattgtttggaaaacacaattaaaataaatgcgaacgaagagagagagagatgaaaaacataaatgaaatgaatgaatgagagcgaacccaaatgggggaaatgcatgcgcttatatgcgaatgaaatggtcagacacaatcaataataaagggtagagaaatgcaataaaatcaaagggagtgaaaatggactttagtcatacccaacacatttaagtcccagttttcattatttcttacaaaagaaattttgaggttctgatcttcttcatcactgctttcaaaataagggaatctggaaccaggcgctggagcagtagtgcgagatatgtgacgattaccggacgtacgcatgggctccattcgacttctacaacaccgaagttgagcgccgcttc

SEQ ID NO: 28281 - DNA, 798 bp, Heterodera glycines
aaaggggtagagagcacaaaaagtgctttgaaaataatggcgaacatttatttatttacactcggcgctggcgctgatcgatggaccgccgctgtggtggagaaataaatataggaaggcacctcattcgctaactgtctagcatagcaaaagtgcaatactctttctctatctctctttatctatatccatttcaattcaccctctcttgctctgtggatataataaatcctagacccatcatttaaaaggcaattcggtatagcactttgtgctctttttggcagatatatttaatttacaaaaaaaaaaaaaaaattccagctccctaagaatttttttcgaaggttttcccgtttccaagccattagaagttttttcagaatttttttcaccaaattgagtaaactgtagaataaatgttttgttcgaaggcctcaggaatttataaatgcaagaaaagagcaaaaatgacaaaagaaaaaaggaaatggtaaagaattgtggtcactaatttaatttaaaattttttttttttatttggtgctcaaaatcagtttcctgaaccggaatgggccaacggcgtctcaggcatgtttaagaagtcataacttttttcacagttgacccaatcgaacaaacttgttatcattcgaaagctcttaacaagctctttcggctatcaaaatcgcaaagatttgctgacatataaaaaagttataaacaaatatatggcaaaaattctgacttttttgcgcttttcgcgttgcagcatttttataaatttgttcatcgctt

SEQ ID NO: 28282 - DNA, 727 bp, Heterodera glycines
tatgatgacaatcaatccaagttttcatattttgcatttacatcaaattgcagatgaatgtgatgggaatgcgccaagaactgaacagattttcatcagtgcccggacaaggaacacatctatcccatatcgcccgactgaggccgcgaagcggcctaacaaactaaaaaacgggcgcgaagcgcccgtagtaaattgtataaaaggcggcgacatttcccactcttcctcacataccaacctaggtacatatcagggatggaattccgaggcaccaaaaaatttcggaagtcggaattccgaggaccaaaaatttttcggaagtcggaattccgaccccaaaaatgtcggaagtcggaatttttcaaaaaatataaaatataataaaaaaaatttttaaatatttaataggctaaattttaaaattcttaaccatgtaaaaggtgatatcaaactgtttttagtatatttctatattaatttaaatttttttaatgattttcaaaatatttttatgtaattttacattatttggaattttttttggacagttacacccttttttgtggcgcgctttatccaaagaaaattttggtaataggcggaggggtccggcggtgccgataggcgccgctggaaaaattttagtgatttttaatgcaatttgttaacagatttgtccatgaaaatggccaaatttagcgatttctagcacattttcaagaaa

SEQ ID NO: 28283 - DNA, 958 bp, Heterodera glycines
  unsure (1)..(958): unsure at all n locations
cgccggggaatttgatccatgaacaaattagacgtaaattcaaaacgcccatgactgatgaacagagacttcatcagcgttttcctcactgcatatcgtgccggcttcaactcaagttttcgtgcaatgtccaacgccaatccgtccatcagggacaccttcttcacatacattttcagaccgacaacttcgaaatggtagcgagtggctgcagcaacaccgggtggtgtgattaggacaaagtcgttgtcgttgggcaaaatttcaatgtccaactcacaaaagttgatcaagtagagaggctggttaaacaaatcggcgtcaattttggcaatgaattgtgctgttctgctgcctacaaacaggttgcgtcgtgcagtgcatccgtctcccacctcaagcacaccaccagtgtcacggtagtaacctgcagcattcaaatgcgagtccttggccgctgttgaataggagagttcgtgtgaaaaatacgatttgtaggccatcagagaatttgcgttgaacacttcacggccattgatgctcattttgatgttacggatgaatgtgtgtccaaccagttgaatcggagcaacctcatcagctgcaaggtcaaccagttgaccatttgcattttctttgcgaattcgaaactcagatagtaaatagcatttggagagatcaatataattttgactggagtgaagcttgaagtgatagggggtgtcggtcagagggttacttgggagcagttcaaacactttggaggatgagacgctgacgttggttggcgggatgcggaaaaagtccaaggcattggtgatggagttcacactgtcattgtcaattttgtggaatgccatttagtaaagtccaaatgcgtcggatcgaacacgttttcttgctggtttactgattgttcggccanattattgtatggtgacttggtgcatgttttctt

SEQ ID NO: 28284 - DNA, 974 bp, Heterodera glycines
aagcatcaattgcggagcgagcaatccggaatgtgaagcagagattgtataggtattttagcggaaaaggagacactgaattgggtggatacagtacagaaaattgtggacggaattaacagctcgccctcgcgtgttcacgggatgcgtccaatagatattgacttttcaaatgctcaggtgtggaagcgaatgtaccgaccgcaatcatttgacagaaaaactccccgcttccataaagataaatttgtacgcatgagcagagataaagggcaattagagaagggatatttacaaaattacggggatgaaatactggagattgatgaggtgctggaagcggtgcacccaattcggtacaagctactggatgagcatggcgagaaattcaaaggaagctttatgagcaggagctggcgcgcgtaagaaaggatgcagagacaagctaccgtatcgagaaggtgttcagaaagaggaaaagagatgatggatcaaccgagatgcttgttaaatttataggatatcccaatcgggagtggattaatgagtctcagcttgtataaaagcatttacattttcattattaatgcagataaacaatcatgtcaaacagtttctttgtgtttttacccagtgatgtgagtgattacccggccaatcagcccaacaaatttcgtgtccgacttccaaaacctttgcattttaatggaacctgggtgtgcgggttgcacagtatcagttacccctactcgtggtcaacaattggcacattggatgagcaatggattgacattcacttcaccgaccgcagcgctattgatgaggaccgacaaagaattatcagggtgccggtgcccaaggcatcgcatagtagggttgaacagctgcgagactttttgactgcaacattgcggaatcatagtggtgcaaattgttgccactccctcgtgagtggaagagaatcgaaatcggac

SEQ ID NO: 28285 - DNA, 915 bp, Heterodera glycines
  unsure (1)..(915): unsure at all n locations
tccgcacagcgaagcggaccaacccttctaacaccgcccgtatgcgggcactggccaaaggnaccacgncggcaaaactgctcgtcgagaatcagcgctttgatctgtggataattggcagctgcccacgtggcagcaaatccttaagcggtggacgagggaatgctttttaaagactcggccaatcggtctacatattattaccgactgctggaccagagcaaaccacataatctggtagaggtcgaaaaaaattcctaaaattcaaaaacccgaaaaccgttttttaggcctagctcaaaaaattttgaaaattttcgaaattttaaaaactggaaaaatccagctcattgaactctacaataagtctgctggccaccctgcgctcagctcaaaccctaatgagttattcgcctggtactgaactggccaaagttggtactgaatttctccgcgcttctacagcccttcctattatatgtagaggcctggaattttttttgttttttagaaaacacttcaacttaggttcctaccagcaaagactttttgattagagttttagaaaaaaagttatgggccccaaactgcgagaaaaagtaagaaatccttccctgggactcagtcgtccgcgctgaatttttttctatagttttcccggatgcgccgtgaaaagttgtaagaccaatgcacaactttcagaccccccctggttcccggtcttgagatatcctttttggcaacgaaacccctaaccattctaacatatatataactagcgggtgcgtgaaccgtcggctatttagctgggaaaaagcgcttcgcgctttcggagcttcgctacctagataagctctggttgtggagatatttgggaatttttaaaaactatcagcgatttttaggctgcttcgc

SEQ ID NO: 28286 - DNA, 1985 bp, Heterodera glycines
  unsure (1)..(1985): unsure at all n locations
attcaatgttttctcgtntagtctctgctgctagctaatccagcttttatctttgatcaaaataaattatttgaatggcaccgcccgtcagaaaaaagaaaaatcagaagcaaaattttgtaaattttccgactgtttcaaagctatggattttccactgcccgatcgtccgctgcccaacaaaattcgctttgataaccttcaaaaattgagtaattcaaattcgaggggtcaaagtaacagttcgtacaataattttttttattctaagcctttgtacgaactgccgccaagacaccacaattagagtattttttattaacgacaaaaatatccctttccagttacattgaccattccgtcctcgcgtttctccgtgccaataaccaaatttgggacaaaggcaccaatttgtatttgtatgtgtgcacacatggcaatgccattcatatttggaatgtttttgtcggagaaatttggcccatttttgcaacaaatatttgccgtttggcctttatggatggtgatcaactggacaatttgattcgtttcatttcgccaacaattctctttgacctcaacattgattctgtccattccggtgaactgcttcccgatggaattgctgattttgatgggccaaatgcaactccaactgctggccaagcgttgtccaaatggttgcacactccgagaaaagatggccaacccaagcgattgagttgtgatcttatgtcaggaaccattgaatgggtcaacaatttcaaggaggtcagtccccaatttttcgtaaaatatttggattaattggcatttgcttttcgtttcccattgtttaggcatttctccgtgccaccacttcttctgccagctacaaaattcgacttgaactttttgagccaacagaaattgtgccatttgaattggtgaacgaacggaccagcgaaattctaaaattggagaaaggagaagttgatggatgggttttcccatggataatgaaacgatgccaaattggagggccggcggttcaatgggaggacgaaaatttggataatttgaacgatgtccattttatgcttcaagcagattgcattgggtgatttgcttttattggtgccgtcacattaaatttcatttcatttatgccattgtctgcgcaaaaggcgggtcaaatgaacgcaaaatattctctgaaaatgagtgccggaaaaagtgaatgaattattaggaaatgagaaattctgatcattgaatggaaattgatctgataattgctcctcatatttatttgttgcttctttcatttgatcagaaaactacaaaaaactggttttgctttttggatattgataatttatccaaaaaaaatttaaaaatggtttataaactggaaaagcttgacaaatgcgcgaccgcgatacgcgattggcggcattttttttgcgcgatccgcgaccgcaggatttttctgtgcgcgctccagccctgcttcgaccaatagctttcagttttcaataaaaaaagtttacccgaaaattttaaaaaatttgcataaaattaagaattgtcacaaaaaatggaattttattattattttattcattactagagctcgcaaaaaaggcaccaaaaatagcgaaaaaggcactaaaataggcaccaaaaaattaaaaaaaggcatgaaaaaaggaaaaaggcatttaaaatttttttattaagggtttttagagagcaaaaaaacaaaacctaatcaaacaacttaattttgggcatttaaatgattattgattattaaatttttataatgtttttcgcattagaaaatttttaaacctaaaattttttattaagaaaaaaaatgaaattttggcgatcaatttttgagaaaaatttttaattcttaggggtgtattttttgaaaagtttttcatttcttaagggtgtattttcccgatcttattgcatcttttatggaatatttc

SEQ ID NO: 28287 - DNA, 2031 bp, Heterodera glycines
actttgagcatgaaattttcctacttcccttaaacctaaagctcccgcagcgacaccgggacgtgttgctaaaaaggaataaattaaagaaagcattggtgacttttgattttcttactgtcgaaagcccccatggcaactttaaaaccggcacccggcacacccaaaacattttctttgggcacgtgaacatcttcaaaagtaatggcacgagtgtcggagcaacgctggcccatgttaatttcctgtgaaagcaatttacaaaattccaccattgatttatgagatgtaccgtaactaaaaataaggaacccgtgaaattcatggtgaccgtgatcatggtgaatcccaattgatccaattgcttcccattacctttttcccgcgggttattccaggcgtgtctccgtcaacaacaaaggcagtgaatgcctaagatttaaacaaatgagaaacgattaaggaaagcaatcaccttgccagcgggtgtcttggggtccgagtccgatctcgccaagacaaaaaaccattttgcgtatccgccaccggtaatccaggccttgctcccattgagcacccatttatctcctgaaatatttattttcaaatccctctccctctttaaatgagttacctttcagaacggcggttgtcttcactccgctcacgtccgagcctgcccccggctcggtcacacaatacgcggcaatcagtggttccgctgccaacatgccggcgtacttctgtttttgagtttcgttgccggccaaaagaagcggagctaacgcaagcgatgggcccataatggccaattgaatagccgaacagccataagataacgcctcaacgatcagagcagtctccaaattggaacaaccaggcccacatgaaaaggacggcaaatccataaattacttagtactgtttcattcaggaacactacttccagaaaatattaatttttacattgacatttttttaaattaaaaaccgcctcgacacactcaccatatttttcgggaattgtcggattcatcaatcccaattgatgcgcctgtttgataatgtcccaaggaaatgccattgttttgtcatattccgcggctttaggcgcaaccacttccttcgcgaatttaagagctccatcccggatggctttatgtcttaaattgtgaatgtgatatgataaacaatgtgacaaaatgctaaccactcactggtcagataggtcaaaactgatcagtcttcgagacgacaaaccttttccggaaaaagtatcggaacaaaaggcaattagtttcttcgaaagcatcttttaaagattaagaaaatatatttttaagcatttgatatttaaataaatgggttaaccaacagatgaaaactcaaatccaattcgaatcattcttttacacggtctatcaaaaaaagtataataattgtacaaaaaatacacaaataatgactgtccttaaacttactataaaacccatcgaaaattataacttttacagttaattagaatcttactaaattcaattaaaaatgtaatttaagtaacataagatgtcccagtttgagcaactctaaaaaagtataggtaatttatttttttgataaataaatccaccgttgcagcaactgacgagaaataacaagtctttgaatttgagaagtgcctataaaagttgtcattattttgtaaagcatattcgtccagcaaaaccaccttcataaatttgaaatattttggcatcgcgcatcaatttttcagcaggaaattcggtgttgaagccattgcctccgaatatctataagtttttaatgcctttttcaaccattaaaaatatacctggacagcatttgacgccgtctgattcgcagtgtcagcagcgaaacatttggcgattgatgcccaatatgcccccggtcgacccgagtcgacttcctgagcacttttgaaggtcattaatcgtgccaactccacattgatagccatatcagcaagcagaaaagaaacaccctgatgct

SEQ ID NO: 28288 - DNA, 1664 bp, Heterodera glycines
aaaagatgataaaaaggtcaaataaaatttatataatttttaaaaaattgcggatttttatagtattttactcttctcttatgacttttcagaaccgagatataaatttttttctgaaaaatagaaaatttccagaatttctggaataactttttttgtttttgtggtataaatttcaaataaatctcataaaattctccctatttttctcgatttttaatgctttaaatgagctgaattggacaattttgaggcgagttatgaatttttaaaatttaggttgaattttcaagggccaaaaattattgatttttcaaaatttttttaccaccctccaaaaaattcaaaacgcaatataaagtgcatattcgtgttcagcacctcaaattaccccagaaaagtattttttggcaattttaggagcaaaaaaatttctcatgaaatgcaaatccatggggtcccccctttggttttgcatttaaaaattcatttttattttatatctttttttatattaaagataaaaataccggataaagcacattagatagagcttaaaattctctacaaaaatcctctttgacaatttttcgctaaaatcaacccctgacgagttatgagcccgggactgaaatgtcccgctcaagccaaaaaaaatttctatttccggaaaattttgaaattttttcaaaaatgccaccaatcgatagagctcgaaaaacggttgcttgaaagtggtctccgttttcttgggaaaaatcggcaaaaaataataaaattcaaaaacgaaaaattttcgagggggcctagctcgaaaaattttgaaaattttcaaaatctgaaaacaccatcggatgcagctttaaaaactgcacaaatgctcaagcggcgccaacccgctccgcttaacccccagcgagttattcacgaaaagccaaaaccggcattttgagcgccgttcagtcgccaatttctacaggctcggcatttgatctgatcaaaaagtgatcagtgacaaagttgtagccaacatgtctggggtgtgccctctcagcagactttttccgctcccggttcccaggaaaaagttacagcccgaaaaccgagctcgtttttcaaagttggccgtttcagcgcctctggcgctcagttggcctccggaccggaatttccttatttttcccagatgcgccgtcaaaagttacccctgcctgcaaaatttcagccccctccgggcaaaccacggggacttataattttttctacgaaacccaactttattctatatatatataaactagcgtgttgtggcgcagtgattgctcggtgtagacagtatgctttgcacagtgattgctcggtgtagacagtatgctttgcacagtaattgctcggtgtagacagtatacttttggtatatatgggcgggtgctgacatgagcgcttcgcgcaaaggacttcgttgctagtgcatgcgcggcttccatatccgcgtcttttttatatttaaggtttaattcggccgcttcgcggcctcaaagggtgctccgcgcccttttatattctaaggtctaattcagccgcttcgcggcctcaggacgggcgcttcgcgcccgtttttaaattttatggggataatcggccgcttcgcggcctcgggacgg

SEQ ID NO: 28289 - DNA, 976 bp, Heterodera glycines
ttttggcgctaaatcaaaatttgaattttcgcgtcgatactctgtgggtggagggacgcttgctgggtggcaatgccgtagggtgaaaggctaatttaatgctattttaaatatatttatctattttaaatatgtgtttttatttaatttagaattatttatataatttaaattgtttatttttaggaatgtaatatatattatttaaatgttttatttttagatatcccaaaatgactttttcccatgctgcaccagtgcttttcatcatgtttgccattttgtctggacaatccggcgaaacctttgcgttccaagcggagatgcccctgatcatcaacaccttctactcgaacaaggttttaaaatgggaaatgctctgggagtctaattaacccgtaaagtctaatctaatcagtttttaaaatcttaatctggtttaggaaatcttcctccgtgagctgatctccaactcctctgacgctctggacaagatccactaccaggctctgaccgacccttctcagatggagagtggcaaagagctcttcatcaaaatcgtgccgaacaaagccgacctcgtcaacaaccacaaacccggaactgaggcgttcattgaggctcttcaggttttgttttttcgtttggtcaacccctaatccctaaaaaacacttttgttggtaatactggagaatctggactccacccaaaaaatcatttttaagttgtggaaaaacaacccgggattttcggcccttctgatcacgaatatgatatcagatttgcaaaaatgatttattttatcattgtctggtttttgagaccttagatttgaaattttgattaaagtttcgaaaatctaaggtctcaaaaacaatgataaatcgttaattttttttgagttaaggttttgttggtggtgctttgtgggttcgccgtttacgagaatggggcgaggaagggcaacgaagcgcg

SEQ ID NO: 28290 - DNA, 1082 bp, Heterodera glycines
atccaaatgcaatgccatgtccaaaatacccatgttataaatatgatttgttttttgcttttggataatcaagtaaaatgaattccaactttgttagtgatatgtctaccaactacaacaacagcaaccaacaacagtcagtttcaatccgttcatatcagaaccaaatgcagtccgttcctgtgcctattcaacattccgaggtttatataccgttataattttaccattttggacaatttgcttatgtttagactgaaacgaatttctatttccaacaggaaagccaatttaatgggtcgcaaggaccgcaggtgagcatggctttggcatcgtgaattctaaaatgtataggcatttgttattttaagacaattgaacccaatggcaatataaaaaatggttttctccaagagaatgatgtgaccttacagagacagcaacagcaaatggccgtcagttctccctctggtgggttcagcaattttttacaatagtctaagaaatgttcagtgagttcaactgtagattgtaatgctggattgggcaatggacaaaatggcatgcgggtacaaacaggcaatcttaatccctaaccagaatcgccccattttgaagtacggtttttttgctggctcgcaacagtcggatccgtcaagttttcttttgcaacagacaacagtcgaagaaggtgttagcaacggcgacatttgccataatgcgcagcgacatcagctgcaattttctacgatgaacggccaaaatggcggaatgtgttttccatcgaatttgccatcagcaatgtcgatgttagcaaatgctcctcaaagacgaacatttttattcaattcggacatggcaaacaccgctgctaaatctatgcagcagcatttaaccgaagacatggccggttggcatttgcagcactgtcctattgctccctcaacttcacgtgcggcatttgaacagaaaaggacaacaataaacagcagcaacaacataaataatcaagcacttcggacgacaaatggtcggggcaccaagcgaaaggcatcggctgctcactcccatgtcgacacaca

SEQ ID NO: 28291 - DNA, 1016 bp, Heterodera glycines
  unsure (1)..(1016): unsure at all n locations
gaaaaagatgaagcaagaactgaaaacttaagctactaagcatcacaccccctgcgcnttagcaagctaaatttatttttttaaataaaattttttactttttcatttcaaaatacttttcaattttttcatttattttactatttgagtgttgttggttcgttttagaaaaagtgatgagtaatgaagaacaaatttctcgttttcacatcagcggtttaacggataaattatttgtcgttataataattattattcatagagaataaattttttcattccattcattttagcatccattttattaaacacaaaaaaatatttgtattatttttaaaaataataaattttcaaaaaatgaatgcattgaccgctgcgatttttttccttcgttttatctgcgcattcggtaaagaataacaaaaataattattaaattattttaaagattaaaattttaggcttgaagtgctttcttgaatttgaagggaatggaaaattagccaaaaaccaattggatgatttcgagtgcccgcttgaggggcagctctgtttgttcgctcaatgcgtggacgtttacggaggtagtaaaagcgaacaaaaataaaataaaataattatttttttttaaattattattatttaaaaattaaaggtggcattatgccaacttttgtcggctgtcgtcaacgggcgaatgacaactgcacggaatttcttgcgaaatgcaaatcgctgcaagccgatggatgctgctacacttgcagcacagataggtgcaacagtggctggacttgtggcaacgtgtactgtacaaataccgtattggaaaggcggcatttttgtcactatattttttcaaattccaggagtacaatcacttccaccaccacgagtacttcgacgacaagtacgttgaccagcaccaccaccaccaccaccgccgcgaccaccaccaccaccaccaccccaacaacgccgtgccgttgccgtcgactgatagtcgtccgattgtg

SEQ ID NO: 28292 - DNA, 1376 bp, Heterodera glycines
acccaaaaaaggaactctttatgctcgagccaagagacgagaccaaaaaagactccagactattctcgagccaagagtgcgaggccaagaaaaggaacaagactattctcgagccaagagtcgagaccagaaaagactcaggactattctcgagtccagaatcgagacccaaaaagactcgagactattctcgagccaagagtggaggccaaaaaaaggaacaagactattctcgagccaagagtcgaggtcaaaaaaaggaacgagactattctcgagcccagaggcgagaccaaaaaagactcgagactattctcgagccaagagtcgaggacaaaaaaaggaactagactattctcgagccaagagtcgagaccaaaaaagactcgagagtattcgcgagtcaagagtacgaggccaaagaaaaggaacaagactattctcgagccaagagtcgagaccgaaaaagactccagactattctcgagtcaagaatcgagaccagaacagactcgagactattctcgagtcgagaatcgagaccaaagaagactcgagactattctcgagtcaagaatcgagaccaaaagaaggaactagactattctcgagccaggagtcgagaccaaaaaagactcgagactattctcgagtcaagaatcgagaccacaaacaggaacaagactattctcgagccgagagtcgagaccaaaaaagactcaagactattctcgagccaagagtcgagaccaaaaaagactcaagactattctcgagtcaagaatcgagaccaaaaaaaggctcgagacttcgtatggaaaataaactctataaaattaaatttatttttaaatttaattttcgtaaaattttactttcgaaattcattcatcctcaattaagcaaaagttgagtgctcgggcaatgaattttgctgccaccattcgttccgctatgacaaagggcgtcggccttacaataaactgtttggtgtggtgggtgaatggcacatcgacgagtttgaagttggcagtaatctgatgaaatgcaaagcgggggctatcggatgccaaacttaccgatgcaaagacggtgagtcataggaacaaaatggcaccaaaatgtgccaaaattggatgtaaggggagaggggtcggaatgccaaacttaccgatgcaacgacggtgagtcataggaacaaaatggcaccaaactgtgccaaaattggatgtaaggggagaggggtcagaatgccaaacttaccgatgcaaagacggtgagtcataggaacaaaatggcaccaaaatgtgccaaaattggatgtaaggggaggggggtcggaatgccaaatttaccgatacaaagacggtgagtca

SEQ ID NO: 28293 - DNA, 1597 bp, Heterodera glycines
ggctctaaatcacaaaataggtcattttttacccttcaaaagccccattgcactgaaattttcaaaaaattttcctggcgacgcctatcgccaccgccagatccaccccctcccatcagtacccaaaagtttttagaaaaatcgcgccccaaaaaaactatctgaaaaacaaaaaatcatagggtttccatgactggaactcctttgcaaatttaaacactgactcacccccttccccattcagtcccttcccaaattttatatgcatcgggattttaattaatttttatataagaaaactttaaaaaaagttttaaaaatggtctaaaaattgcaaaaatttgagtttttaaatgcgcggtgcgcggacaaaaaacctaaaaattgacatgagattcgataagaaaagcagcagggcatttgggaagacagacactccgttaattatggagttaatgaacactataattggctaattaattaaagggcgaccaccactaaataataatgaaaaaaaaatcaattttttctgacccaacaaaaatgaaaatgagcgaatggagtgaaaaaagaaacagcagaagaagaaccatttttataaaacaaatttcttctcccaacgcacaaaggggagccggaaaatccgacactggaaaatccgacaccggaaaatccgacactggaaaatccgacacaagcagaaaatccgacaccggtggaaaatccgacacaagcagtaaatccgacattggaaaaaccgaccccaactttaaattttaaaaataatttttgattgtttgagttagtaaatatttaaaatacatataataaaagttaaatacttaagttatttaaaataaatatttttattgcttgggctgggggggggactaatggatgaatgtcccctggggggggggggactaatggatgaatgacccctgggtgggggggatattgctggaacggagcctagaagaaaactgactttattttagttatcggagcaagatctagcaaggaacgacatttcttccagaaatttttaaattatttcatcttcaataatttcaaaaaatcaattttttaatccagaatttaaaaaatagaacctttataatgaatgataaacgccaattatatggacataaaataaatatgcttatgaattgcaacatatgcgcatacatttttttcaaattcaggggtaaattttccaaaaaatcttcaaattccttaaatttaagctaatatcttgaatggctaaatatgttatgtaacattattttagaagagaagataccaaaacttccaattaccatttctattaaatttttttgctgaaaatacccaaaataatgaaaattttttcgatccttagaggtcaaaaaagctttaacagagggggccggttttaatgtagtacaatttttcgaaaaaaattcccaaatatgcccctctatttggaaaaaatattcctgtggggattattggcatccggtatattcaattcacttttatttaagcgccacaggattaaaatagggggaaatttttatttttcctggtttttaatttatcaaaaggtaggggccgg

SEQ ID NO: 28294 - DNA, 1574 bp, Heterodera glycines
aatttttgagtctttcacatttttagccgcgatgcgcgatgtgcgatccgcgattcgcggcgttttttttttttgcgcgatccgcggtgcgcggccgcgggatttttctgtgcgcgctccacccctgttacttagagcgtttaattgaaaaacaaaaagaacgcttattgttagttttttcaaaaaaattttaaggcatagaagaacacagaatagggaaattgatgcataaatttccggatttttcgttttgtacactattttggatgcaaatctaagctaaaagtacatatgtctttagatattccccctgccctttaaatttcaatagaaaattgcttttaccgctttcactcttttcaaatcggctttatccctaattttaattgttgcaattaattttaggggttacacatttccctttctcctctttcctctctgttgcgctatcacaacacaattccaattcgtcaacagctttttcttccctcatcgacgagatgacttattcaaattcggtgatcctttctccccacccatttttatgtaatttttccgccatttcccccccccccctcgttcagcgatctcgtcataaaacttccgatgcttcttcgcgacctcgtcgtacgacctccaatgcttcttcatctccaaatcatcgtacgacctccggtgctgctgctccgcgaacttatggttgtgggaccaccattaactccgatgctgctgctcgacgaaatggcgctggttgtgggactgccaaagccatgggtgctttgccaactgccggttgtgggactgccaaagccatgggtgctttgccaactgccggttgtgggactgccaaagccatgggtgctttgccaactgccggttgtgggactgccaaagctgcttctcgaactcgtcatgcgacctccagtgctgcttcaactgctgctgctgctgctggccgtagtcacagcggttcaagcaaatgcgtcttttgcaacaacaaataattttgctccatttttcaaggtgctgcaacgaacggagcggcgggcgcggaagtggcaccggcgaagaatgccaacaacaacaatacgacccgacatgggaatgcggccagcagctcctcaagcagcgacagtgactgaatgacgtgacgcgtggtcggatgagccatggtacaacaacaacaacaataacaacggcatgaagaaaagtggcgatcggaattgacgagaatttttgcagaggatattaattaaatcacggataattttgccatgagattgatctcccgtcaaatccatccgatttgtatgtatataatttcacccaaaatgccatcatcatgatgttgttaccaatgcctaaatatgtgccatctgtgtattgtgaatgtactaataacatatattctgttgtttcattgattcattctaggggtttttcggggtcgctgatcacgaatctgacatccatttcgaccaattttgaatcccggacccgaattcgaacaaaaagtcgaaaattctaatttttcaaaaatcattttacggtgcgaaaataacaaaagttcaaca

SEQ ID NO: 28295 - DNA, 863 bp, Heterodera glycines
gaaagaaaagaaaaagaaatttaaaagaattgaactttctaccaatgtttgagtaagtgttaaccagcagagaaaggggaacagagctgggcgaaactcgacttacaattagcactcgaaaccgaggcggaaaacccagaggttttcaaagcccaagaattttcaaaaaacaatttagggagtgtgttttttccgaaacttatggtaatttacacaaaattcgaagctcacaaaacctcaagttcacccagctctgatggggaagggaaaggagtttttgctgcccaatctttgaaatgacaaacaaaactcaaagttggagcaaacccatcggaataagccaactcgtatttgatcagcaaagatatgaacgaacgaacggaaatttgatgtacaaagaaggacaattgacggaatacccaaagaatgcattcgaaccgtgagaggggcgggggaagaaatatcagtggaaatgaaagagagggaatgtccggcaaagggcagttgcgcaaaagccaagacaaacataattaagagggtttttggtaattcttcagcttaattggcattttttgtttggatgaaacaaagcaaaacaaagaagcggagatatatttataaaggaagattctgagtttacaaaatgagctttaaaagagaaacagacggaattaaattgaaataaaatgacaaaataaaattttgctttgtgagtgtgtaccgtacaccatttgtagatatctacagtatgagaagagaagaaagaagtgaacacagtgatcgattggcattgtatttgcttgcttatgctaaactggctgcagaacataaaagagacatataaagaaaaggagcatcgcaaa

SEQ ID NO: 28296 - DNA, 1472 bp, Heterodera glycines
gagattgctgtttattaaaatccacaggatttggctttgttgttttgttgctgttcaggagccgttcgttaattgcttcggctaatattttagtataaaaatgtttttttttttttctcctccgctcgcgtccagacatttgcggacaatttcgggaaaaaatatttataaaaatttttgttttaaatgcaatgcaaaatttggtctcatcagaacgtttctcttaattttagatataaaaaaatattttgaagatatgcttaatcatgatcaaaatttactttcactatttcaaattaacagatcgtaacaagtccgttcggttttactcattttaaacttaaagtgccaattttgaccaattgtaacatgggggtcaaaaaatgtgcttttccccactctgtcacctataattaacagcagaagtctttgctaaaaagacaaattcttttttctgaaactaaacacattcgatagaagtacgaaaggtctaaattattgatatcaatcaaaatactacaaatacacggtaagatgtacgttaaagtcaataagttattcaataaatcatggagtactccttttcatcaaaaaaaaggtaaatagacaaaaatcaatattctgcctttaatgtgaatagttagaaatgggtgcaggattagtgatcgccgaccccgaaaacccttttaaacatgttttcatgacttttgaatcataaaaaaattttcgaaaaagggggggggacaaagcacagtattacccccaaaaaataaggcatttgctgactttcaggaaaagcgagattttgtgaaaaatggctaccaattaaatccccggatatcaaccatattactagtaataggcggaatttggccatatccgaaaagaagcgaacaaaaccgagaaaccgttttattttgtagaacagtgtgtgggttggttaatggtacgagaatgcgacagaaaataaaagggggaagggagacaaaaaaagggtgtcaaaataaacggaagaaatcaaaagaaaaaacaaacaaacaaaaaatgggggtggtgaaattatcatcattacacagagatccatccgcgcaagggtcagcaaaagtcacacattcaacacgtcaaaagtcagggcgatttgctgctcgccgattcgtcagggtcagtccctgaagagtgtattgcaataggaaatgtttaaaaccgattccaaatttttgttcgaatcagggttcgaggcttgaattggtgtcaaaaccgaacagggttctccgagccgaaaaacccctaaaatagggaaccatcccttttatgaatattctagatttggggaccaatttatttatgacagtcaattcgaacaaccattacaaatcatggccgaaaaattttttccggactcggggttcgaaatttactaacttcgggggtttattgtttcgtaattctttttacgattttaaataaactaa

SEQ ID NO: 28297 - DNA, 1929 bp, Heterodera glycines
taattaatgtgaatatcatttaaaaaccaataaataatccttttaaagttcatcagcaattaatagagcccggaaatttcttatttgcggatcccgctgcggggttggaactcaaaatttttttgggatacgggatcccgtgggattaatcccgaaaatcccgcaatttaaaaaaaaaattcgggattgcggattgggattccacaaaatcccgcacgggatcccgtctcgtaccgggcactagtaattaatccattcataattaatacaatttggaggtttgaaattttccataatttattctctataactaaatttcacaaattaaactgttctcaccttggctttattttaatgatttttttaagaaaattatgaattagatttattgaaaattttgtttcatttaatttaaaattattaaaaaaaatttttttttaaagaattaatgatgaaaaagtgaagagactaatcattcaattgaatgtggacattgcaatggctgaccttttcgtggaagtgaatgatccggcaaaaaaacgtgccaatctttgcctaatggacagtttgttgactcatctggtggcaaatggcacattgtacacagaagtccaagaatggcaaacccacatgctttatgaacattttattaatcatgtaaaattacaaagataatttatttattttttaaattaaggttctttggttaatgtttaatcatgaaacttgttctcgaggggtttttgacgacctctgatcatgaaaatgacatctattttggccaacttctaactaacccgaactcggacaaaagtttaaaattccaattgtccatttatgattttttgttcaaatttaagccatttttaaagtagcgcaacaaattccattgatttaaagatgaatttaaaatctttaaataattccaaaaaaaaaacaaatgcaatttctttttttgctaagaatttcatacagtccatgattagaatcaatcaatatagccgcattgattgatcagcttcaatcaataatgattgttggttgaccaaaaccaatcaatcctcattattcagaacgaaattccgcgttcatcggatgccgatttgcgctgggccaaaccggagtgccataaggcggaggtggcccaagcggcagtgagcaaattattgagccaaatgcatttggtggtacaatcgcacagttttgtgctgtgccaagttgcacaggattgtgccgaattcgtatcatttgtcaaccaatatgcgattaggaatttcgaaaaattatattgctgtaatcaatgtgccataggtcgtcgtatcgtaatagtgccagtttgcaaaattttcaagcaaaactcttcccacttttgatgatatggatgggctattaaaattataccagttttctccaaaatctgtaaaatggtttttaccaaggatccacccgtccgggtcattaacccgggcaccctcgttttacaagggtttgaaaatttgaaacaaaacacctcaaaaaaacttaagttggcccttgttttgggggggccaaagaaatttcttttttttttgaaaatttttttttggcacgggggttttttcccccaaatttccccctttttttttcccccccgtataacaaaaaacccccccccaaaaaaaaaaaaatttttttttttttttttttttttttaaaaaaaaatttttttttgaagaaaaaatattataaaaaaaaaaatttggcccccccccccccgggagaaaaaaaaaaaagaaagaaaattttttgttttttttttttttttttttttttttttttttttaaaaaaaaaaaaaaaaaaaacttttttttttttttttttttttttttttttttataaaaaaataaataaaaaaaaaaaaaaaaaaaaaaaaattttttttttttttt

SEQ ID NO: 28298 - DNA, 1367 bp, Heterodera glycines
  unsure (1)..(1367): unsure at all n locations
ggtgcaaaataagctattaaatttttaaaaatttaccagtttctttcgggtgtcgtggccaaatgtacacagacaactcgtacaatttgcttagaagctttaggttagaccttgccttaggcttaaacacggagagacggagaatttgaatcttgaattgatcagaaagtaaatgtgataaatgtgatttgaaagggaaaacttttgcttatcatctgcgaaatctataaatttattacaaaacaaggatcggttgaaatttaaaaccattgagcatgaatgaaagtatttttaaaatcccgtaaatggtaaaagccggggctgatgctcgagagtctcggtctcggctcgagaaaagtctcgagtttttttggtctcggtctcgctctcggcattttcagtctcggtctcgattttcgagactcgagaccgaaaagagattgttttacttcccgaatgattggcttttgataaacttaaatttaacacatttttggtaactttttaaatttaataaaatttgatttgcacttttttcacccggcgacgcctaaaaccttaaattttttcttaaagacatgatcaaaatcgaaaattttgtcactttttggtgaaacctattcagcacgtccaaattttcaaaattttccccggcgacgctaacggcaccaccgaacccccaaaattcccttcacaaaaagaatgtaaaaaaatcgctgagccatgatggggccataggcgcaccaatacggcagtgaaaaattcaatttacgaagagaaaaaacttacaaatttcttgttttgtgtttttggagttataatatgtacctaattgaatttaaaaaaaaagaaaatggttaagaaaagactcgaaaaaaataaatgatttttaaacaaaaatttttgaaaaaagtctcgggtttttcggtctcggagtcaagtctcggtccgaaagagtgaaggttagggaccggcgaggggacgggatccagacacggggttttgcggggtcctagtccgcaatcccatattttttggaacctgcgcgatttgcgggatccgaattgtattgtttttgaaaatacaaaagacagaatgccaaactaaataaatttactataaaatcaattaaagataaaccaattttctagggttcggaccccgtgggcgggggggnncttttcacgggggcggnggatggcgggggtcagagtcgcgggggcggggagggggcagaataattcgcccccgcggngggggggggggggggtttgatttgaattaactccaaaaaatttacaaaaaataattttttatgaatgatgtgatggctccacattcctttagtcaatgtatcgcctcaattc

SEQ ID NO: 28299 - DNA, 1071 bp, Heterodera glycines
  unsure (1)..(1071): unsure at all n locations
tttttatatntagagtctatcccagaaaaatggctatctcttttttgataaattttatacacatacaaatgctctcgagcaggatagggaggccgttgcgcaatagaccttttatttttgagggattttaaatttatactctatcccagaaaaatgtctatctcttttttgagaattttatatacatcacaaaagctcttgagtatgatagggagggctgtgcacaatcgccattttatttcacagaggatttttatatttagaggttatcccagaaaaatggctatctctttttttgataaattttatacacatacaaatgctctcgagcatgatagggagggcggtgcgcaatagaccttttatttttgagggaatttttaaatttatactctatcccagaaaaatgtctatctctttttttgagaaattttatacctcacaaaagcgcttgcgtatgagacggagggctgtgcacaatcgccattttatttcacagaggatttttatatttagaggttatcccagaaaaatggctatctctttttttgataaattttatacacatacaaatgctctcgagcatgatagggagggcggtgcgcaatagaccttttatttttgagggaatttttaaatttatactctatcccagaaaaatggctatctctttttttgagaaattttatacctcacaaaagcgcttgcgtatgagacggagggctgtgcacaatcgccattttatttcacagaggatttttatatttagaggttatcccagaaaaatggctatctctttttttgataaattttatacacatacaaatgctctcgagcatgatagggagggcggtgcgcaatagaccttttatttttgagggaatttttaaatttatactctatcccagaaaaatggctatctctttttttgataaattttatacacatacaaatgctctcgagcatgatagggagggcggtgcgcaatagaccttttatttttgagggaatttttaaatttatactctatcccagaaaaataggtatctctttttttgagaaattttatac

SEQ ID NO: 28300 - DNA, 888 bp, Heterodera glycines
cattggctcttacccatgagggtaaccttggtaccctcctagtaaactcgaaaattgtattgatggtatactcacctgcatcttgccaatgagggtattattggtacaggaagcctatcaattctttgtccctgtacagctcatgtagtgaacggtagcgctgatctgagcccggattcgtgatcagcgaccccaaaaaccccttaaaacctattttcattaaaaaatgaatacatttataggcatttgaaaatgtatgtgaaatctgccccttaaacttaaagagtaccaaaaattattatattactttttgtgtaatttaaaatacaaaatatttttcaaatttaatttattcaaaaattcaaattgccaaaaatatattaaaaaatgcgcatttttttgaacttttaaacctttacacattttcagactcaccaaatgctcccctccccaccgcctccactcttttgccgatttgtttaccaaaaaaattatttggaggcaaaaaaaaaaattccctttgttcaccccaattaatcgcattttcattcttcatttaatttcccccggttttcgcctcataaatgaatttatttatctttcgctcttctgctgttggtgctgtgttcttttcattcataacaaattgttcccattattattaaataaaataaataaataaaaattgaaaaaataaataaataattaagggtttaattttaaattattatatttttctttgtaaacaaaaaaaaagaaaatttgtttgtgaattaaaagttcaaattagttattaacttatggttatttcattttagaaaaaaatttttttttttttcatttttaatttcatgtcactaaatgcacaattaattacctatccgaatt

SEQ ID NO: 28301 - DNA, 1297 bp, Heterodera glycines
aaaattttaagattctgaaagtgggaaaccggaaatatggcggaaaaaaagttttacgatttttttccaaaaatggggtgttaattttaaaatagagacacttaataaaaacgaacaaaatctcaacaactaccaaaaataaacagataaaacaaactaaataagaaagaataaatcttttttcacatttctgtttattttgcgaacagaaatatgtcttttaggcagagttatgttgaattttctaagttttcaggagaaattaagggccaaaaggcttaaatcgcctctaacatttgcccaaccgaatcaaactaacagcaatcagcactaagataacgtacagacatcctttaagcattttttattcattttatgccataaaaaggcattaaacacaaaatttttgcgggtgaaaaaatacgaaaatctgagtaaattcgaaaaaaaaattctagggggttgggaaaaattttccgtagaagatgattaagacgaacagaaagagcacaaaatggcctttgaatgaggtctctacgtcgcgtctccgcgaaggcgcgtcttgctgaaaatggatgtctcaaagatgaggaaaaatgccttgaattgggtctttttttggatagtcggtatttaacaaggcacccctcagcgaatacttggtatagagcaatcattcaaaggccattttgtatagaattttgtgctctttctgttcgtcatattcatcttctatggaaaatttttcccaatcccctagaatttttttttcgaatttactcagattttcgtattttttcacccgcaaaaattttgtgtttaatgcctttttatggcataaaatgaataaaaaatgcttaaaggatgtctgtacgttatattagtgctgattgctgttagtttgattcggttgggcaaatgttagaggcgatttaagccttttggcccttaatttctcctgaaaacttagaaaattcaacataacgctgcctaaaagacatatttctgttcgcaaaataaacagaaatgtgaaaaaagatttattctttcttatttagtttgttttatctgtttatttttggtagttgttgagattttgttcgtttttatcaagtgtctctattttaaattaacaccccatttttgaaaaaaaatcgtaaaacttttttccgtcatcatttcggtttctcactttcagaatcttaatattttcagaattgctacgtacagttaaaaattcagctcgatcggttcatgggaagtggtcaaactcccaaaaaacagggtgtctttattt

SEQ ID NO: 28302 - DNA, 1011 bp, Heterodera glycines
  unsure (1)..(1011): unsure at all n locations
gagccagggttgcttgactctgacnccaggcgttgaatgttgagctccaagtgggccatttttggtaagcagaactggcgatgtgggatgaaccaaacgtggagttaaggtgccaaagtgcccgctcattagaccccataaaaggtgttggttgatatagacagcaggacggtggccatggaagtcggaatccgctaaggagtgtgtaacaactcacctgccgaatcaactagccctgaaaatggatggcgctggagcgggccacctatactccaccgtcattggcttgtacacgtgcttgtcgcgtagtctggccatgacgtgtaggagggtcgtggtggttgcgttgaaggctttgggcgtgggcccggccggagcttccaccagtgcagatcttggtggtagtagcaaatattcaagtgagatccttgaagactgaagtggagaagggttccacgtgaacagcagttgaatgtgggtcagccgatcctaaggcaccggctaacgccgtaacacactacggatgacgacttttctgtgcttgcgcagttggtccatccggttgccgaaagggaagtgggttaacattcccacgccaggctagggaaatgacggttcgcaagagctgttttgcgcggtaacgcaaatgaactcgcagacgtcgtgtggagtccgagccagagttctcttttctggtttagggtgtgcgtgcctggaagtggctcagcctgagatagggatgttgcgcccgtaaagcaccgcggttcctgtggtgtctcgtgcgctccacacggcccttgaaaatgcgagggaagctatttgaatctcctgcctgatcgtaccgatatccgcagcaggtctccaaggtgaacagcctctagtcgatagaataatgtaggtaagggaagtcggcaaattagattcgtaacttcgggaaaagaattggctctaaaggtcgggtcagccgggctgttgcgtgaaacaggcggcttttgcccgtggctgcgtgct

SEQ ID NO: 28303 - DNA, 1453 bp, Heterodera glycines
ccgcggtttggtcgacccccggcgattctgcgctttgctccgccatcgcttcgtcttccaaattcgcaaaaaagtttttccgcaatttgggccctttcgttttcgatcttttccataaattcattttttgcctttagaatttttcccagcaattcatttttggcatgttctctgagattttgttgcctagtattaaacgaatttcgctcatcttcaaattttttgagtatttttgctttttcttcttcgggtagctttcctgattttaataaattattcattatgaatagggctgggatttttatgtttaccttttttgtagaaaaaatttaaaaaaacacacaaagaatttggcagataaaaaacatatttcggaattttagcagatattttttttaagaaaaatgcattaaaatataaaaaactataataaaatttggtgcactaaaaattttcgaattttaatgaggttgaaaattttgcataatttttttcattggcttaacttagcaattccgaaattattatagagaattttttaacaaataaaatgcgcgtaaatattttgcataattcaataaggaaaacaaaagttatgacaaatgcaaaagtgcccaattattacttttgcctcgccccgtgtttgtacgagaacactcgccagattcctggcgattattttcttcgttttcttaatttaaaaaaatttaaattttcatatttgtataatttaccattttcatcaccggggaaagggcgacagtcattaaatattaaaaaagaaatgaaaaatattagaaaatatttcattattcaataaattgtacaaaataattcgtttaatattatggaaaaaatgaatgaaaagaaaatatttaaacaaatattattattgtaaatattcgagcgcgtgcaaaaatcaattattattattttttgttgcagcaatgaaaaaatgccaacgtgtgtccctttgtcattggcacggatgtttgtttgaatagccacagaaaagacgtaataaaataaaaattatatttgtttttgaaatttttttgcttgtcccgttaaaatattacgctaactttgctgcttgatgtcaatgcagagacacatgcgacgagagaaagactgtatgacagagaaaaaaagagaaaattaagagaaagaccgtttggcagagaagaaaagaaaaaaatgaaattttatcagagattgttgcatttattcctcccaactgatgctgctgtctgctgtgcgatttgcgcccccttttgctgattttttaaattttggcttgtatgcacataaaaagggaatagaactacatggaaatccatattttttcctggcctgtgggaggcctgaaacgcacgaaaaacatgtttttaacttggtttgaagcttttaggatgggtttccatatccatattttccatattttttcatattt

SEQ ID NO: 28304 - DNA, 1428 bp, Heterodera glycines
  unsure (1)..(1428): unsure at all n locations
aaatttccgactttttatcaaaaatttctgaaattggaaatcggaattccgacgtccaaaattttttcggaagtcggaaatcggaattccgtgccatccctggtataatgtacctaaatgattagatttcgactgtatacattagaatcgatgtcaaagtagacagtgattgggttaattaattttttttaatcacccgaaacaaaactttgattttatatccggtaggtgagtaatgtcattgttcatctaatcatatcacaaaaattggcacatttttagggtctgacggtgccgataggcgcaagggaatttgaaagttccagtataatttttgacaaatttatgaaattgcctcctatttttggtcacatttaaaaaccagatttaaaatatatcaaattttatgaaaaattttcagatagttacagaaattactgctaataaattttctcagcaaaagaatggagccaatgccaccgtacacggtcatttgtccgggggtatattgttagtgaaatcatttatttgtagattttgacaagagaagaatttttgaaagagatgcagaaacttacgcaatcgacagcagaaaatttggggatttcggaagcattgacaaaactcatgttgaacatttataattgggacgagaagacattgacagcagagtaatatttcatttttattcttattttatttccaaatttaggcataaccgagcagcagataaggaggcattttttgaagaaaaaaaaattgccactgggaacccaaaggcgccggcggagggtgaaaagtgccaaacgtgtgacagtgaaaaattttgcaaaatgtcgccatgtgggtgtttcttttgtgtcggatgctggagtcgctatttttggaaagaggcgagtattgaaaattcacgttattaaattattacaaagtttttagataaatcttaaacagacagtccttttgacttgcattggctgttcccattttgctgatgaacaattcatcagtcaaacgtttgaagaatttaacaaaatcaatgatgtggaatacattggagaattgctgaattgaatgcgaatcaaaaaaaacttgtgctgagatttttggagttggctctgaaaaccattgtcaaagtatagttgtttaggcattatcaatgtattaaattaatctttttagcgtaatccgtttgtggaatcatgcccccaaagtacgtgctcgaaaattatcaaagtcaataaagccgggccctgcatagtcaagtgcacctgtnaacgagccttttgttttgcctgcactanagtaacgataatggngaataccccaatnacatttttttgattccaagtaccgcatgctccaatcaggtaaacggacataatgcttcttggtttcaataaaatcgattttagttgntcattactc

SEQ ID NO: 28305 - DNA, 584 bp, Heterodera glycines
  unsure (1)..(584): unsure at all n locations
gagaaagaaaaattggtagtcgacaaactaaaagaaaagctcttacaagatgcggttctgtattttccggatttcacggcagcaatgaataaccccgatcgatgcttcaccatactcactgacgccagtaaaattggaatatcggccgttttgtgccaggctgatgaaaacaaaagcattcggccaatttacttcgcgtcacgacaatgaagtaaacacgaaagtaattactgtccaactgagcttgaagctctcgcagttcgattcggtgcctggaaatttgcgcaatttataacaggaattccgacaaaaattgtaacggaccataaagcgctcccgccgatgtttcgtagtaagaaacaaacaggaaattctcgcgttgaccgttggttaatggagttaaacgctcgtttcgatctgacagttgtgtacagccctggtaaatcgaacatcgtggctgatcttttgtcgcgctccggtgcgttggtaaataaagcaaaagaagccattgagtccgataatgattttctctagaaagtttgttatagaaggcttagtaatagacgaaattggccnagacctgc

SEQ ID NO: 28306 - DNA, 1594 bp, Heterodera glycines
gaaaagggctaaaagtagcatttcttcgttaaagttttttgattaggtgaaggtttttaggcatttaaatcaggggtgcgatctgttctgatttatcagaaatgttctgatttggagggtccaaatctgataaataaaaatgttctgatttgtcagaaatgttctgattttgtggtcgcgacaattttgaaaaaatctccggcaaaaaaaaagcgtttttaaacgcaaaaaaatctgattttttcatcccgagtgcactgaaattttcgatttgctaatttcctcaccaaaatttttaaaaatgataatcggtggcgaaaaatataatttttaatacatttttgattaaataaattgtaaaaataactgatttgaagcaattttgcaaaatgttctgatttttgaccccaaaatctgattttttgagcctcgatgttctgatttttgaaaaattttcgatcgcacccctgatttaaatgcatattttgagggttttcgagaataaatgcatatttcgtctttttgggttttaatattatttttttttgtgaaattcgacgagaaattataatggatagggctccctttttaggcaaatgcctaaaattttgcgcacttgatacgcaaagataagcacgaaaaacgcgttttccgcttgatttgagttgtctacgacggggtgcggatatgtcctgatttatcagatttgtcctgacttggaggtagcgaccaaaatttgttctgatttcttaaataaactcataatttgaaatattatgacataatgttactattttatcaaggaaatataaggtttgcccaaaatttggttattttttggacaaaaatctgttaataaatcgcattaaaaataacaaaaaaaaatttcccggcgcgcctatccatccctaaaatttttttgaaaaatgcgccgcaaaaaaagcgtttttaaaagcaaaaaaaaaaagtccaaaaatctggtgtttttggtatggtattctgattttgcaaaatgtatgttctgattctgtgctgattatctcattacacaaatatcccttgctgtacacccagtctgatcactctttgtccgtcttttggcctgcactgatcagcccattgatcagtttcccatcctccattcccccgtaggctttgcgtgttgcgccttggtcatcctccgcgtacgtcgtccgcgcctgctgggccctgtttctgctgtacgaatgctacaagaccatgttcgtctacgtgcccatttcccacgtgttcggccccatgttggtgcgcattcggctgatgatcacccgcgacctggtcaacttcctgctgctgattctgctcgtattggtcggaaatgcccttgccatcaaagcggtgcttttccccgacctctccgccaaccgcgaaaccgtcgccacttccgtgcactggacattccaacagctgttcaccaccgacctcagcgttcttgcgcagtccgatgaatgtaagaggcaattgctgccccaaagtcggcccttttgccaaagtgtcggtggttatgccaaccccgaggtgcttgtggccaatttgctttttgaatttttaattt

SEQ ID NO: 28307 - DNA, 1337 bp, Heterodera glycines
  unsure (1)..(1337): unsure at all n locations
ttttgattttttgttgcttaaaattaatgaattttcgttttatcctttattataaattaaaataaatatatntaanaataatatttactnntagaagttaatggattcgcaattgctaccatcagaactttgtcaaaaaatgaagaatttttacaatataaccagtgaattggacagaaaattgttgcacattatgtggtgggatgaaattgactgtttgaaaatcaatgaaacagctgttgacccattttacccgtttttgaattccgcagaaaaacaaaaataaacaaatttaaatttcttatttaatttaaatttaaccgagacttgagaatttttaactgaaattaaataactggacaggatcttgaggcagatgcctttttttttgctaacttactgcggcctaatacgcaccaaaaaacgagtttttaacttggtttgaagcttctagctttaactttttggtgcctttttttgcgattttgatgccaaattccgggcaactaatttttgtgtcttttttgacgttcatgccgtttcgtgcattttttcgtaaaaaaatttttttggtgtattatttttaatttccaaaatgtcgatccttaggtgtgcgttttcgctttttctgcagtgatcattttcaaaaaatggctaaatcattgtcgaaaaacccaaaaatggcgaatagaaatgatatttttgtgctcctttcttcatatacgtaaatccatataatttaaaccctatttcataactttttttcaatttgctaaggaatagagaaccttaagggctatcgaatgatactaaaatgttttgaagcctaagttatgacaattttttggaagagaaacattacgagtcgaggcaggattaaaagaatttaatgaaaattcatttttactccagaaaaactctaagtgtattgaattgtcagtgcaaaaagaaaaaatgagaatattttgttaatttaatagaaaattttatcaaaagaattaatgtttgctgcctttttccaattttttgtgacttttttcatcttcgtgctattttaggtggctaattgaaaaatgttcgtgcctaaaagtccggtccctataaataaatcaccaatagaagcagtggaaaacttgaaatcgtcctactaaaaagacgtctaaacatagtcccaatcgttttcttatgacatgaaacatcaaattaaattggaaaaacaaaaaaaaaagtaaaaaatgattttaaaaaaataaaaaactcaaaaaaatagaaataaagattaataaaaaaaataattaaaggaaaaaatcgttaaaaaaaaaatcaaatggcttctg

SEQ ID NO: 28308 - DNA, 932 bp, Heterodera glycines
ttgctgcttaattcgttgccaaatgacaataatgccgcttccatcactttccctgcccttaaagtgttgtacaaatgcttcgacacatttgactcaaaacagtcagtgtttttgcctttgagtgttttttacgaaatttttttcccttttcagagaccccagggcaaatggctgtgattccagcgttggcattctcgagttaccgactgactcgtgtcttcgtcttaccgaaatgctgctgtccagctctttggcccttccgccgcctcttagagcccttgggcaattctacgtaattatataactaacaaatatttaattgtatacaacaacaatttattgtacatatgtccgtttgagtatttgttatcggttaaggtcgggttcattcgtatgaaagatagagttgattaatgggctgtgattattgatgttcgactgtttccgtttgcgatttgatttttttgccaatgatgtacattccgcatttgttgcaattgaacccaaaaaatgtttctggcctttatccccgcaggcaatcgcattttgtataatctgttccatttttaatcacataatttaacttcgttacgttatcggttttaaaaaacattttatagaataaacatacttttgaatttcttacgtcagagaaatccattacttaacacaccgtccgaaaaaacgagatgtgtaccaataaatagagagtgccagagaaaaacattatcttttttctctaattttttgtctccttttggcgtactatctgttagatccacaggaaattttgcatatagttagagaaaaaaattctgcatcgattaatgctgaatttatttttattaagaaaaacaaaattttaaggcctcataacttttctctggtacaccaaatcgcttagcatttgcttagaaaagcttctcattatc

SEQ ID NO: 28309 - DNA, 1518 bp, Heterodera glycines
  unsure (1)..(1518): unsure at all n locations
cccccccccccccccccgcccaaaaaacgtgactggacaatttgacagtaaaatacacaaacagatatgaaaccaccgtcgcctatggcacaatcggttccctacggcgctgtccgattattgcgggcccttgttagttaggatatgttttcaaaaattgccctgatcagtctgtacatcgagaaatcctccaggacccaaccctcttccatgctctttcttccttaccattcgattggtgaagtgatcacccccgacctgagatttcaacaccgccgttgtttttcaaaaatggcgaaaatattcttttttcctaccttggtcattgttgatcgatgcgaagtatccattgcgaaaaacgccgacacgagaagcgctcgtgccatgaccgatgccaattgcatttgtatttttcggcatttttttatgcgattggaagtttggtaaatcttaaatctagtttaattttttaccgttggttgataaaagttaatgatttgtttgtttatttttgtcttgacttattcggtgagcatttttaatctttagaatgactatgatattgaaatagaagaagaaacaatagaaattataaatatagacgacgatgaagtatcagactattcacagatatacaatctctagccaaatgaataattcaactcttagaaaaatgaaacaacgaaaaaaaaagaatattgatcaaaaagagagcgaaaagcaaaaatcgcgaaagaatggctttaaatcgttaaatttttgtagaagaaagtcaggtagaaaagcaaaaaaaccgtgaaagaatggcttcaaaacgtaaaaaagaattaaatggaaaaattgaatcttatatttgtgcagatagtttaagtgttacaaaacacaacatagcttttccgattatcattagggccgggaattaaagtcactaaaaatccataaaaatcgccaaaaagtcacaaaaaagtcataaaaaaggcaaaaaaagtccaaaaaagcacgtaaaaaatgcaaaaatgtcctgaaaaattaggcgaaagttaacaaaatcccatttttaataatttatagaataacattttgatcgtatttttaggcacttaattttataaataggtacctaaatgggcataaaaaagagattcttccaacaattaagaaaaaattcatccaggtttcattgcctttttatcgatcgaaattttatttttcggaatttctttgtatttttcggcattttcttcgctaaaattcaaattttgcttcagtaagcctanaaaaatcacgaaaaaagtcgcaaaaactcaaaaaagtcatanaaatcccaaaaaatgcgaacgctgtgaaagtgacagtgtttttccaatgagtaaacaatctctggttgtaattatgcattttttcagcgtcaaagtcccgtctcagtttacgaaatggtggtctgataaatattggcgactatagggctcagccataaatgttataattaatgctgaaaagatgggaagaaaaaaataa

SEQ ID NO: 28310 - DNA, 965 bp, Heterodera glycines
  unsure (1)..(965): unsure at all n locations
ggtcgaataaaccattttttaggatttattacacatttttggcaattaaaccataaggaaaatgcaatgtgtaaaaatttgaaaatattattaataaaaaacaaattaaacattagacaaaccataattaactcttaatgtattggctttaaaatgaggctgtaatctcgaaattaaaaaaaaattctcaattttaaatgaatttttcaaaagaattttggacaatatttttcaccttcatagtaaaacttggcaagagacactattctgaatggagctgcaacccggcatcaaatgccgaacaacacatcgacacttgccgtgccataacccccgagcagagccgagacgagaaagttatgaaatgttattgcaacactttccattattcggccggcgaaatgggaaacgaacatgaaaccttcgaggagcattatgagcggattttaaaatctctgaaaaaggggccataatttttttgcagtgcatttattgccttggggattataatttgtgaacccaaagatgtgcaaaatgatagacaaaacaaaaaatctaaaaaaactaattttggtttaaaatttcaaaaattctcatttaaaaaaagttgaaaaacacaaaattcaaaaaaaatttggtgacagtttttccaaaaccccaatgatttttttaaatttcacattgttaaaggattttagtggagctaataataagatagaccaagcatttaaaatgttttaaattaattttataacgaataatataatgaaggtctgtctacctaatcgatctcggatttactaccaaaagcacatttatgggtgaattattctttgtttatatgcttttcagtttaattattttatgtaatattcccattaattatcaaattttcgcgtgcngtccatcaccattttgtggcgctaaaaacaaagttaagcaaaaaaacaaacaaaaaactgcta

SEQ ID NO: 28311 - DNA, 806 bp, Heterodera glycines
tgttagaattgaccttatagattcaaaaaataaacctctaaaatggaaattttctcaaaaataaattccttaaattttatttattttttgctttttctcagtaactttgatttggaaaagcgatccggacggatccagagtcgggatcccgaccaaatcagagttaaaataaaaatttattggactattcttaccagtgcctttttcccggttcccgagagccctgccggaggtctgtatcgtttctacgccgactttcggcgccagcccgaattttttggttataacttttttattgttgaccaatcctacaatcttgataacattcgaaatacatgtttagaagctgtttttaagctattattttgcgattagagacaattaccaaaaaagttataacatgaaattatcaaaagttgaaattttgaagttttttctcaataactttttatttgctagaaatgctttttgtaaagctaaaagaaaaatacccaaaatatgtaccaatatgtaaataaaattttaaaataattatttttttattcttcggaaagggtgaaataagcacaaaattacataaaaaatgacctatatgcttaaaacatatttaagtttttgaaaaataattttcggttaattttttttttcaaaagaaatttttataaattttcaaaaatcctaaaatatgtaaaaaatgtatgaaaaagtccgaaaagtccaaaatatgtaccaaatatgtataaaatctcgaattatgtaaaatatgtataaaaccccgatatatgtaaataaaagtcccaactttt

SEQ ID NO: 28312 - DNA, 1211 bp, Heterodera glycines
  unsure (1)..(1211): unsure at all n locations
agtatccctgcaaagtttgctgcgcttctgatcagttccggaaaaaaagtttaagcctaaactttttgccctgtttaaaaagggaattaaaaatttttaaaaattttattcatctccctttttgatagaaaaagcatcagagtgcctaaactagcatgtaaataaaatttggtgcgtttcagagcagtttctgtaaaaatacttatgaattaattttgtaaaaaaataaataaacagttaaaaactcagaatttctaaaaaaatttaaaatcaattacaattgtcattttttcaggttaagttagtcctgtaccggggagtatgcttataaaatttggtacgattttattgcttattgaaagagctagaaccgaagaaaattttttttatttaagcctaaactttttggcatgtttaaaaagcaaattaaaaattttattcatctccctttttgatagtaaaagcatcagagtgcctaaactagcatgtaaataaaatttgatgcgtttcagagcattttctgaaaaaatatttatgaattaattttgcaaaaaataataaacagttaaaaactcagaatttctaaaaaaaattaaaaccaattacaattgtcattttttcaggttagttagtcctgtaccggggagtatgcctataaaatttggtacgattttattgcttattgaaagagctagagccgaagaaaatttttttaatttaagcctaaactttttggcatgtttaaaaagcaattaaaaattttattcatctccctttttgatagaaaaagcatcagagtgcctaaactagcatgtaaataaaatttggtgcgtttcagagctgtttctgtaaaaatatttatgaattaattttgcaaaaaataataaacagttaaaaactcagaatttctaaaaaaatttaaaaccaattacaattgttattttttcaggttagttagtcctgtaccggggagtatgcctataaaatttggtacgattttattgcttattgaaagagctagagccgaagaaaatttttttaatttaagcctaaactttttggcatgtttaaaaagcaattaaaaattttattcatctccctttttgatagaaaaagcatcagagtgcctanactagcatgtaaataaaatttggtgcgnttcagagcagtttctgtaaaaatacttatgaattaattttgntaaaaaataa

SEQ ID NO: 28313 - DNA, 917 bp, Heterodera glycines
cttcataaatgccaggccacagcgaggacactttctgatcaccgcctcgttcagtttcttctccctgacatgcaaagttccttctctactccgtttgcttatcaaatgcccacaattctcgctcctttttgtccttcttcgtcttcgtgcccaactcatcacagcttatcccgaaatggtcttcgtcccaacggcgttcacagagacgacaaaatttggcaccgcagttcaaacagtcgaacactttgttcacggttttgtccacttccatctcaacggcaaagttgcacaatttgcacctaaaaaaagaacaatttaataaaacaataaaaattcaaattagtcggagtgcacgcactccattccactccgccatagaattgtccaattttttgatagaaatttttttggccaccgtcattgcggagtaggtctccaagagaatttttttaattcttcaagacttcggccttcaagaattttttggtataacaattctaagaattttcttaatttttcaaattttttaattcttaggttttgatgaattttcgggaggggatggggtgaggataaagtgcaccctcttcactagcaactcgctctgtccgtaatcatccaagtttggtttggttacttacctctccaagttttgcaacgaggccatcccaatgttttcctcaacaatgcgttcgtccaattttctccgtacttcgcgcttcagcagaattctgatgtcagctaaaacagaaaacatgtgaaataaccaaatgttacacccacagtaaagaattgggtttttgcagcccggcatcatacacttcagtcccacgcccccatccgccagcggaatttcgtcggtcgccgcctgcgcctgcccgcggatacaaccgcgacagaacgcgtgagaaagcgac

SEQ ID NO: 28314 - DNA, 954 bp, Heterodera glycines
  unsure (1)..(954): unsure at all n locations
tatccagaaaaaanatttcggggagggcacctgaagagctttttttttgctcttcgaaggtgcaaacatttcagaaaatttggctattcttgcttgaaaaaatttttgatttttcatttcggggggcacgtgccccccccccctagatacggtcctgatgtacttatacccagggaagcaatatatgaatgtagaaaattaagggggcatcgcaaatgaaatggcccactacggggaaaaaaaggaggaagaagtgatcgcgaagcgtatatgactgccgcgtacacctatgtaagcaactgaattttaaaatttaatacgaaacaacattattaaatagattaaataagatttccttagataaaaaggcaagtaatacctaagacaacaacaaaaggttcgttcgaaactgtgccagcaattcttgatgcagaaactgagacgagaattacacaattaatcgaatgccgattacaaaaccttatatcaaaactctcgagtgagctgtttaaagaaaggacccaacaggtggaaatttatttttagtatgataattgtcaccgttattagatgcggacgcacattttggaaaaaagacgccagtcaaataatggagatgtaactttgagtgggggagatttgaaaaagtaatagttttacataaaaatgtaaataattattataatagcgttgtaaatatctatcattatatataaaattaaattctttttagtttccttgaagggatcgacattacgaaaggaaaggatgaggagaatgatatgtttcaagtaattaaatttaaactctaatatctaaaaataaataatagatattccacgacgactgcagctattgtggatttatgaaggagtctctaccattaaatttcctataaaaaacattaataatgttgcaaaaaacttaaaaattaccttaaatattattctatat

SEQ ID NO: 28315 - DNA, 785 bp, Heterodera glycines
cttctctccctcctccccctctctttcctctctcctatccctctgttctcgttatctccctttctctccatcttatttcctagtccttatcatctccctccccctcgtccctctccttctctctctgtctctctttcctctctctccccctcgtacctctccttctctctctgttctctttcctctatcctttcctctgtctgctctcttctctccctccccccccttctctttcctctctcctatccctctgttctcgttatctccctttctctctatcttatttcctagtccttatcatctctctccccctcgtccctctccttctctctctgttctctttcatctatcctttcctctgtctgctctcttctctccctcctccccctctctttcctctctcctatccctctgttctcgttatctccctttctctccatcttatttcctagtccttatcatctccctccccctcgtccctctccttctctctctgtctctctttcctctatcctctcctctgtctctccttctctccctcctccccctctctttcctctctcctatcctctgtctgctctcttctctccctcctccccctctctttcctctctcctatccctctgttctcgttatctccctttctctccatcttatttcctagtccttatcatctctctccccctcgtccctctccttctctctgttctctttcctctatcctttcctctgtctgctctcttctctccctcctccccctctctttcctctctcctatccctctg

SEQ ID NO: 28316 - DNA, 1284 bp, Heterodera glycines
gcgagggttgctgctgatgttggcgttgttgaagtgcctgctccctccgaagtgccgcaatctcttcggtctgctgcgcgtatttcgactccttcttcagctgtgtcatctccgccacttccccaattccgaacaaattaatgccgaattgcgttagctgtccttccgccaccgtttcgatttgcgttgtgccgtttccgtccgccccttcgccgtcctttctccgctccattggatcgttcgtcttgccaactttgagtccttttccgtttcccccgctctttggcggtgctctcttccggggagttccggcacatgtcaaaaggcgcgaaggggcggccgagtagggaagcacagccatcgccggagggggcagcacagcggccgagggcgacgcagcggcaccgatggcatccatttgagaagagagcgatccctaggctaccataattaatgggccacagcagcaaaatgcgaaccattgtcttttttgcggccgtcgcataagtgagaagctgcgagtccgtgtccggcattgtcccctgactcaattcgttctttcgcaaatgcatttctctgtttgggtgggaatggttgtgtgcttttctcttctctttcttttcccacttatggcatttcaacgaatttttccatttgaattgcatttggcacactgtgcatttgaacggcttcgcgtcgctgtgaattcgcttatggttccaaagagtggagcgtcgattgaaccgcgactgacagacctttagccggggaggggcgggagggggcgggggcattcaatgcaaattgaaattggccatgtttgaagattaccatcgccattggaactggtttctaatcctggtgtgcgagttctgatgctcttccaattccattttggaaccgaatcgcgagtcgcaagtcgggcacaggtacggcctttttcggtcttgcgattttgccgccgccgaagacgaagtcgaagcggcggaagttttggcagaagaggacgaataaccgagtagaacaaaaggtaggaatggacgaggcggacgaggcgagaggaagaggccgacccttcacgagaagtaagggcctcccccgcttgggactgaattggacggaccttcgccggccggggaagaggccgacccatcgccgaaggagtggaagaagtcctgctgggggaggaagagggagaagttagtcgaaggcggcgcaagtcgaatttggcacggaccagcgaaagtgttttgaaggggcgcttctgtgaaacaaaaaaaggta

SEQ ID NO: 28317 - DNA, 1302 bp, Heterodera glycines
  unsure (1)..(1302): unsure at all n locations
ttaaaaaatattccaacttttttctttcatgttaagcatcctaaaaacncaaaacttaatcaattggtcattttttttacaaattctgttaacaaatcgcattaaaaattacaaaatttttcccggcggcgtctatcggcaccgccggccctccttgtcccccaaagtcttggaaaaaacgtgccgcgtaaaaagcggtgttgaaagcaaaaaaaggtcattgatttacattaatttacatggccggagaccccttcgcaaaattggaaaattggctgctgaccccttgttttgcaataatctgaattttgaggtctatatctgaattttagtgttctatgtcctgaatttgaaaaaaaacttggtcaccctcaatatacatatacttctgaacaattcaaatgctaaaaaacaggcactcgcgcgaaaactgaataaaaattttgtatttggaaaattttgtccaaaaatttttatgttctaaaattaccggtttttaccggtaccggtaccggtaccggttgaaaaagttggtaccggtaccggtaccggtttttgcagtaccggtcagtaccggtaccggtttttttgcaattaccgattaccgagcaactctaatcaaaattgttaatatgagaatcttcttgaaaataaattaaaaaattctaataatttttttattttttcaattatttgaaagttaaaaaaaattaaaaacataatattatttcttttgcattggggacattattactggcctgataatgatgaaaatgataattgactttcgtcctccattttcccaaaatttgattggccccttttgataggccactcggcactttgttgaccatcaaattcggcaccattaatttgcgggccaggccgttttcgcgtgaggcggagtttttggactataactttttttctttgctaaccaaatccaacattcttggcatcattcgaaagcccttcagtagcactattagcctgcaaaattccaaaaaatttcgttcagtataaaaaaagttcgagccaaaaaaacttgaaaaatttggtttgttgactcttctgaccataacttttttgaaccttaacgaaatttttccaaattttgtaggctaatagaaaacacttccccacgcgaaaacgacgccgacccattaatttggcaccgctcctctattatttctccaattttcacttcatatggctcctgttttagcacaaaattctcggctttagctgctccgcgtccggatgttttctcatcataattttcaatgggttcggttttcattt

SEQ ID NO: 28318 - DNA, 1373 bp, Heterodera glycines
tttcataatttttgttgaaatcttggtcgtgctctgaagggcgagggagggggggggggggcgaaggcccaccacgaggccgcgaagaggccgagtgagtaccttcggtgcaggaaaattattaaattttaaaattttttaattgctttttaaatatgccaaaaaatgtaggcttaacttttttagtgaaaattcgatcactcatattttttgctaattgagcagaagcgtaccaaactttgcagggatactccccggtaaaggactaacttactctgaaatgagcgccgagctagctggctcaaaaaaatttttcgaaaatctgagtctttcgtttttatttatttgcaaaattaattcataaatattttttcagaaagggttctgaaacgcaccaaattttatttacatgttagtttaggcactctgatgctttttctatcaataatggaggtgaataaaattttaattgctttttaactttgggaaaaagtttaggcttaactttttagtgaaagtttgatcactcatatttttttagtctaatctactcaaaacggttcagaattcaataaaaataacattcacggtgcgaaaaatggggtttgacaagtttattggggaaaaaaagactttacaaaataatacccctgggagaagggagtgggaaacatgatttcaaaattttcaattttttctagtctaatctactcaaaacggttcagaattcaataaaaataacattcacggtgcgaaaaatggggtatgaaaagtttattggggaaaaaaagactttacaaaataatacccctgggagaagggagtgggaaacatgatttcaaaattttcaattttttctagtctaatctactcaaaacggctcagaattcaataaaaataacattcacggtgcgaaaaatggggtttgacaagtttattggggaaaaaagactttacaaaataatacccctgggagaagggagtgggaaacatgatttcaaaattttcaattttttctagtctaatctactcaaaacggttcagaattcaataaaaataacattcacggtgcgaaaaatggggtttgacaagtttattggggaaaaaaagactttacaaaataatacccctgggagaagggagtgggaaacatgatttcaaaattttcaattttttctagtctaatctactcaaaccggttcagaattcaataaaaataacattcacggtgcgaaaaatggggtttgacaagtttattggggaaaaaagactttacaaaataatacccctgggagaagggagtgggaaacatgatttcaaaattttcaattattgatagtctaatctactcaaaacggttcagaattcaataa

SEQ ID NO: 28319 - DNA, 1362 bp, Heterodera glycines
gcgcttaatttcaaaaaattttaataaaggaaatgcaatgaatttataattaaatttaaaattaatttttttaaaaattaaactcacgaattgcaagtgccggaaccgcttcctcctccgctgcacgtcgttgtgcactgcgcgtgaccattgtcaatgcggtggatgatgtaaagcagacggcatttcggctggcgacgacttgctgctgttgttgtcgatgaagtcttggccttctgtcgggcggcgactttgactgttgttgttgaagttgtggcatttggttcgacgacgacttcggcatttgatggtggcattggcaacggcagaccctcttcattttgtggtggcagttgtggcggcgcttaaattccaaaaaaaaaaatttaataaaggagatgtaatgaatttataattaaatttaaaatttatttaattttaaaatcaaactcacgatttgcaagtggccctcttctgaatatttttttttttgaaaatctcaggatttttgggcatatttaactcatccttaaatatgactgaaaattcgaataatcattgtgaaaatggttaaataaaacggactaagaatcagccccaaatatttcagaaaaatacaaccctaagaaccaacccaaattttctaaaaatacacctataataaatgaaaaatgttcccaaaaattcgtctccaaaatttatttgtttattttctctacaaattcttgattttaagaaattatgtgtgtcaatactaattttcaattttggtgttgatcagttctactgtaaattgtattattttcgtataatgattttctgcagaaaagttatcaaccccctaggaattttttcgaaaaactcccgatttcagtgtattttggggtattaagtcgacttggtgtgtgggcctgggttccatttggaccttcacatatattttctggacaataaaagccagggaaatcaaaacccagaaaggatgaagcaaacggagaaaagtttaaaaaattctaagaaaaagagagagagagagagtgagtgaaacagagaaggggaggggagagagaaaagagagatagaaaagagagaaaaagagagagagagaaagaaaaagatagagagagagaaagaatgggaggggagagagaaaagagagaaaaagagagagagagagagtgagtgaaacagagaaggggaggggagagagaaaagagagatagaaaagagagaaaaagagagagagaaaaagatatagagaaagagagagagagagaaaaaaagatatagagaaagagagagagagagagagagaatgagtgaaacagagaaggtgaggggagagagaaaagagagatagaa

SEQ ID NO: 28320 - DNA, 976 bp, Heterodera glycines
cttttttatggtgttagctacttttgagttatagggcctatttccgtaccaggtgttttcgacaatgattggtttcgacagtactttttaattaattttctacatgatttattgtacacatgaatttatatgaatatacaatttgcatatacaaaatttataattgaagtaactaataaaaataagacttgtatgatttttttgccaaaaatttatcgctttcactttttctatacaaatatctcctgctggaatgtagtcaaaaatacaactaatttcttagataagattctcgaatcgtgtgggaaaatctgtaactaatgccgggtttgagtgccaaaattcaaatctgcaggctcttaagcaagaattcgaaaatctcgaacccctctgcaatgtataagagccatgttcttatcattttaattgtcaaaatttaacgagactatgccatatagaacaaattttttaaaaataagctttactgtcgaaatcaatcactgtcgaaaccaacagatcaccactgtcgaaaactaacagcaccctattttctaggtttttatttttagaacctaaaaactagagtccggcgggatcgggactctcgcgggattttacgggagtcccgctcccgactcccgcttttttcggtgaacgggatttttacgggattcccgttcgggactcccgtcccggaagattttgaacacccgatcccgctcccggaaatttttacccaaaaacgggagtaaaaatgtactggtaagaattgatttttttggtaaaaataatgatttttcactgaaaatctgttaaatatatagccaaaatttcaaaaaaatttcccggcggcgcctaccggcaccgccggatccttaaaatccttaattttcttaaaaaacttgctcaattgcaaaaattggtcattttttaacagaaaccaacaaatgtattgtattaaaatttcaattttttt

SEQ ID NO: 28321 - DNA, 1333 bp, Heterodera glycines
ttatatttatttcatttttaattttaaaaaaatatcaagaatatgttttttaaattaattttatcatttggattacgctgtgaaaaatcattttttgtttgaattcgttttatatttttaaatatttttcaataatttctctttttggggcccaaacgtgccgggtcccaactgaggtgtaccggaaaaagaaccggtctaccgaagtcgctcaggttgggccggcatggttgggcaacagcatgtttttccactataactttctttaatttttttctttgtcagtccaaatccaacattgttggtatctttcgaaagctcttcacatgctctttagccttacaaaaagctaaatcaagcctggaaaaatttattaagaaaaaacttgaaaaatttcgactttttttgcaattttcatgtatgggtcttgtgggggatggggtgtcccgtgtggctccctgaaaatacgacaagtaaatacgacactataaaatgcgacaccggtaaatacgacactataaaatgcgacaccggtaaatacgacactataaaatgcgacaccggtaaatacgacactataaaatgcgacaccggtaaatacgacactagaaaattgacgccggcggaaaatccgacaccgaaagaactgggttttccttgacctggattttttgcccagataacctggtcctggtcaaatatgaaattcagacccaggtatgtagaccctgaatttgttgcaacaatttttctttttataaaaatattttccagcaattaatttttgttcattttttattttatcagtttgccccactccaattccaaatttcgctctaattttgtgcccacattttttgctacgtatcggtgtcatgaacactcttatcattccacccttaaacatatcaaccattaaaatttggtgtcccccaaatttttccgcgacaaacgaaaaaatttcctcgcttttttttgttggggacatagaaaagcttgatgaatgaatgattgaaaacggccgccacgccaagggataaaaagacgatttcatagtatttttgctgaaaattttcgattccttgttgatttacccccctcaagacctatctcacccaaattttccaaaaaatttcgctaaatttttccaaaaatccacaaaatgagcaattttttgatgaaaatctgctaaaaataagactaaaattctctcacggctacgcctagctacagcaccattggaccccaaaatccttaattttctttaaaaaaattagttatcaaaaatcttaaagcggccattttgagctctaagacaaaattaatcttcaaa

SEQ ID NO: 28322 - DNA, 1002 bp, Heterodera glycines
  unsure (1)..(1002): unsure at all n locations
ttgaaagaaattttttattagatcaaaatcggagataatgggcgggcggtggaggggggagatgggcagaaggaaagggtgggggcaaaaataatggaattggaaacgggggaccaacgaattgattaaaaatccaatataaataaataggaattggaattaaatttgcaaaaatataattgtatttccttacctgccacaaatgtgacaggtggaagaattggaaaaaaattttaaatttgcaaaagaaaaattgaaatttcctccacttgtcacattggtgacaggtggatgattgatgaccttccgcggcgctgcgcggcgcggggtgaaaaaacacccgcacggatttgggtaaattaaaatcgacaaggcggcagagttcaaagaatatcccataggctcaggatgtgagcgggcggcaacttcaaagtggtccaataggtttcgattctgtgcggcaacttcacagggagtacaataggtttggtttggaacacacccccctcccctactgggttttgatggggcggcaacttcaaagggctgcgcccctcccataggctttggttcttggcggcagcttcagatgtagtccaataggcacgggtttgtgagcgggcggcaccttcaaaagaaaacacccctcccgtaggtttgggtttgtgcggtaaacacccgctcggaacccgctcgcttttgacgctatatactactcttgtcttataaattacaaatattttgaaacgcgaagaatggaaatgcgtaaaagttttcaaattgggcatgaactctgtaaaaatgtgacggcattcaaaagagaattggtttgggttggtattcaaaacaaatattttaaatcactgcatacagtgccggaaaaaagtttaaaattttttaatttttgtattttacttgngacaatatagaaaatggtttgttttttccgagcgcattttgatggtgcgcatacgttgatagcaaaaagtgaaagggaattaa

SEQ ID NO: 28323 - DNA, 973 bp, Heterodera glycines
tttttataattaaaaattatataagattacaaattaatttatatttataaaacgatttaattaattttgtaagtattgaagaacaaataaaaatttaattcaattatatttatttcgagcttgaatttcgcaatttcacaatgccaaaaataataacagaattcgtagcaaaaaaggacaatttaatttaaactatttcgtaaaatgatgtcaaattagaaaatttgaagcaatattttcaaacaaatccaaaagtgagtgccgaaataattgccacggaattgagaattaaaagtgcaactctacatagatggaaaaaggaaagttcatccatttgatcagtgatttcgaaaatggaaaatgcattaaatctattcaagtgatttgatatataacacccgcactggcctttcttggaggagttaagagtttcaaatcttctacaaagaataagtgctaaagaaagcaataaatgttcttctaaccattctttttaaacaaaacatttaattgttgctgatccaaacagcttgaagctgtgagtgacgactctctgttggaaggttgacttttgttcggaaatgaacggctggaaatgtgcaagtcggagccagaaagcgtgcttttgttgccgccaacaaaactccgttggagacattggtcggtcaacgaatgagaagccgaacaaactaaaagcagaaaactaaagagccattattattcaattgtgaatgagcttaaaaataagtgcgcacatttgatttacatttgaataagatttaaattaaagttcggtaaaaaaattaaaaggaaatgtgtaagcacttggcagattttgcttatttttcaaatttttatgactttaataactattacaaaataattggttttatgtttgttttttaatttttgcattttcagcgaatgtttttttcttctaataaactataattaatcaaacacatggtaaaaa

SEQ ID NO: 28324 - DNA, 855 bp, Heterodera glycines
atgtcttttgatgaatttgtagctttagcttctcgcgcagaagcaacacaaatggctgcaaaaaggcaaagttcggaacaccgaccaaaccaggaacgaaaatatatgcacccgaacaaccgtgaagttgaaacaagttccaaaaatcagttaagaccctatcaagttgtttgttacaattgtaacgaacctggtcatgtttcacggaattgcaataagacaatgtcccgccaaaaccgaaacgaattcccatcgtcttttcctcagcagaatcaacagcaaaccccaaatactgttgccactggggcaaaccgagttttcctaaactcgaaaaacggaataccctcagcaggtcgctcgcagaattttctaaagcaaaattgcattagaatggaggaagaagtgaaaaccgatgcaactgttgccggtgttaagctggaaagagaagtggttgaatttctaagaaacgaattggataaggcaaaaacgaagtcagacaaaacaggagaaagtccagtaatcggaaaaatggtcacggttgagctcaaagtttttgaaaccccggccaccgcaatgcttgacggtggagcacaaatctctttaatgggcggaaaatttttctacgaactgataacaaacggaaaattggaacttcataaaaacggatttaatcgcgtttcagctcgaatttctgatgtgaatgggaaagaattagaatgtttcggagtcatttcactccctgtcgaccgggatggttgtaaaacaactaatgtttgttttcacattacaagtgcccccttcggattcgacttacttatcggtacaaatgccttgcgttctttgggtttctgtctt

SEQ ID NO: 28325 - DNA, 1153 bp, Heterodera glycines
  unsure (1)..(1153): unsure at all n locations
tgttgcccttaatcgacgcaaaatatttaaatcaaatccaaaaccacacttaaaaaaggggggggggacgaggacgacagaaatttttgcaagggaatcggcggcaaaaattcaaaggggtccagtaacaaatttggcgcaaaaaaattaataatttggggaatgccaatgaatttccacctctccacgcacttccgtcccctccgcgtccctttgcttttgctggcgctgttccattggcatttcttcgtctgatgaggtcgccggtgagtcggaagaggcgtcgtccatcgccgccaccgctacttccgcgtgttgttgttgtgctgcttcttcctcctcgccctcctccgaatcgtcggacacattgccaagcattttgcccacgtggtcaccatggctttcgacatgctgaagcttgggaatttaaactaatgcacaaacaaatgaaaaactgggcgaattaacccccgttttttgaaaccccgtctttgcaaccaaagcacaaacattgggttgtccccctttgttccctgcggagtgtgaagactctgcagaagatgaggacgatgacatggaagacggtgactgggacataaccggtgaatatttaattggaaaatatcagaaaaaaaattaaaacaacagatttcccggaacgggagggatccagcgcggggattttgcgagattatcccgctggatttcgtcccgcaaaaattatgagttccattcccgcagcgggaccgcaaattcgaactttgcgggctctagggacatcgattccaactttaacgccagcatataaagtttaagaaaactcaaaacgaatcgccagaaattttgaaaaaagagggaatttgaaaattctattttcactgtgtattaattagtgcgagaaagatcaaactgactgattgcaacttgagcaatctttgcctttttctcaccaacaattgtaacatttgctcggaaatttacttttctttttagataaactttgttttatgaaaataagccggtagactttttttgtaggccgggaatacctaaaaaagttgatttccgaacctgagtccgtggaaaacaaacaagaaccctgtttccgatcccgtaccactaanncacatagatatgaattcagcagaaatgg

SEQ ID NO: 28326 - DNA, 900 bp, Heterodera glycines
ttttcgagaaccaagacggttgagaaaagtgtttgaattcggcagaaccaagacggttaaaccgaagattttgtgtgaaaaatttgagaaccaagaccgttgaaaacaaatggttattacacgctcgccacacttaactcgccagaggacccgacaacagggaataattttgaacaacgacgggaatcaaattcgtgcaccggataacgagcaacaaaatttagagatcatgattccggtttcagagcaaaatgaaatgagaaacctgaatgagccaattaaccccgtaaatgatctttcaggagacggcagcattttgagtgaaacacagctgagacaccgacctttggaagtggacccgcacgaatttggcgaatttgaaccggcagcaaacgacgaaaggatggccgaacacttagcgttggtggcgccaatggtcaatgcaggttcggggcgtctcgaaaattttggaagaaatgtgggggaaataaatgacggcgaaataaggaatttgccaccaattggctacctttttgaaagaaatggagattttgaggatagttaagaaaataaggatctttaaggtccggaggtgccgatattcgccttttccgaaaattttcgactttttatcataaaattttggaaatcgggattcaggcgtcccaaattttttgtggaatcggaatttcaatctcaaatgtcggaagtcggaattccggtgtcccaaatgtcagaaaccggaattcaggcgtcccaattttttcggaaattataattccaatctcaaatgtagaaatcggaattccggcgtcccaaattttttcgtaaatatccctcctcctcatatagatacctaatttattttcgcatggactccgaattaaaatgcaatcacaa

SEQ ID NO: 28327 - DNA, 1025 bp, Heterodera glycines
cttgttctgctcgtccatatattcagaaggtaatttgttgatcaccttttgggagagggtttttcttacaaaagccgtcttgttcaaaaagcggttttttcgaataattttccaatgtgtcggaaagattttcagaatatattccagttataaaatccctaaatcagctttctcttgaaaaatactctcgttttacacacccttttttcatttttattgggctgcgaccggacaggcgaaccggtccggttattttagaacaccttctggttctaccggcttggccgggtccgtttcggtatggatgggtcaaaaagaaggcaggatatccggcactggaccctaatttttaattttcgttttcattccatagccatcgtctcctctttttcaggtactccgggcgtcttgtggccgcggtgttgcagcgactgttacacgcgcgcgccgcgcacatttacgggctcggctggttcgcgttgcgccatggcgagctgttgctggccaacggactgcacttggaggtgcgcgagttgcgcgtccattcgctgttcaattggtggtggacaacgacggcaccgacggtggacagcgcggccaacgacggcggtggtcaacgcatggcactgaacgtgcgtgtgtccgtcggcacaattcgtgttggcaaacaggtgtgtgaattgcgttttgtggcacggttttgaagacaaaacgggcgcattccatttactgtaaaatttaccacagatcatgagttgcttttccattaaaatttcatgtttttaatccatacccaaaaatcttgttattccttttttttgttttgttttttatttagaagaaaaaagatattgaactgacataattttcataaacaaaatgttggaaaaatgtcaattttttagttgggttacgagaaatagagagttgtttatttcgtaatttttttttaattttttagttggcggacgaagaaggcagcagaaatgctacgagtagcatttgtgatggtcagaaatgacctg

SEQ ID NO: 28328 - DNA, 1434 bp, Heterodera glycines
ttcggttttttaaccgaaacccgaccgaccgaccctcttgtccggtctctagtttttagcaaagaaaatatcgaacttaaagttcgatgggtgaaaaggcaattgaaatccggaagaaatctttcgtaattattgagacggacccgggaattgaaacaatcgcacaattttattagattctttcaggcaaaaagtttgctttaaaatactccaattttatgtcttttttatgtcttggaatcaaaatcattgtttttgtaatgctattccataaatcattaaatattggctaatttttcataacttttgaaggtttaaaaaaatgtacattctctgaaaatatattgttgttttataatgatgaaataaaataatgtaattgccaccaaagcggtaaatattcttttcttcattgccgtcgacatggtgatgatcagaatgctaatatcataagttcaaaaaaatctatttctttcaaaatcagataaaaacgctttaaaataaagcttatttaatttttatagatgtttaatttggcacttcaagctagcaaattcgattatcataagatttaatcaaaggaaaccgcgtatttttttgattaatttaataaattgcacttttgttttctaatgggtttaaatgagtgttatttttcggaaaaacagaggacaagcagcacatcaaaaaaaatagatttatgttttgtgacctctttaatttatgttttggtacactttcacttctcattattctcattaattttttttccaaaacaatttgcttcacattagtgatctcctcggactttaaaaataaatattgtgtggctttgtcttcgtgtgtttggtctccaccccccaattcaaattgaaggaaaacgattttatttcctatttggcgctcctgaggaacagcaggtaaaacggggaaaggcgagatcggaattaggtagttttgtttgaagtccgaaccggacaacaaaatcaacggaattgaattgaccctgaaccagggcgaatttcaaaaatgttggatgaaaagaagttggagtgaagttgaataaaagaagttggagttgaatttgaagaaaagaagaaagtggagttgaaaagtcctgagccaggacaaagggcaacaaaacgattcgagtcgaacgttttcaaattgcaacaaattcgagccgaactttcgcattcgccgtactattcgccgtcctaatcgcacgccatcaaacgaaaaagtggaaaagtgtcgacagcgggaacttttgttttgtttttgctatacctgagccaggtgcgaaaatgataattcgctctccgccattgacacgacaaagagcgttgaatttgcgaacattcgcacaaaacgaagcgattgaagagcagcagcgacgggttgaaagagtttatggtgaaaatgaaccagtgg

SEQ ID NO: 28329 - DNA, 1054 bp, Heterodera glycines
ctttgcctgtacacctacaaggtgaacatatttgttattttgatgagaatatggaagaagaagagattcgtcaaagaatagcgaattgttctgagttaatggcatattttgaattgaataagacaaatgttttggcaaagactttgttttatcatcagatacctgaaaagttttgttttaagaaaggaaaatggacagagagaaagacatattttaacacaattggtcgaatggtgaaggtatcaccggctgagccggaacgataccacctgaggctgttgctgttgaatgtgaagggagcatgctcctatgatgatttgaaaacagttattgatattaatggtaatgcaaaactttgtgaaactttttcagccgcatgtttagaaagaggtttgattagaaatgatgaagagtggaaaagagcattagaagaagcagagagttttgaaatgccatgtaaattgagagagttctttgcattgattttagtccattgcaatccggccaaaccggaagagctttggaatatgtttaaagactcattgtctgaagatttttgcaggagttttagaaaagaattggcttatgctaaagcatataaagagattgcacttagcattatgaaggctggaaagacgctgccgattttccaaccatggaacataaatgttgatgacgaagttgaacaactgtttgacctagccgaagaattggatttgggacaaagaaattatgctttgatgtatgatgaacagaggaatgtttgtgatgccattttgcatagaatatgtaatcctgtaaatgaacccgccttctactttcttagtggaccgggtggaacaggaaagacacatgtgaacaagacaattgtacatatgctgagaggtcaaaagaagaaagtttgtacaatggcttttactggcatcggatcaactttgctgcctgctgggagaacattgcacaatagatttggactgactttggatatgagtaattcgagtattagtccgagatcaaaggcttggcaagagttgaaagacacagatttgtttat

SEQ ID NO: 28330 - DNA, 1406 bp, Heterodera glycines
  unsure (1)..(1406): unsure at all n locations
tttggccatttcagtcacgggcccattactcggcccaaagtgctttccgaaaaaaatctttcggattcgttcgttacagaccgagaggagtcacatgatatatcatttgttaaatttgttgaggtaaaagtattcttgaattttaccttttgggtttttatacatatttctggatttttttaaaatatttatgtatatattttgaccactttttatacatatttttggcatccttattaattgcaaaataggtgagagaaatgataaaaatgttttttatgcattatatgaatcattgtttacaaatcatcaaaaattggcaattggagggccaaaatgattttggaaattcgattgtacgaagaatggacgcaaaactttttctataaagaagaaaatcaaaataaaagcaaaaaaacaggtgagtatttattatttattaataaaaattaaaataaattaattttttaatgctttttaaggaaatgttagcgaagaaaaacattttgtaaaggataatttaagactaaaattttttcataatttgggagattattggatattttatgcaagcaatttttggaaaagagaaaaaattgtacgcaaagtaacgcatcaaatggccaaggatagtaaaaacaaagttgccaaaatgaaagaaatgataaccgaattaaaggaaggaaaagatttcttcttatttgtgagctaattaataaaaattaattgaaatagaatttaaattattgtatattattaggaggtttttttaatttttagaaaaaattatttttttcaaaaaattaaaaaaaaatttgtttagaattcataatggtaaaataatgtttgttttcactaatatttttatcattgataccaaaatatggtttttcgcattggatattcttttttttaattttcaagtgccaacttggctaaatcaatcactcttttttacagtcagttgatcggactgatgatcagccgatgtttttgtgggaggatgggccctccgatgtttctctgttccgcgcactgaaaatttgcgtaagcgaagtggcggatgagtacgaccaaaaatttgtcgacataaaattggacgcacttttccaactcgaactgacgcaattttccaattcattctgtgcatggacaaacatttgaaggataaaagaaaaaaagatggtgacgaaatggtggccaaattgcacttggacaaaatggccattttattggagggagaaaatggggacgaatttggcgcatttctggtcaaaaacagtgagtgaataatccatccaatggngaaacccaaacttatttaatattttatatccgcctttcaatatgtacaggaaagaaagagcaaaaaaacccattttctttgaagggagccgaacttgggt

SEQ ID NO: 28331 - DNA, 893 bp, Heterodera glycines
  unsure (1)..(893): unsure at all n locations
aattagagattgggacaannagcgtattganccggtaaataccgtttgaaaatccaaaaaacgcagataaattaggcttgtagggaccgggattttgccgagactcgtggttcaggtccacggtttttttggacaaaataccgggaccgggagtcccggaaaacgtgaatctcgggaccaagtccctgtccattttctaagtaatggcaattttaaaatccgggctctaatagaaatttcgaccatgctaaacaactaatattggagaatttgtgtcacagaggaaaacaaatttaaaatgttttttcatttttttaatgtaaaaatgcgctgattaccaacctgacaatagctcaaaattcttatgaaaaaacatactgagttttttcttgaaaaatttctaagttagtaaattttttaaaaaattcacggggggaacgatgcgggagggggggggggacaagctgctcccgagctacggacccgaattcgaacaaaaagtcgaaaatttcggttttgtgtacacattccaaaattttaaaaaatatgtacaaatgacgcacggagtttttgatggaacaaaaggaataatttgccataaaatggcaaaaaaaccctctgttttgtcttggaaaaattctttcttttgtcctgtcaaaaaagtgtgcatcctctgacatattttttaacattttgggatgtgtacccaaaaccgaaaagtaccttaattttaaaataaaaatgccaaaagatcaatgtgcttgatgaaaaacttacaaattctgacaatcagctcaaattctttaaatcaatgcatttttacaccaataaattggaaaaaaatttatttatttttccgccggagggcaattcagcaatattattattacctt

SEQ ID NO: 28332 - DNA, 1084 bp, Heterodera glycines
tgagcaatgacggaaaattgcttaaaaaagaaaccaaccataatcatcaattgttagctcccgttggcaaaccgaagggtacattggggcaatggatgttgggctaccgtatcagttattaaaatttttgtttttcaaaaaggatactaaaactgggataaccccattcagagacaagtcaaaaaaaataataataggcttggactaccatactaattagaatttttagaatgtgtctgttaaatgcaaaactgttgtgaaaaattgttataactccattcagagaagagatagaaaaaaaataaaaataggtttagagagcccatgaacagctgaatcggatgcaagtaccgccgttgctgtacgcctaacagttggtgagcaatgacggaaaattgcttaaaaaagaaaccaaacaaactcatcaattgttagctcccgttgacaaaccgaagggtacattggggcaatggatgttgggctaccgtatcagttattaaaattgttgtttttcaaaaaggatactaaaactgggataacccattcagacactagtcaaaaaaaataataataggcttggactaccatactaattagaatttttagaatgtgtctgttaaatgcaaaactgttgtgaaaaattgttataactccattcagagaagagatagaaaaaaaaaaaaataggtttagagagcccgtgaacagctgcatcggatgcaagtgccgccgttgctgtacgcctaacagttggtgagcaatgacggaaaattgcttaaaaaagaaaccaaacaaactcatcaattgttagctcccgttggcaaaccgaagggtacattggggcaatggatgttgggctaccgtatcagttattaaaatttttgtttttcaaaaaggatactaaaactgggataaccccattcagagataagtcaaaaaaaaataataataggcttggactaccatactaattagaatttttagaatgtgtctgttaaatgcaaaaactgtgtgaaaaatttgtatactccattcagagaagagatagaaaaaaaaaataggtttagagagcccatgaacagct

SEQ ID NO: 28333 - DNA, 1429 bp, Heterodera glycines
  unsure (1)..(1429): unsure at all n locations
agatgttttgttgtatctcgcagggaagaaagatgaaacgccgcgcggtgcaaaatttctcaaagatcggttactgaaggatccaacagtaaaagacatggttgataaatcaaaggtcatgtggggacgtggaaggaaaaaggcaataaaatctataaaaacacccggcatagtgcgagagaagaaacccttcaaaccactaatatgggcaagactgtagagaaaattttatcgaaaatttattataatttaaaatctccggcaagtttcgctgggattcaaaaaattttaattgaggcgaaaaagattgacccgaaaattacgaccgatgacgtaaataaattcctagaaaaacagagaacatacacgattcacaagcccataaggaaaagattcccgagactgaagacaataccgagtggcttccacaccgattggcagtgtgatttatgcatttttgatcagttgaaaaagcataacgacggttataaatatttattggtctgcatcgacgtgctgagtcgaatgatcttcagtgcaccggccaagtcaaagaagagtgaggacatgatcgaggcttttgatcgggtgttcgaaaagtctaaaattatcccgatgaaaatatatagtgacagtgggcttgaattccaagcaggaaaaatgaaaaaatattttgaggaaaaattcatcatcaaaaatgtaatgtatagtcctgatctgcacgccggagtcgttgaaagggcaaatcggacaataaaggagcgcttgtacagatattttacaaagaaagacactcttcgatgggtcgacgtaatagacaaaataataacaaacattaacaacagtgtgaatagaacattgggagccaaaccgtcttcaattaattttgaaaatgcccgtgcgctctgggaaaaattatataaggctagggaatttaaaattttaaaaaagaaaaaatttaaaatcggtgatatcgttcgtattaccaaggaaaagggaaaattttcaaagggatacctcccaaactttaccgaagaattgtttaaaatcgttgttgccaattcgacgacacccgattcatacaggatcgaagatttggaaggaaatttaataaaaggcatattttataaccaggaatnagtgaaaacacatggatgatttttacattgtactaccttcgaacacaccggggcaggagaacactacgtcaaaattcacagtacgactccccgagactttggaattgggcacaaattggtcagtagctctctcatcaattatttacccctactcattcaccgcactcggtataaacggtcaagaagttattaaagtatgggaaaacgacagcagtgtcccgactcaagtttatttacgggacatgaaatttaaaaccgccgggggcctggggaataaaataacgaggcat

SEQ ID NO: 28334 - DNA, 2091 bp, Heterodera glycines
tctggcacatgttaatgaacacggcctcttcattggtgtcgccttcgatctaattaaataaatctctaatatttaattataccaaattagaataaacaaaacatggaaaaaaaaatgtaagttggtgcctttaaatgtgaattgtgcaggttatgtgagatcttttcaaacattaaaaccaattcatgtgtaaaagttgtgctgggatttagaaaatatatatatttttttttgggtcttttgtccactcatttggcaaaatattttttgtccaactaatggtaccatttgaaaacccacaaaaaatgctacaaaaacatcaaaacaaaattggagtttgtgtcaatcacttataactatggttataagttgtatgcactaaacaatgccaaataagcgaataaaatatgcactaaaataccccaaatatgccctaaaaactcgaaaaatgcccaaatatgcactaaaatatgccataaaaattagccaaaatggcttataaccctcaaaaaatgccaaaattgtgtgaaaatacaaaactgacttttaaaacatcaaaaaaaaatggctaaggagcgtttttagataattgcaaaaattttgattttctaaatttatatacgaaatttcgaattttttaaatttttatcatatgctaaaacaaaattacatttttcttatatcaacaatttttttccaaaagttcttacaaaaaaatcaaaatttttcgattttcaagggtatatttttaatttccaaaaaggtcgatcctcacaaaggagaggtacccaagtgacggtgggacttccgaatgaaacttacagggtaggtagatttacccctccccccccccccccccctttgtattataaaatttttttatttttgctaaatgaagcttctggccgagatatgaagcttttcctttttgatatataatatcctttacaaagaatgttaatccaatgtgagcgtcggtggcccagtggttatcccttccattattttttccttcttctaaagttcaattgccccaccgaccgacttttatgaaaaatcagttggccattttttaacaaaattcattaaaaattcttaaaattttcccactgcggcgcctatcggcaccgccggcccccaccaaaacctatcttttcttaaaaaaattagcccaaaatctcaaaatttttttgtcaatcaaaaacccaataaggcgcaaattatgctaaacatatgaccataattgtatgttgaacgtaatgtccaaaagggcattattttttaaaattaaataaacataaaattatggagagggacaaagaatgaactactaatttgcaagtcaaatcaaaatgaactaacaataaatggaagactcccggaatctccggtttttaatcccattataatttgtttttaagaattaccaaaaccaaaggttttcgggtcgtaattgaacagaaaattttctcgtgcattctttttgagtgcgaacatttcacaaaccacacaatttgaagttcagtttttgatctgcggccattattggtaatcgtaaaataatttgtttaatttaatacggcgatatttatgcgtaattcttctgggaaattcgtcaaaaacccaaaaatcttccaacggcactttctggcactgccgtatgcctaatcataaaatatttctaaaaatggcaatttttgacgattatcaaaaagagtttaattttaagagtccttttttcgtttaaattcaactttatgtaatttgatttccaaaaagaaaaacaattaaaaattgctgtttttaattggctaatttgctgggccgcagaccaccgacctttcccatcggtgccatttcagacaccgccccaatgtgtgccgctctttccaagcgtaccacgcgtagtttgccctggtcgtccaaatgtttgagcatcggcagagtgtttgccttgaactgggccatgcgaatttggaccacgccctcgtcatcatcttaagagtcaagaaaaataaataaacatgcttattacaacataataaaattcaaaaatttcaaaatttattggactagaaatccttcaaattg

SEQ ID NO: 28335 - DNA, 1301 bp, Heterodera glycines
cataatagcatgcttttacctgacaaatgctttaaaatgagaaaattttcaaaaaaaaagaaatcctaaggaaaagaacacatatttttttcttttacaaaatattattttaaataaatctgctggtgtttgttttttaattattttttgcttttgctttggcgccaaaacgaaactttcccgggactggtatgtgattggcaaaaattcactgaatagagtgaacatttaaaaagaaattttggtacacttaaagaatttttaggaaaatagaaaaaggaatttaaattagagaagtttttgtttaaaaaaaaggaaaattgggactttctcacgtaattcatttaattaggaaaatggaaattttaagtcatccgttggcggagggagcggcggcacgtgccatgcgggcccaatgatgacgcgataagttacgtcagttcagcgaatgtgcccacgtccgccttccaattggaattaaaaatattctccgcgataagcgctttaaagcgcagaacacccgaggaggatgacgcgacagagcgggactgggtggaggatgaggagtcgcacggcggggcgacgcgtgaggagtcgcacgacggggcgacgcgtgaggagtcgcacgacggggcgacgcgtgaggagtcgcacgacggggcgacgcgtgaggagtcgcacgacggggcgacgcgtgaggagtcgcacgacggggcgacgcgtgaggagtcgcacggggcgacgcgtgaggagtcgcacgacggggcgacgcgtgaggagtcgcacgacggggcgacgcgtgaggagtcgcacgacggggcgacgcgtgaggagtcgcacagcgggccgatggttgaggaatcgcgtggggccgatggttgaggaatcgcgtggggccgatggttgaggaatcgcgtggggcgggtgcggaaaaaaatgaatttagatcggatggaatcatttttagtgtaacagctggggaggataaggcggagcgaggcgtacgcggacccggaaatggcggagggaggggagggatagacgacgagttttacaaaatgatcattcgctcgatgatcactgatctgatgcaattctacttcaattattcgtatttaattgcttttatcacttcaaatgatgaatgaacaaaattgagtccatgtaaaaaaaaaaaattattttgcttaagtcttaaaaatagtacataaattggaaagtttaattaattgtaaggcatccaatttttatgttttttagaagaaactaatgaaataatcgataaatcccgtgccatcgaa

SEQ ID NO: 28336 - DNA, 934 bp, Heterodera glycines
  unsure (1)..(934): unsure at all n locations
aattaaataataataatttaatttttttctcaaaaatttctccttctcaaccgatttccttatctacctcatttttcacccagacccctttcttaccagtgcttattttgactcgaaacctgaccaaaatcatcgggtcgggtttcgtgtcgagaaaaatgtcgggtttcgggtaacccgcggcaactctgatatggtcaatacagaaataatacataaaattaaaaaaaagggatgaactaccactcaggacttattttctgaataaaactctttcacgagttttttaaatttagctaacaaataaacttccgatttctatagctgttttgggtaagcaattccattattactgcatcttttgttttgaagcctaatttttttttcgttgctatcttgataaaaattcggaaaattagaaatattttgatggcaaaaataaaatataaaacaaaaaattttgttcacttaatccaaagatcaacattgacaaaatgcaaactgattgtgagaattaatgtcaacaataagacaatattaaaatatttaattaattttttcatttttttcagccaatgaaaagttttttattttggattgcgccgaagagaacaatgaatatgacggcaagcaaaaaattattgaacatatccatcagatccagtctgacgtacattggacatgcgatatcaaattcggcgatcgcgaccaacctgtgccattcccattgcctgaaggtgcgattttgccaaaaaaataaataaaaaacgcaacctggcaattaataaacagaagaagagcaagattttttgctcaagtacagtttatgcatccaatggacttttgcgcgtccaatcaaatttttacttcgaattgtatagcattttgacattattatcctacaganatttgctagtctatttttttttcaaaa

SEQ ID NO: 28337 - DNA, 1446 bp, Heterodera glycines
ccgtggtgagttgaatgacaaaaagtgcaaatttggcgaaggacaaaaagtgcaaaatttgctagattttttactaaattaattcaacttttctcatacacaaccaaacaatcttggtatcatacgttattagcttgctaaatttccaaaattttattaagtttttcaaagttatgacaatttttccagtttcttgtttgaacttttggaaaacttaataaatttttttgaaatttagcaagctttgcactttttgtccttcgacatatagcacccgccaattcaattaatattttgttaattttaaatcctctttaaaaatatgcgggtaagttaactatttatagcttttttgggcaaattttattggcaaaacttgaaattttaatggaaaccagtgaatttaactacggtaattcaatgatagaacctacccgaagtacagttaaacaaatagcacgcattttcccccgaaggacaggtgtcagcaaatttttcatttttgtccgtggaaacaatttctcgcttgcactgatgtggcggcaatgtcgtggtagtggttgtcgtggtggttgtggtggtagtggttgtggtcttggtcgtagtagtggtcgtggtgctcgtagtaacttaattaattaattaatttaataataataattattattattataatatattttgccaaaatactatacctggaattggcaagttgagattaacctttgtctcatcatatatacagccgcatttaaagccttgaaactttttcatttcaaagaatttcggctccgaacctttgaaaattaatgaattaatttgttaaggattattttttattttttaccaaaaagtttatttaaaaaatataaaactaatttcggatttttaagataacgccgaaaatgcggattttttcaaaaaattgaatttaacgcaaaacaatgaagtttcaaaattcaagtaattctaacgaccattaatcaataaacaaaattcctgaaatattgtaaatttttggtgttaatacggtactgaccattttttaaattaaaatactttaaactgcaccaaaatcccccgtcaattatacaaattttcaaaaattaattttgatatgaatacgttactataaattttttttcaaattatacttaaaaattgcaccaaaacccaccgtcgattatacaaaaattttcaaaaatccacacctttgctgcattttttctcaatttcctttaaatcgagattcaaatcttcagcgcatccccattctgtatgcgtatcatagcctgttgaaaacatttaaatgaaaaaaagaataataattaaaaccaaataacttatgttgatttgttatttgataccattcgagcagttcagcgtaaaacacttatgcttgacaaaaagctggatgctgatatacagaacattcagttctcccaa

SEQ ID NO: 28338 - DNA, 1094 bp, Heterodera glycines
cgacgtaccgtaaataattccgactggtggactaccaaataaaatgaccgctaaggagaaatattcgaaaatattttttgaactctcaaatttattgaatcttcagttttctattgggatattttaggcgacgtaccgtgaataattccgactgtggactaccaaataaaatgaccgctaaggagaaatattcgaaaatattttttgaactctcaaatttattgaatcttcagttttctattgggatattttaggcgacgtaccgtgaataattccgactgtggactaccaaataaaatgaccgctaaggagaaatattcgaaaatatttattgaactcttaaatttattgaatcttcagtgttctattggaatattttaggcgacgtaccgtaaataattccgactgtggactaccaaataaaataaccgctaaggagaaatattcgaaaatattttttgaactctcaaatttattgaatcttcagttttctattgggatattttaggcgacgtaccgtgaataattacgactgtggactaccaaataaaatgaccgctaaggagaaatattcgaaaatattttttgaactcttaaatttattgaatcttcagttttctattggaatattttaggcgacgtaccgtgaataattccgactgtggactaccaaataaaatgaccgctaaggagaaatattcgaaaatatttattgaactcttaaatttattgaatcttcagtgttctattggaatattttaggcgacgtaccgtaaataattccgactgtggactaccaaataaaatgaccgctaaggagaaatattcgaaaatattttttgaactctcaaatttattgaatcttcagttttctattgggatattttaggcgacgtaccgtgaataattccgactgtggactacccaaataaatgaccgctaaagaggaataatcgaaaatatttttttgaactctcaaatttattgaatcttcagttttctattgggatattttaggggacgaaccgggaaaaatccccacgggggactaccaaaaaaaaggccgctaaggcggaaatattcaaaaaaatttt

SEQ ID NO: 28339 - DNA, 905 bp, Heterodera glycines
  unsure (1)..(905): unsure at all n locations
ggagagaaataacttcctagtgtaaanatgaaaaatatggcaaaaataaatgggggaatttgcgagggaaaatggcggagggatcgaaattgtcagtcgggagtggatctcccggtgaagtgtggggtccctccagctcatctgcgccatttctttcgttttgcgtccttcggtgcgcgccgcggctccgcttccggatgatccaggacgccgcctccccattgattctcctcctcctcgtccaattcgacaggcgtgccgtcctggttgaacactaggaatccgagctaccccaaactgcgcccgggaattctcccgcttccctcctccgtgttctcgtcgccaagcgaaaaattggagacacgcttttcgtttttggcgcaaaatgcgaaagtttcacacctaagaatgaatatttttggaactttaaattttttgggaaaaaatggtaaactttttgaaaattttgcagcttttcctatcatatttatcacaatttccaaaaaaaatttcttgtttttgcatcacaaccttaaaatctatgattttgatattggtaaaatttttgtaaaaaatttcgcttttcgcttttcgcattttcgcattttcgcttttcgcatttcgttttttttttcatttcgcatttttcagtttcgcaatttcgcttttcgcattttcgctttttatttttcaatttggcccatccctggtgtatatttccaattttaatggtatttttcggagaaaaacgccaaaaaaaagcactaaaacggcaaaatgccaaaaaaggcataataagtcaacgtagaagccgcaaaccaagtagaaatgttttattgatgcttaatatatcgaaactaatgcgcagaaaaaaggcatatgtctcaaaagtcggtctagtaata

SEQ ID NO: 28340 - DNA, 1000 bp, Heterodera glycines
ctgacctttgacttcttacttggataactgtggtaattctagagctaatacatgcaccaaagctccaatctccccagagcggagcgcattgttcgccacaaaaccaagcgccctccgggcgtccagtgttgactcagaacaactaagctgatcgcacggtcttgtaccggcgacgtgtctttcaagtgtctgccttatcaactttcgatggtagtgtatctgactaccatggtgatgacgggtaacggaggataagggttcgactccggagaaggggcctgagaaatggccactacgtctaaggatggcagcaggcgcgcaaattacccactctcaacgcgaggaggtagtgacgagaaataacgagaccgatctcttatgaggccggtcatcggaatgggtacaatttaaaccctttaacgagtatctatgagagggcaagtctggtgccagcagccgcggtaattccagctctcaaaatgcatagaattattgctgcggttaaaaagctcgtagttggatctgtgctagccgtccggtgcacactttgtgtgttactggtttggttggcttttctgccggtctttccccggcgttggcctttaccggtcggcgtcggtgggctggcgagtttactttgaacaaatcagagtgcttcaaacaggcgtttcgcttgaatgttcgtgcatggaataatagaagaggatttcggtccgattttattggttttgctgaccgagataatggttaacagagacaaacggggccattcgtattgctacgtgagaggtgaaattcttggaccgtagcaagacggactacagcgaaagcatttggcaagaatgtcttcattaatcaagaacgaaagtcagaggttcgaaggcgatcagataccgccctagttctgaccgtaaacgatgccaactagcgatccgccggtggatttattcgccctggtggggagcatcccggaaacgaaatcatccggttccgggggaag

SEQ ID NO: 28341 - DNA, 777 bp, Heterodera glycines
tatttttcgtttttagtgtatttttgctaatgaattttctgaaaaccttaaataggtaacaaaaatgccgaaataggtacctaggtaataagtagaaaaaatcccaaataggtaagataggtattataaaaatcgtcgtagaagccccaaaccaagtggaaaatgcttttttcgtgcttatctgtgcgtattaagtgcgcaaaatttttaggtatttacctaaatttcccatccctaataatcagtgtgaaaatatatgaaaatcttgctttttcatcatgcgtttaaaatatgaaaatgtttcacttttttgtgtttataggacacttttttactgaataaaattgtgtgacggagacggtttgtttttgacagttgtatttgttctagcgtaggctcacgaccgggttccagacctggatacccggttttttcaatacccggaccgggttgaaaatctggacccggcttttctggagatgtttaaatgtactataaggtgtttttcacgtttgagtcaagactttctgcccctttttgagtaaagtctgatcagacgacttattcacgagaatgatgtggaatgaaattattttgcgatgtatgaaaggcccatgtattgtaaaaataatcagctaatttttcagtcgaaatttaaaaatttaatcatcttggttcaggactttttccacaatgtatctgtgtcacttcatttttaggctccaatttttaatatacttgtggattttttttaatttagcggtactgtcgaaatca

SEQ ID NO: 28342 - DNA, 1927 bp, Heterodera glycines
cattaggaaaaagagttcaatgcgtgcaatcagcatatcttttaggtaatttactttttaaccatatcgtttaagttttctctagcggcgattcattcgcataagataataattattattacttttattttttagattaattgaacatttttaaaaaatccaattaaaatttttgaatttatacgcattatactactaattatttattgtagaccgattataatttctttaattttaattaattactttgtataaaaatatattttcatttattttttgtatattttttttcttatttccacgttttcttaagaatttcatttatttaagcaattgaactattttagtttttagggtaggttaggcccggctatttatacaataaccgggtccgcgtatatgagatttttaggctctaaaaaattccaaaataggtaggtacacaagtaataaaattataaaattatttaaaatattcactagatctttatttttaaatcaataattttaaaattatctttcgatatttattttttattggacttaaaataattcgtgcatttcaggccacagggagctcatgaaaaaataggcatttgcttaaaaatcacatccctatttattataaattagccaccatttttttgtcaataactaaaatttatatttattttttaaatcattcgttaaaattgggaattttgaccaatttttagcagattttcattaaaaaattattaattttgtcatttttttgaaaaattggttcttttctggtttttataaaaaatttagcagaattttttggaaaagtttggtgagattttcgttttgatgctctattagaaacccaaattattaaatatttgtaaaacattatgacaatttatcaaaatttaaaagattctgaggattttcccaaaaagcctcaaaaatcctcaaaatttctaaaaaagccacaaaaatcctcaaatcctcattttccaaaaaatcctcattgacctatcaaaaagccacaaaatgaggataaatcctcagatctgggaaccctggttataatagttttttgataaaaagcctattaaactattaaaataaaagatttttggacaaaaactcgttaaatataataattttacaaacaaaaataacgaaaaatatataaataaataatgaaaataataacgctttatctatttgataatgtataaatttatgtttgcattaaggcattgaaactccaataaaatattttaaattctctttaattattaaacgataaaaaatttagaaaaaggccaatatttaattaaaaatcaaaggtttaacaaaaatttacaatgctaaacaaaatcaaattttctgaaaaatgaataaagcgaagttcgaatccgcgcggtgtatattattttctatgtatttttgggttatttttaatgttttaattcatttaaaagaatgtttttttcttaataaaaataaaattttttaatttaaattaaattgtttttttgtgaaaaatgttttaaattaaaataataatttatttacttttattaaagaactcctgtatttttaaattagaatttgtaaaattaatttcaatttaaataaatattcaatccttgtacatttcaaactttctttttaattaataaaaggaataatttattttattttttaaaatttattaattacattcaatatttaatcttactttttaataaacgatttccttaattatttaatcatctaataactgttgtacctcttctaatcactgttgtacctcttctaatcacttttgtacctcttttaatcactgttgtacctcttctgatcactggtgaacctcttctaatcgcttttgtacctcttctaatcactgttacaccctcttctaatcacttttgtacctcttttaatc

SEQ ID NO: 28343 - DNA, 1175 bp, Heterodera glycines
ctttttgggcagcaaaggtacaccccccggggggagggatgtgaattgtgtgggaaaagtcacaaaatcactcactgtcctccgccccgatcgccgccccccccccgccgcttcccgagggacacacaacaaatcgcaatcgcctcactgccctgcctataaaagggagtccattcgttcggttgacaatgagcgcccgccatttcgataccctcatatcctccgctcactttcttaacacacacactcatagcgacacagattatctaggaggatggatatccattatccacatccatccaactcgcgaatgctcccgaattgagtgacccgtgccccgcgtacaataaacgatttttgatcatcacataacacgggcagcagcattgcgtacagtatgtccgtcctttgcgcaactgctgttgcttccgatgctggggtgggtccgagttacatacagtatgacccgcccctggatgttggggatacagttgttacagtacgcccatgatccttctcgacccgccccccccattctcgaggagattccccgagaaaaaatatggcacaatttttgttttcctacccatgcaaaaacaaaaatttcaaaaaaaaatttttcttcccatgccgagcgaagaaaaactattttaatttattgggagattcgcaacatcagcaacagggagggagaagttttgttcttcgtccatttgccccggtcttcccaaccgcacatttcccaccaattttcattgtgtctacgaagcggcggggtgtttggtaatggaattattcgccgtgcatttttttcaaatttgcaatcggcaaaatttggcgttgcatttattgggcacgggggagggggggggggacaatgggagaaaaagtggggggggggggcaaattagagcaaacaaaacaacacatcgccccagggttgaatttttccaggggccattttggcttggcagcacagaggtcgataaatcgatgggatgggtgtacccgccattaattggacggcgggggagagaatttttataaaatttatttaaaatccagaaattgttggaaatttaaacatttttccagttggaatttttgctttaaaactatagactactcattttcaagttatttagcaattgatcaaataaatgcatacttacttt

SEQ ID NO: 28344 - DNA, 906 bp, Heterodera glycines
  unsure (1)..(906): unsure at all n locations
attatctatttttttaatttcatttgtttactaaaaacctccctgctaaattctaaatagaatgcataagatcgtaatcattttttttattaatatttatctttttggcaatatcttctgtattttatcatttatttgtaattttattgaaaaatttataaccagttaatttgcttttacgatttttttttattttctaaatagtcgtttataattgtttcattttgtcaatttccattttctagttaaataatgctaaattatttattagaataattagaataaatattcttagtctacaaatttaccttattttctctaattttaagcttgtttccattaatctccccgtctccagttatctcctcctttctgaggtgattgaaaaataatatacgcgggcatataattagagaaaatacggcattttaggataaaattttcttaccaaaccagggccatatttttcaaaatttttaacggtgcgcctttctgcgacaccgagaccccttatttaaggaacttagcccggccctaatcaatctcttgaaataacaaaaaaatgggactttttgtttcaataaattttgatcattccccgatcggggtctgcgttactgacaattttgcactcctcgacccgttttttataaaatgacaaataagtatatttaatgctaaattatttgaaaacctttaccaattacatttttgtaatttatttaagaatctttgattatggatatatttaaataataatttaaaaatattaataatgaattgtttttatgaactagttagttaattagaaatatttagttttcttttttctctattcatttatgatcattaattatttcatataaaaatttttgtttatntattttttattttgctttataaaat

SEQ ID NO: 28345 - DNA, 1330 bp, Heterodera glycines
atacccttaaaaatcattaagaagcaaaaatcaaacccccccacttgtaaggccagccttaactgccaaaagaaaaaagactaaaaaagctgacgaaacagttgatgaacgaattgagaaactaaaaagaagactacgctgtgtgacttgcatggacaaaactgtaaaaaaatggttaaacttcaaagaattataacaggggctggaccaaggggcgagatttcgacgaaagttttgagatttcatagtgttattggtttttagtttagagttacgggtcattcgatgagcgtgaattcggaatcccggaacaatcccggaacggagtctaaaaccggtcacactcacaatatgtacaaataatttttcaattttttatagcgaaatgtcttatttactccatgcaagcatgcttgtgtctgtgacagttgtgccgagaaaataatgaattctcgcgctgatgctgttacgaaattgtgcccatattgtcgcactgaaatcgaagcgaccaccaaattttatctgccataacaacaacagattttagggatcgatcagcaatggaagttagatttaaatcaagatagaaaaacagtacctcaaaatgatagatcataattgttttatttgaatgaattccgttaattgctgaaaaaatctttttatctcgaattattcaaaatgactaaaatttaaagcgtagatgattagcaacaaagcgctggacggaataattttggagacaatatttaaacccagtgcatatcagcatcatctccggtgcaattctcacttttccaattttttaaaaattctttaccgggatccaatttacgaaaaaacatggctccaatttttttttgttttttgatattgctatacctcctttgacacccctcattttcttgcgcttaagcctcctggttttatttgttcaaactgtcagaagattgaaataatttattctgacgactgttcagcagaataaaaatgtgtcgtagaataaatgaaaaatatataggtgagaaaattacgacttatcgcaagcaattttaagtttgatttaatgaatttattttgacgttttttatcgggatgatttcataattttgttgcgctcacagctatgtgattttacccgctggaatactcaaatacaagagaatatgtactatttagtgcccgttcgggattctcattcatatatgaaggagcataagatccgacgcataattaaagcactggctatacggaagttattcccgaaggattcgggctccccataaatctgggcgcatcggttcggggggactgcccctaaaacaaaaaa

SEQ ID NO: 28346 - DNA, 1488 bp, Heterodera glycines
ttatttgaaattatttttgaatttgtttaaattctccgccgtggaagagcttcgccaaattctttaccaaatgcggcaggatggcaccgcgtcatcggccagcggtcggcgcatgggcgcgcagaagccccagtcgccgccgtcgccaccgcatccgaccgcttttgtgccgtcaaccgcctccacgacggtccatcaccagcagcccatgcaggcgcagcaattcagacaaaatttaatggtaaaaaccctaaatatgaataattaatttaataattatttcttcagcagaccgacaacagtgccaatgaaacggcggttgtccccgcgcagcaattcaactcaaccggtgggccccatcagccgaacagcaattgtgagtaaattttgaatgaaatgtcaatttttaatttgtaatcttttcaagacaacactcacatgttgcaattgtttctgactcatggcggggccggcactgctcacagcggcgccggcggcgcccagcaacagcagcacccgcccgtaccgatcagtgccggcggttccgcgcccggcgtggcgccatcatccgccgcgttgagcgcggtcgcctccacgctgggccgaatgttcgaccaattgggtgccgcgactgcgggcagcggaacaaacaacaacaacggcaccagcaacaatgttttgcagcaacagcagcagcaatggggaggcgagaagcaacagcaggtggacagaaaagaagaagaagcagtactaattaataatagcacctaattatgtgctacataggtcaaaatgattgaggaatgcttatctttattttaaaattaagcataacaattttaaatcacttgtttaagtaactgaaccctaattaattaacagcaataattatgaatggcatgagtaaaaaaaagatttaggaatgattcattataccataattccaacgctctttagcaactgatcctctccaccattcaaatgctgcaacaggcagcgcaaatacaacagaacgggcagcagcaacagcagcagacgcacggcggaagttcgagcagtacacgaaacaattcaatccaaagtggaggtaatgaatgggcggaggaagaaagagccgattgaaaaggccatggcagccacatctttattatgtatttgctgttgaactttgtttagagtccgctttcttcgacccgtccagtggcattgacgtgagcgaaacttcgtcctccgcttcctcaacaaacactcaggtgaacataaatgcaattacaatgttgcattgaaaaccatttttgatgttgtaaattaaattgctttcatatttgagatgatgcttcaaagtccgtcccaactgatggactccgccaagccgccgtcccttccgccgattggcaccaatttgctggcacctcacattcaccaacaacagcatcatcagccgcaacaaatcacacaacaaatcatgcaacacaatgcaccggcaca

SEQ ID NO: 28347 - DNA, 644 bp, Heterodera glycines
atgaggatgagagagaaggaaagagagagaaagggatgctgttttaagagagagaggaagatgatgaggatgagagagaagaagagagagagaaggaagaggggaagaaagggagggtgtaaggaagatgatgagaatgagagagaaggaaagagagaaagggacggtgagaaagagagagaggaagattatgaggatgagagtacaaaagaggagagagaaggaagaggggaagaaagggagggtgtaaggaagatgatgaggatgagagagaaggaaagagagagaaagggatggtgagaaagagagagaggaaaatgatgaggatgagagagaagaagagagagagaaggaagaggggaagaaagggagggtgtaaggaagatgatgaggatgagagagaaggaaagagagaaagggatggtgagaaaaagagagaggaagatgatgaggatgagagagaagaagagagagagagaaagggatggtgagaaagagagcaaggaagatgatgagaatgagagagaaggaaagagagaaagggacggtgagaaagagagagaggaagatgatgagaatgagagagaaggaaagagagaaagggacggtgagaaagagagagaggaagatgatgaggatgagag

SEQ ID NO: 28348 - DNA, 1142 bp, Heterodera glycines
tttttcaaaagcatgacacacaatagtgtctcacactaaagtcacagaacaaaccactaatgtttttcaaaaagcatgacacacattagtgtctcacactaaagtcacagaacaaaccactaatgttttatcaaaagcatgacacacaatagtgtctcacactaaagtcacagaacaaaccactaatgtttttcaaaagcatgacacacaatagtgtctcacactaaagtcacagaacaaaccactaatgttttatcaaaagcatgacacacaatagtgtctcacactaaagtcacagaacaaaccactaatgtttttcaaaagcatgacacacaatagtgtctcacactaaagtcacagaacaaaccactaatgttttttcaaaagcatgacacacaatagtgtctcacactaaagtcacagaacaaaccactaatgttttttcaaaagcatgacacacaatagtgtctcacactaaagtcacagaacaaaccactaatgtttttcaaaagcatgacacacattagtgtctcacactaaagtcacagaacaaaccactaatgttttttcaaaagcatgacacacattagtgtctcacactaaagtcacagaacaaaccactaatgttttttcaaaagcatgacacacaatagtgtctcacactaaagtcacagaacaaaccactaatgtttttcaaaagcatgacacacattagtgtctcacactaaagtcacagaacaaaccactaatgttttatcaaaagcatgacacacaatagtgtctcacactaaagtcacagaacaaaccactaatgttttatcaaaagcatgacacacaatagtgtctcacactaaagtcacagaacaaaccactaatgttttttcaaaagcatgacacacaatagtgtctcacactaaagtcacagaacaaaccactaatgttttatcaaaagcatgacacacaatagtgtctcacactaaagtcacagaacaaaccactaatgttttatcaaaagcatgacacacaatagtgtctcacactaaagtcacagaacaaaccactaatgtttttcaaaagcatgacacacaatagtgtctcacactaaagtcacagaacaaaacactaatgtttttcaaagcatg

SEQ ID NO: 28349 - DNA, 1282 bp, Heterodera glycines
  unsure (1)..(1282): unsure at all n locations
ctttgccattgctttctttccgcttttcagtgtcaaagtgtccatctcgtccatgcgcagttgcgtctccttcaatttgtcnccgtntaagctgactgttcaatttgccactgctgctgaccttcacttgctgctccaacgcattgcgctgtctctccacgccttgcgcgtgttcctgctcgtgccgcaactcttccgccagccgtgccgcgtctgtcgccgctctccgtgccgtctcttccatcccgcgcagttctgccgtcgtttccgccaactccattttggtctggcccaattcgttctctagtcggcgtctgagagtgttcattgccgcattggcattttccagccctcccatcgtctcgcgcatttcctgcgcctccgactctgcgtgacggcgcgctctttctgcctcaatttggctctttcggcttcatccctggctttgcctgccctgccaagtgcctcacctgctccgcctccatcaatgcttcttccttctcttgctgtcccacttggactcttttctccgtcacttgccattgttcctgaacctgctcccgaagctgttgttcctcgtccacttggtgctgcaattcgcgaatctgctcctggcatcgcttcaaatgcttctgcgcttcaacattggccttgttcgcttggtccaacgcgagttccaattcctgtgattccgttaagtcccgaactttggccaacccaccccaatgtcactctcgagcttcttcctggttttggccaactcagtcttggcccgactctcagattctaaagtgacttgcagcgattccaacgctcgctggtgcattttgcgagtgttctcaaactcctcctctttctccgctattcgtttttctatttccgaacgaatttgcgaaatttcaaccttaaaatcaatgtatgccaaaatgtgtttgccccgcggccacatttgcctaccgacctgtgcccttagcactttggactcttccgcctctaaagccgattcggcatcttccagtgccaattgcaactcctccttctcctgctccaactttcgcttcgccttgcccaattcgtgggtccctcttcccccgtcgttaagctgctccgtcacttcctttagctcttgcatcaacgttttgttctctcgccttagtgcctctgcttgttcattggcttcgtccattactgcaacgaagtcgaaacagctaaatttgaatttggtcactttctagggaagggcttctcgantgggtccgaatgttccagttaatttggcttt

SEQ ID NO: 28350 - DNA, 1362 bp, Heterodera glycines
  unsure (1)..(1362): unsure at all n locations
gggggagtacccttccaaatttcaaaaaaacgaacgaactaatggccgtgggtttggcatggcatcatttgttgttttgccgatttggttcattttcccctccctccccctcnctcccactcttttgacacacagattttattttttcctaatatttgtttctaatttcatgttatgcaaatagggagggagagaaggagtcaaagtccaaataggtaattgaaacgaatttgagttgtttttgtgtgtgtgacaataattgctttaattatttcaaaattgtttattaattgctatgttaaatttaaatttaaaaaattctaattaaaaattaataaatatttggagctaaaaaagagaagaaagaaaaaagggaaagagaaggaaaaggaagaaatgcgcaaaaagtgatgtgagggaaatcattcattaacaaagggggggggggggatacggtatcaaaggaaaaacccctcggaaattattttatttttgaaaatcacaaggcttagggcccttttccgtcctttgtctgacctttttccgacggagtccatctctaaagcttctttcggccgcttcatattgtgataaaacagaagcatttaacagaaaaacaatgaatcaaaaattgcatgaaatgtttttgtgaggggaaaaggaaaaagcgaaaaggaaaagggataaaagaaaaaaggaaaagggataaagggcgattggaattccaaaataacccgggagggggaatcctaaggagaagggagtcacagtgaacccttgacattttaaatccgaaaatcaccggcccaaccgggccaattttattaaataggccttaggtccccattttcaaaattaagtgggggggggtcgtggggggatctcgccatttggtgccatcattagagccgaaaagtgtcccgtcctcaattttttttcgaaagttagggtaatattcagccaggtcctttttcgaattcgacccgcggctccgttttcggtctgtaattcgccaactttgccttccctctctgccggggttcgttcgtcttcagggaaatgtaatttttagggcacgggagggggcatgagttcgttgatttgctgttgtgcagggtgagcagtgaatgacgaccgattgaatgaatatgccccccccccaagcgatggagtgggggacccctccagcgaagcgacaaaaattgctcccctcgggaaaaaagtgtgctgctggtgttggtccgagtggaaaaaacccctccagccacaaaaaatagggcagcggacagcgagcgccgacggggccataaaaccgaacactgttttacccctggtctgtccgtctgctctctggcccctgcc

SEQ ID NO: 28351 - DNA, 1402 bp, Heterodera glycines
gacaaaggcggccaaacaatcgctttgctgggactatatgtacgaatggaccaacggtgtgctgttgcgagcggaggaattggtcagtcggcaccaatcgccgcgccgccgatcctcggcatttttttgacagataaaagtgacggtcactcgctgttcgaccagcccaaatttggtggaaatagcgggccgaattgacacggatgaggcggaggaggaaatggaaatggagcgaattgggcgaggcgagcgcagcagcagcacagacgccgaagcagcagcagcgaaccgaccgctgctgcgagtgtggccctatttggcacgagtgttcagtgccattctgacggacgtggagcggcgccgcacactccctttttcggtgccgccaatcaacgcctttttgacccttttgtgccaataatgcttcagctgaacttggtctttattggtgacattttcttcgtttgccccgagggcgccccgaagatttccgcccgttcgctggacgcactccaaacgctgagctcagtccaacgggtcggctcagttcgttttcgcgtcgaccaacagcacattcattcgcttgacctttcccaatgctttccgggtgacttggccaatttcggcaattgttgttcactttggcgaactaattcattttcagatttctgtcccaccaaatttgccgacttttccgccgatcacttcgctttgcctccaccaccgttgtccggcgccccttcgagcagttcttcgtctccgtccgctgacggcgctactaccggcacttcgcttctcggcagtgccctcccatccgaacgccatacgccgacgattttccaccgaaccgaacgctctccgtcctgcacaccggaaattgcactgagtggcggaatgggcggaaaaatgccattgtcaccgtccaattcgttgctcgttgagcgccaattgttcaagcaagcgaaacactaattaaaagcttaattcggttgggttttcaaaaaacagacaccgaagccgtcgcgtttccttcggagtgatccacgcaattccatcgtttgacggtggagaagccgcggcacagatcagtccgggaaaagcatccccgtcactgatcagaccaatgaaccgatgcccaacttcattttcgacaaaaatgaacagcaaaagcaaaaatggcgaacaaagcgaaaaagaggacgatgaagaggaagaagaacagaaacagtcggaattggtcaaaagtgtggtggatgaaatgctgcaaaaggcaatcaaagaagtgttggtcacagactgaccaaacggacgaaagaaacgatgggaataaccatgagcaaatggcgaattcgtttatttgaaatgccaattcgttcaaagattaaatacaactaaaagtaaa

SEQ ID NO: 28352 - DNA, 1014 bp, Heterodera glycines
  unsure (1)..(1014): unsure at all n locations
cagacgaattggcacaaaatcagatggcacgggcggcggtcgtacgacacgctgtgcagcttctacaaactggcggagagcaaaatcaaccaggccgatgttgaggaggtgagtcggccggggaccgaattacccaaaagaattgtgcacaaaacaggaaaatactgaagatttaaaatcaaattttcaaaaaataggttggcttacaattaaataaatttgtccattcacacatttaataatagtaaaatgttttttcccgtcctctggttttaataaaaatggagtcaattacgggttcaacttctttccgtgtcattaattttctgtttttattttttccacaggtcacacaatttggggacgacggggtgactgaacagggaatggtccgatgttcagtgtccgcgcaacgattgaccatgtgatcatttgtttgttgtttattattatttaaatccgaattattgttttaattgtttggtggattttgaaaagtttaatgatttaataggcccaataattaaatttaattaccgaaattgcatcaattagtagggtgtcaaaaaagaaatgcgagaaaatccgcacggattcaaaaagtaatcaaaaatgaaaaaacttggcgtgggtttgaactttgacaagccaacacacccacttttatcccactgggccatttgtcaccatgaccatttttattttaatttcctgatttacatatatttttcccaacagttcaacgcggcgtccgagcatgtgatgaccagcagcagttgttggccgagtggtggacggcgcgcattgtggaaaatggttaggcaaataaaacaattttacagaacgagctaaaaaaaattttcaatagtattttttgtcattttacagtgcatctttcgtcgtcctgctgctgctactgctttcacttctgctgctgnntctccattggctggtgcccctcgtgctgctgctgnnggacatcgccacnnacatttgtgtgtgcttttggagaaa

SEQ ID NO: 28353 - DNA, 1276 bp, Heterodera glycines
cccattccattcgtccgtcgattgatgggcataaatatataaataaataaataggaaaggttttgtgtccattcgttgggaatgaatgcgttgagggaacaccgccgccgcctccgatcatttcattttgttcgtttattctctctattttattgtcaattttaccgctctgatcaatcggacgaccaaaggtgaaaaaatgacggattgcccccggggcgaaaacggggaaaaaacgaagggccattagttggtgggcatgcatttttaccaatgattacccaattattggctgatcagcagatgcaattcaaagtttttggagctgtgaattattgaaaaatttgaaaaaattcggtgccatggcacggaaaggagttgccggaacgggcatcccgacctcgggaatgccaaaaaggtaattctgccaaggcacaatccgctaaaaacccttttgaattatctgtctgatcgctttttatcaatgcgcgagtgtctcgaccccctactcgggaattttcccgctttttagggctctcggactcgttcccgggtcatttcccggcctcggttttcgattcccaatgaaaagcatttttcgcactgaattacttctgatcataagcagcaatcagtccgttcttgacttcgtcattctattggctctgctctgatcacaccaattatcagctcatcgcacaattggattgttgttaattcccgataatgtcctttttaatcggaaggcgacggaacggaaggatgagccataagcaaatggacacaaacaatcgtttaagtgccgcccatttgctaatgactcgcccactgattgatcagtgcttccagcattgagatgacttttgcttcctttggctatgcgttcaatatttatttatccattcgctgcataatttgcccatgtccgtcgttccttcggggcgcattatgcgtcatcccttccccccttttccttcccctcctctctttcaatccctctttttcttttcctcttctcttctcttctcaatctctttttctttccctccctcaccttttcaatatctcccgtcctttttctcccctctttttcttttcctcttctcttctcttctcttctcaatctctctttttctttccctccctcaccttttcaatatctcccctcctttttctcccctctttttccatccccctctcttcctttaaatccctccttttcttttccctcccctcctcttctcaatcgctccttttctcatcccttccctgccct

SEQ ID NO: 28354 - DNA, 1553 bp, Heterodera glycines
atatagtccatgaaagattcagcaaaaagcgagaagaatgtaaagcgaaaggcacaaagccgtgatcaaaaaaaagagaactaagttcaaaagcagtgattagaatcgaaaagcaaaaaagacgaaagaggggggggggggggaggggattaattcgtacaaaagtacgttaatccgcgacaccgtattcccaggcgcgaagaatgtgctcgaacactcgttgcgcgacgtgttcagcaccgaattgcacaattttgcctttgacattggcatctttcgaagagaaaaacgaaaatccctttttctccttcttcagtctgagctcaatgcctaaaattgaaattcatttaggcattcttaagtttaattgccaaccaaatttcccatttgagtccacccgagtcggccttttgagttcggcatattccgggttccaatctgcactccaattacccgtcagttcgtgttgtcgagcctcaattacgtgcctaagaatgaatgggttattatggtacactttgtagggatgggttgatgatcatttattcacttgtccgtcacaatgatgaccaaatgttttgtgatgcccccataagtcaggtagtgatcagtgtcagcaaaatgaccacggtccgtctcctacaaaaatgtgtttaactgaaggaaattaatagactgaattttaacccggaatattttgtatccgacagcctcctcaaaaacgtatggtcggatgattttgtcatgggaaatgacacgtggcgggcgaattggctttacgtcctcaacattgctaatggcactgaaaacaagtggattaacaatggacccgtcgtgtcccttctccccctcgctcactttctgacattgtccgccgtcgttgtgaccaaatcgaccacccccgacacgggacgagcaattgcaccgaccattccctttcctaaacataaagttgaccagaacgctttatacaaggccccgttcctatgagtttgacctaccgatgcctttgatcccgccgagcaggccgccctgcttaacgccctcgacaggtttggacacgacacctgagaaacaacaaaacaaaattgtcagtgtgatatagaattagcaaatgagtccaaatgtgctaattataagtgccggctgaccggtgactccttccacaacgcttgtgccaacgccgcgaaccccgcgaaacattccttcaccgatgctggtcggctgctgccgggcctgcattcgccgtcgttggtagtcctcgtccaaagtcagtgccgccacccctttgcccattgtgccggtgatgcgcgaagccaagccgagaacgccgccgacggtgtgactaaaaagtgggagggggacatgagtaagagcaataagcaatagccaaaagattccacctgaaagcactagtcagtccaatataaacgccctccccaaattcggccggcccagtgaccatgccgagaacgggttggtagaacaagtcgacagcgccggtgcgcaagtcgcggacaagaccaaacggattgccaaggatgtcgaggcct

SEQ ID NO: 28355 - DNA, 1499 bp, Heterodera glycines
ttaaaaagcaattaaaaaatttttaaaatgagaattcatgcgagattttctggaaataagcttaatagggcctagttaagctgtaaaaaaaatttggggcgatttgaatgagaatagaaatagccaggttcgatgaagttttggtaagccaaaaaaaaatccaaacatttaaaaatctataaaaaatttaaaaattagaattcatgcgagattttttggaaataagcttaatagggcctagttaagctgtaaaaaaaatttggggcgatttaaaagagaatagaaagaaccaggttcgatgaagttttggtaagccaaaaaaaatccaaacatttaaaaatctataaaaaatttaaaaatgagaattcatgcgagattttctggaaataagcttaatatcgcctagttaagctgtaaaaaaaatttggggcgatttgaaagagaatagaaagaaccaggttcgatgaagttttggtaagccaaaaaaaatccaaacatttaaaaatctataaaaaatttaaaaatgagaattcatgcgagattttctggaaataagcttaatagggcctagttaagctgtaaaaaaaatttggggcgatttgaaagagaatagaaagaaccaggttcgatgaagttttggtaagccaaaaaaatccaaacatttaaaaatctataaaaaatttaaaaatgagaattcatgcgagattttctggaaataggcttaattgggccttgttaagctgtaagacacccaccacttgggcacttaaaaaaatttcaaaaaatttaatcgtccataaataatttgtaattgatcagcggctcaccaaattttgcagagatacgtatcggagcactacaaatgcttactaattttcctagattttttaaacccggtgaaaattttttgcagacacccaccacttttgcacttaaaaaaatttcaaaaaatttgatcgtccataaataatttgtaattgatcagcggctcaccaaattttgcagagatacgtatcggagcactacaaatgcttactaattttcctagatttattaaacccggtgaaaattttttgcagacacccaccacttttgcacttaaaaaatttcaaaaaatttgatcgtccataaataatttgtaattgatcagcggctcaccaaattttgcagagatacgtatcggagcactacaaatgcttactaatttttctagattttttaaacccgctgaaaaagttaagcctaaactttttcggcctgtttaaaaaggaattagaaatttttaaaatatttattcatctccctttttgataatataagagtcagagtgccttattcaacttgtaaataaattttggtgcgtttcagagcagtttctgaaaaaaatttatgaattaattttgcaaaaataaataaataatgaaccctcctccttaatattttcctgcgcccaggtaactcactcggccgcttcgcggcctcgtggctgtaaaaaaaat

SEQ ID NO: 28356 - DNA, 1744 bp, Heterodera glycines
tattgagataaattttttgaaaattcaatatactttcccgaagtttactttcaatttgttgaatataaagtaaatccatcaaaaaatggctaaatccggtattaagaatcattatagatgatcaaaaagacgataatgataaactttgaatttttagcgaaaaatcaaatcgacaatcgaaattttagcttttttgcttattttcgtcataaatttattaattgttccttcctaggagcttccacccaagctaactacatatttttcgtgcgtttcagtccctcctcagtataggcataaaatggatttccatatatttcacgccttagttatttataatctttttttctcaaactttgaattatatggttatattcccgaataatagctccattttacgctttgatgattgaattgcgattctcaaatataatacgttttcaaaaaacggggtcacttagagtagaaaagcaaacgtgcgttttatcacacgtctttgtcctattatggccacgttttcactacacagatatcacgtaatggggaaattgagtagcttacgcaaataaccccctttataccatgcataacgtaaaaactgcttaaatttcggtgcgcataattgataatggataagactttgaagtttgatgatttcatccgctgataaatgtttacagggagttcatcaagtacaattcgatcagaaatttttcgaactaattctttccatgttctgtcaaccattaaaaattaaaataactttttttgaactaaccgaaataaatacaaatcgcatggctgaacaaagccagtacaaccaggttggattgtctggatgcaaatattgtccctgccacactctttatttgatgaagagcattcctggccaaaggttccaccaatggccgttttccattgtggccaagaatcaagcaacacaatggcttttttgtccccaatgactttaagcaaaaaattttcaacaaagaattttgccatttcttttgtcatgatatgagaacggccagcaatagccgttatatttggggcctagaggatgaaaaatagacaaattacagaaaatatacagtaaccttaaaaatccctttttgagggaattggccatttttttctgctatgattataagcagcggtgaatacaacactccgtgtactgaaacaattggacagattgtatagctgtgagttgttgctgaaatattttgcgccctgctttccactctttttgtccaagaaatttctaatgtatgttgtgaatgaagctcaagctcaaatcctgattgatcactgttgagaacaaggtccgggctcaactcctcgaccatgtttattactccttgaacaaaattgttggatgtttccagcaatttttccttttccacggcatattttttgttcacgaattttgtgatctcaaaaaattgagtaaaaaggattactgtagatcaaaaccttctgacaacaattcttttggctgatttgaaatttttcaaccaacgacggcttgctttaaaattgggtattttaatttcctgttatgagcccatctccgtaaatccatgtcctttattgtaaggttgattcgcctttttcaaggaacatttcaaaaaggctttcattaatccttttgagcgcagacttccggtcttgataagttttctcgaacctttaatgagtccgaaaaatgttttaaggaaaccctaataccgccgtaatttct

SEQ ID NO: 28357 - DNA, 1003 bp, Heterodera glycines
catctaaatttcaaaaatttggccaagtttgagcaaaccttatggccaaaagcacacaaacaaccagtttttacacatttttggccataacttttttgaaacttatctaaattttttaaatttgtaaaaataggaatttgagttgggttaacaataaataaaatttgaacaattccgtcgttttgcgatcaaaaatgttaaaattttgaccaaaattcaaaaaatatatacaaaaaaatttaggaaacctaatttctgcatcggttgccttggccttacccattcgcactgaaatattgttttttcactctaattcactttacctattatctctaattagccccccccccccctatctaaggaggttgaacaataatcatccggggggataattagagatatacggacggtatcagctcaatcaattttgaattaggatacggagaatccaggaaaaaaatatatgcatttacaaaaataaggaagccgtgtaaattatgtatgtattgaacaaaatcagcaaaacacccttccccattactctctctttatatacgcataaattaatgcgttatggccattatttttggccaacaaatcattttaatctccccccatccgttcatccgttttcaaatctctcacttttattttggtagatatataaagaggccgaaaagacatttttgatgcataatagagaaaaaatgaacagacggtaagcaatttcttttaaaaaattgcaaattttcatttacccaattttcttatgtttcagttggatttgtggtgacgtttggatggacattctgccatcttttgaccatgctcaacttggactcaaaatggcattgctttccgaccgtttcgatgttttggtggacaaacatttcgatgcaaaaagcgaattgacaatttggagaagaaatcgaattcgcaaggacaaagggccaaaagcgaaactgtctgttctgatcgatgacaaatgggtggcatttccatt

SEQ ID NO: 28358 - DNA, 1334 bp, Heterodera glycines
aaaaatgaattgtttataaaaataaaatggagattgttggttaattgaaaattgaagaaaattgggaaggaaaaggaaaatgagcgaaggaaagaacgaatgccaaagcgaagccaaacggaacggaccaaaggcactcaatcattcccggggatggggaggagggcattctcaagagagggagaaaagcgatgccatcgcaaatgacccgagggatggcggagggaccgatttattatttatttctcccccgccctttggcccttttttttgtttattttcttttgcccgtcacaattaattaaattatcagtcgcgtccatcttgttaaagaacgtccgtcggtcagaagcagattctctgcacctcaaatgtgttgttttccatgcattccttctcttagaaaggtgaaaaattaaatattcttgttgaataaatggcaaatgcaacgaaaggaatttttaggacatttggacggaatggtaattgtaaaaattgtttaattaaaataaaaatatctatcaaaatcaaaactaatataaacaaatctgactgatcagcgcaccagcaaataaatatttaaaaagaattattaataaattaaacaagtcaaaaggaacaaatttattgaaattaaatatttcattacatataaaataaaaaggatgtttgtcaattactttaatatttatgtcatattattgataaaatattagtgtgtaattattattgttatttttgctataaaatttgtttttttttcactgatgcattaaataaatgtccaataattttaaattcttatttaatatttttcaatataaaaatccattttcattcgattaacccattaaattttttctttcattcattttattttttttgagaaatgctttttaaattttcaattttattttgcacaatttttttgtgcttttgcgtcgacgacggcccaaaaaatgacggaaaaaagcaaattttgacaaattgggaagaaaataatcaactaactgagttcgaacttgatgacgaatattcgcattatctttacgatttaatgggaaatgaaaacgacgaagacaaatgggccaaaatagaaacgaaaatagacaaagcaattggagggggacaatggccaaaggaggggcacaaaagcggaaacggggaaaatggggacgaaaatgggcaaaatgagtgccgaaatgggcaaaatgggggcaaaaatgcgcaaaataagtgccgaaatgggcaaaatggagacaaaaatgggcaaaatggggataaaaaagtaaaataattgaaaattaagaaaatattgaaaatttaggcaaaag

SEQ ID NO: 28359 - DNA, 667 bp, Heterodera glycines
ctacgctaatcgttcaaatcacgcaatctggcacacacgcactcagcaaagcggagaagttcaatctcctgcgcaacctactcggaggagaagcccgagaactcgtggctggctttcgactggaggacaacacatgacgacactgtcctccaattgctgaaggacacataccttacaacgagagaacacatcgaggagcttcacttggacgaggcttgcttgatggcctcaataattagcgtgcctccatacaagtactccgcgcgactcgtacgacactctattttaaaccatcaatgaaatcacacataggcttaaattaaaacgatggtcaaatcaatcaatcaatccgttcacttttaaccgaattatgcctttgtcatgtccagagtgccattggcagacaaaaaatccttccaattagtcgaataattgtctgtcttcatgcaggacatcacaatgtagcagttgtcaccattttgctccacatgaaattgaaaaatttaatgcaataataatattaatagttcaaaatgacaaactgttttagaaagcaaaagcatttaaaggtgtaatttacctaattggaatgttagacgacccaaccggtaacatgggagattattgggatatatttccaaatatttcatgacacttttacggttgg

SEQ ID NO: 28360 - DNA, 827 bp, Heterodera glycines
tttaaaaaaaagtaagctgcacaaaattaatggctgggcaaacttttcgattatttttagagggaatttatttattttttctaaatttctcggagcaggtcctttcctctccgcgtcgccaccccccccgaaatgttttcaaacctagaaactttttattaaaaaaaattcctaagaaatttcttaataagaaaacttcaagaaaaaatttttgaaaaagacacgtaaaacagaaaattcttaacaaccttttttaatgttttacatagaaaaagcattaaaaatcgctactcttaaacaaaaaattttttccaatatctaagaaacctaattgtaaaaaatttagaaaaatgaaatttgatgcattcttttcgggtgcctaacttccttgcgtggccattaagagaaaattgaattttttttagtggttttgcttttctgccgatgggtgaagcaatgctcggggctgaagctcccccaatgcgtgtaatgacggacggcgctgtttgctggtattacaacaaatttggagcaaatgtctacgttgactgcacataatcaacaacaacaacgacgacagcaacaactccatcgcctacaaccaaagaaaccacttctttggatgtggaaattgtggtcggcggctgtctggcggccatcgctatcattgcgatagcggccgataacttgaggcgttttaaaaaaaagtaagctgcacaaaattaatgctgggcaaattaagcgattatttttagagggaatttatttattttttctaatttcttcggaagaaggcccttcctcctcggggcggcaacccccccccc

SEQ ID NO: 28361 - DNA, 1201 bp, Heterodera glycines
gatcagttcagggggcctcagagatggtgatcgcttttggtaggtcattgttcattcctctttctgctagtcattccggtgcttaaataagcttcagctcactgtcgattatttaattttttaatcaaactttggttccggattaaataattgaacacactactagcttgaccaccaaatagcttcaataccgtataccctcccaatacaattcaggtacgaaaatgatggtgtgttcacacagcttcagctagcgcaaattcggaaaacctcactggccaaagttctgtgtacgaacggcgacgacattgaccgtattcaggtagtacaaaaagttgatactaccgtatctttcactgacttggcgacaataagtaggctcaacccgaaactggtgaataccatatcgagattttatttacaccgatgaatcatgcacttcatcataaaaaaaattctgagcccagggaatgctcctccggcagcgtcaaaaatgtaatggaaaattccttgaattttgaaaatcgtacccaagaaatctgcatttttttgcctagtgcggttctcaaaagctataaatttttttggactcaaagagaaacaatgggtcttcagttggccccttccgaaattcgtgctttctggttatgcttttgtctccgacaaatttattatttttctcaattcttagtcaaatgtgttccgttatatgggcaacaacatgttggcctatcggtcatgtgacgaattggcggagcttaacttgcgcatgtggatgtcctgttgtgatgaaacttgctcagcacgtgcgtcgactggcattgacagtgccaatgatgggaatgagcaaagcagaaggtggaataataaaaaaattgaaaaattgccatagaaaatattataattaaaaaacattggcattttataacaaatatgcatattcaaatgcatgaaatttgaataactttctattaatgaacttttttttttgcacttttttgattatgtaaatatttaaatcgaaaaattaattaaacaaattttactttttaggcgtaagcgcgctgttcatctatatgcaaatgggaataattaattggaaaatatgcacaactaaaaagatcaattctaccataaattgttgctttaaatgatgtttgatttacatttacaaaaagcacaagggtttcatattaattta

SEQ ID NO: 28362 - DNA, 1764 bp, Heterodera glycines
  unsure (1)..(1764): unsure at all n locations
ctttgatcaattatcgattgatcagccgtccttttccgctcgttcttctgctgacctgctcaatgctgctcagcttctgctctttgcccatctgttgcatttgtttcaacacagcttcgacaatctttaaaacttttgccctccgtcggtcaaaaaagcggcacagaaaggaaaaacctttttgtccgtacaaatttcctgaaagcgcttctccaaatcgccattttgggctgtgccgtgcaattccttgtacaatcgcttgagggttttctccggtggaacaacgatcgcctgaggggaaattgggagagaaatgccgagacgcaattattagctggccaattcatgttcacaacaactcattaattagcatggcttctcatttccctaattagtgccattttcgtcgctttttccccaatttaatttcaattcttctcaccaccaaatttcgttccaaactgtcgccgtccacataaacttgctggacaagtgggcattgcacataaacactttcgattttctccggtgccacatattcgcccttaattacggttaattgttcgctaattggtctccaaattaacctttgtcctcttcgacccccttttacctgagccaatttgaaaatgtgcttcttccggtcgatgattttcaaccgtccatccggcaacaattggccaatgtctccggtgtgcaaaaagccgttctcatcgaacaattcggcggtcttttccgcgtcgcggtaatagcctttggtcaccgacggtcccttcaccagcacttcgcccttccgatcactctgaaaaatgccaatttataaaagagtatttagcatcagggatgggtagatatttaattacggaaattatatccgtaattacgggatccaaaaatgtcgtagtttccgtaatccgtaattatgccaagccctgattggcatggtctattttgtgccctttttccgccattcgctttccctccgactgaccgtgaaataattcagttccggcacatcggccaatttgaccagtgaacacgcggccggcgccccgcaatggccgccgtcgacgtcgcctggccaagtgacggtgaccattgcagtgcattccgtttggccatagccttcgatgattgtggtgccgaatgcaatgcgcaagtcctgcagcacttccggcgcaattggggcagagccggtgacttgaaaatggggggggggggggaatagcaggaaaaagagagagagtgagagagagagagacattggggaaaaataaacggagaaaggggagggaggcagggagggagaagtgattttggaatattaaaaagacagatcagttagagaaacagagagaaagagagagcaaagaaaaaaatggacatttagagaaatcaagacggttgtgatttccttgcacaagtcaaattaatcaatcgattgatcactttttgtgtgttcatttgatcttcgtttgctcaccgatcagtctgactttgccgcccaattgctgctgtatcttggagaataccaatctgtcccaaattgaccgatttgtgacaatgcctttgcgcaggagagccaatttctgggcataagccaaacggaaaagccattgcttgaagggactcgaacgggcgaccaaagactgaaatggccgaattgaaatgggaaggggtggaggaaatgcgacaaaacaaagacaaatgggccgtaattaattagtcgacattaaaaaatgaaatggcacgccgantagtcgt

SEQ ID NO: 28363 - DNA, 839 bp, Heterodera glycines
tttggaatcgttcaacatcaatggccatcagattgactattcaccgacagttctgtctcgccgcgtgccatttgacagtttaaacgcctttttgtagatggccatcgtcagcaaactttgaactttggcgcccatttggaacatcacattgtagtggtaattgacgcaaatactgaaaaagaaatcaaaaatatttgttttatattaatccaattcttacgatcgaatttcagagcagagaaaaatagccaacgagtagcaaatcccttgccaaagatgggcgttcgggtcggagatgaaattgactagcaaattcagaagcaaaggattggcaaaaaggagaatgtcgtagaacagtttgacaaaggcagccaccaacagatcgtatttgaacaactgtgaacgacggatggttggttgggcagtgaatgacagcaaatgaccgactgaccttgaacagagtgaacacaatggaaggcattggcacggcgcattcgctgtcgaagctgcgtttcggcatcaaaccacgtttgctggtccgccaaatgaagtatttgtgacggcgccgctcttggtattctgttgatgtgacgaaatttaaagcgttttgcattatttattcaactttcggcggcaggcagccaaagcttttcccattgtgcggtaaggaagtgacatttgttgtcagtgtccagctcgaataggtcgtgttcagttaggggacgcttgcgaccgatttgaaggattggaccgaaccacgaatagaaaagacgagagaagaagctggcgttgagtttgggcgaaccatcggcattttttgccttttgcgcattttaaat

SEQ ID NO: 28364 - DNA, 1012 bp, Heterodera glycines
ctctattatagacaaccaaatcaaaatgccattgatggcgacatggcaatggcactggtgcgaaaatccgaaacgaattaaattttagactaaatgaaaacaaaataacaacacgaaaactctccgaaaacgaaataacggaaataaacgcagttcaactacgttattttgttaaaccgacaagaataaatcaaaatgtgaaaattagaaaatagttttatcgcaacaataagccaaaataggcatcaacaaagcaatgggaatcagaacacaatcatctgaagccaaacaataccaccagctatcaaaagccgccgctaagcgaaccaaaattttgcactccacgagaaaagtcaatttcaccaacttcacgtaaaatggatactgtagcactgcccaaaagctaaaagggtttctcctattatataaggtggattttcaaatttaaaaaaaagaacccttaacaaaattcgtcttacaaaattagattttgaaaatccccactgttgatatatttaggtgcattttttaaattaattttccttttgcttacctgtccatcatcactacgttggaaagtaaacacatcaccggactgtttttgttcccattgctctggctcaatctccaaataattcttcaatttcgatcgctcataaattgctagttttcgaacaatgaattgttcattgtgaaagacagtaatttcatatgattgacgattttttggaaaatacagtttcttttttccgcgcaattcacttacttttaacgttttaatccactaaaataacaaatatattttttatggctttatctaatagaaaatttacacatatgtaatggaaaaaacctttttgatggaccaattagatttgatttgtttctcaacaaattaccccattaaaattggattacgtccagtcattcttccgaaatatttgctttatagacccaatttaaatgttattatgcttttgtctaatggaaaattgtggaaaaatcttttacc

SEQ ID NO: 28365 - DNA, 1569 bp, Heterodera glycines
aaattcgcattcttctaaaagtttattagatctcaaataaaaataattaaaatttaggttgaaggcggcgtaaaagttgaaaatggccaaatgcatcaaattttcttgaaaaattgctttacccttcgcattcatccttcattatcgtcaaataacaccactaatgatgatggacatatttattttgtggccgttaaatgcaatggcattgagggaggtcaattgtatcggacaatcactgaggaaattgcgcaaattgtgctccatgagcaaaacgaatgtgaagcttatgacataaaagtgtacaaaattagcaacgaaatatcaaaaaaagacatggtaaaaataattcttatttttcaatttttggggtgtctttttccaatattatgggttttttaaagtgagcatatcacctattttctataaaaaaaaattggtggattgcataacaaaaaaataaaaattttcattaaccaattaatcttactatttgggtttgcttcattacttcgcacaatttcaatcaatttcatctattaaatcctttaaatgctcagtttataattaaatcataatcattttagaaggctttcactggcggattattggtattatattttgttattaaaattttgatttttaataatttacattaagccattaaatggtgatcaattcaaggatggacgacaaattttaggagtgcaaattcctaatggccacacttaccaattcagttttgttacatttgaagcgcaacaaccatcaacaccatcatcatcatggaacacaaaagcggtaacaattgaaagagcattcggaatttaaaattttaaaattgaataggaaatgaagcgcttatcctctgaaattgatatattgggaactgaagtaaagcagctgaagaacgatgttgagcaaatgcgggaatcaattaagacggggctgacagagatcaaaaattttctaagcaacaaattgaaaaattgaacaatttttcaactctttttgagtgattcatttatgttctatgacatactgtaatgtaacggtatataaaatctgtatcattatcttttttttattattataaagagcataactgacataaattggtggtagatgatgcttaaatctgatcctttaattgaaattttgaggcaattaataaaacaattaatttaattttcaatgttttaaaatgtgtttatttgatttctttaatttgaaattaaaaaaaacaaagatttaaaaccaattaaaaagaaaaggcaccaatgactcgtatccattatccagaggcacccaagggttcctaggcaaatgtgttcaatttttttacaaagtttgccccaacctccgacataaaaatgccaaatccataacgagaaaaaaaggcaaaccaaaagacatattcagatttttgtgattttgagaaagcaattaatccaatcttaaaatttgctttttgtcacttattgctttttggtatttcatttttttggcatttcatgtacaaagtttcaattaaattatcgaataaatgacagcattttatagatctat

SEQ ID NO: 28366 - DNA, 1246 bp, Heterodera glycines
gaagttctggaaaaggaggatcaaaacaagagcaattaattaattaattaaaattgggcaattaggactaatagaacacacatttgagtcgacgatgaatttccaactgcaacaaacgagagaaacagcacccaactcagccacactcaaatgcccaaagatgcggacgagcacagcgcggggcaaacgcgaggcagagatttccacgcgacgccggtggtggtggccccttttcggaatggtcggctgagtctcggatagatcgggagggtccatcagaaaagcaactgaagcaaaacatacttttgcccctgactgtacattttcaaacgtggtgaatcgaagtgacaaaagtgcgaatgagtggtgatcagaaggggcgggtcatttcagtacagaacaaattaatttaattaattaataatctattaattcgatttgctgaccataattataattagatttagatttattattttaatatttcccaaacaaattacatttttatgagaaaatatagtcccaaaaaactttactcaaacctgaaaaactatcttataattcatttaaaacttgaaataattcatgcttgcataacttttggtgctgatcaaaaaagtctcttacaccaacttgatcagatcactccttcctagtgaccgggacacccaaaatacactgaaaatcggggaaattttcgaaatccctagggggttgggaaatttttttagaaaaaatgggcaagcacactagaaagagcacaaaaatttctactgatttgacttttgaataatggggctatgacttctacataaaaagatatacttggttgaaaatttgatcaccataaaaatcatcaatttttgatcagtgccataactttttgtagaagcatccaaattaaaaaatcttggtatcttttgatagccctaaagtgccctctattttgcctttaaaatttcaaaaaaattggttgagtttcaaaaaagttgtggcttgtaaacttcacaaattgatttggtaaacctttttgccacaacttcttagaaactcaacgaaattttttgaaattttacaggcaaataccaagaatgtttaatttgggtgcttcttttcttcatatctgttgttgcggacacaacaacaagaagtgtgaagaatcggcagacactgtatgagttagacacttttaaagttaatggtgtacaatacgccaatgaaaaaacagacagctgagttgacacta

SEQ ID NO: 28367 - DNA, 916 bp, Heterodera glycines
attgacatccctactgatgatttatcatttttttcttactacatataatacaaaaaatcctaattgttataaaactcaccgacatgctttattggtgattcaccttcgtttacgattacagtagttttctcctttctttttggcatacagttcacctcgttaatggacaatgccaaaatgaccacgagaacgaactggtgagcatgaaacattagtcactattcttaaattggcttcgaaaattgctaaattaaacctaaagtaactattaaaataaaattggaaatcaaattttgcctttaaaggcacagcttttatttgccaataaaatatcacaaataatcaaaaaataatattaataaggattatttattcattcgcagaagaaagtgagttttttttggataaaataatgaggaataggattttattactatttttacaaattgccatttttattgtaaattgggtttttatgcttgctgatgaattcgtccaattgcttttggttatacacatataattttctcatattgaatgctggcaatattaccatccactgctcattgttggcatttgttgtcgtcattatatacactttcataaaataaattttacaaatttatctttaaaggccctgaattttagattaattaataatttaggagaaaaatccgctttatcttggtcacgaatattttcatagactttgctggcgtacatatcaaggatggaattccgaggcaccaaaaattttcgtaagtaggaagtcggaattccaaggcccaataatttttcgtaagtcggaagtggaattccgaccccaaaaatgtcggcagtcggaatttttcaaaaattttaaatataaaaaatttttcaatattttattcggctaaattttaataataattaaata

SEQ ID NO: 28368 - DNA, 959 bp, Heterodera glycines
  unsure (1)..(959): unsure at all n locations
atattttcncacatccattctgctaaaactagcagaatgaccgcgttgaccaaattttcccaagccaaaattttgtgtcctattaattttaaaacatttagtttccaaaactggaaatttcgagtgatcattttcacttgactcactcgaccctccccgcatggaagttgaatccaacggaaattctgaaaaacttgctctcagcgccttgagctcactcatcatttttgtttgcgtttctgtcagattacttatgatcaaaagacgaaagatttgcagagaagttgacggtacagctgatttccaaattttgttactgatttctatctcacttatttccttaacaggactcttaatacctaaaacttgatcaatctcataaagtcgaccttcaagaacgatatgtttgtagcgatctgtctgacaatcaacttttctagcttctgcacttattatgagggtttttgggtccaaataagccagaattggcttgtctttcctaactaatgtcacctttactgggattttcttgtaacatttatccttggtttgtgcgaatccatactcataaactggtgaacatggccaaatttccaaaatgttctgtgaaatccattcggtgcgaacttcaccgtccaacggttcatcaaaattaacatttcggcgagttctgtccaattgtcggttgaattttacaaattctctttcttcgattgcgaatccttgttggctaactaccaatcttcttaaacaagaagtaataaatgtcagatcttccccaaatgttagggctaagtccggtgggtcactgatccaacctattcgataaaatggttccatttttctttgaaaacttttaaaacgcaatgtccgtgtcgagccgcccatggttcagatgtgtgataccgatcaacatcctcaactacaatcgaatcgtgtaactgcatctgccgtcgtcg

SEQ ID NO: 28369 - DNA, 1339 bp, Heterodera glycines
  unsure (1)..(1339): unsure at all n locations
ttttaatcattaaaaatattttagttattaaatgataatcggaattttatcatgctctgataaaaaatcatttgatatggatcgacagaaacgaaaaatagcacttgtgaaaatatttactgaagattggtttcagacgcggtgtagaatcttaaaaaattaatattatttaaatcttttataagattacgcgatacaaattaaggaaatagtaaagttcatgtgatcttgatagaaaatggataatgaaaatgtggtttattgaaaaaaatggtgttaattcgcgtgcagaatctataaataaattaatattattttaatcattaaaaatattttagttaaatgataaatcgaaatttattaatgctctgataaaaaaagcatttgataatggattcaacagaaacggaaaaattagcactttttggaaaatattttacttacagatttgaaggtttcagacgcggtgtagaatcttaaaaaattaatattatttaaatcttttataagatttacgcgataaaaattaaggaaatagtgaagttcatgtgatcttaatagaaaatggataatgaaaaggtggtttattgaaaaaaatggtgttaattcgcgtgcagaatctataaataaattaatattattttaatcattaaaaatattttagttatataaatgataaatcgaaatttattaatgctctgataaaaaaaagcatttgataatggattcaacaaaacggaaaaattagcactttttggaaaatattttacttacagatttgaaggtttcagacgcggtgtagaatcttaaaaaattaatattatttaaatcttttataagatttacgcgataaaaattaaggaaatagtgaagttcatgtgatcttaatagaaaatggataatgaaaaggtggtttattgaaaaaaatggtgttaattcgagtgcaggatctataaataaattaatattattttaatcattaaaaatattttagttatataaatgataaatcgaaatttattaatgctctgataaaaaaaagcatttgataatggattcaacagaaacggaaaaattagcactttttggaaaatattttacttacagnatttgaaggtttcagacgcggtgtagaatcttaaaaaattaatattatttaaatcttttataagatttacgcgatacaaattaagggaaatagtaanagttcatgtgatcttgatagaaaatggatattgaaaaggtcggtttattgaaaaaaatggtgttaaattcgcgtgcaggatctataaataaattactattattttaatcattaaaaatattttagttatttaaa

SEQ ID NO: 28370 - DNA, 1207 bp, Heterodera glycines
acaggagtagcaaaggtggtcatcgatgaatccaatcaagtgcagatgccagatattaaagaaatagaatatttctttaggagtcgttggggataaaggaagaccctaacgaagtcgatgatcaaacagcaatgcagctgtttgacaagtcaatccgtcgtgagaacgacggacgttattcagtgaaatggccgtggaaagaagatataccaaatcttccttccaattacagaatggctttctcaaggttgatgtcgaccttgaataagctcagacattctcctgaacttctacagcaatataacagcacaatccacgatcagctatcaaaaggcatcattgaagaggccagggaagcacatggcactcttgagcactacattccgcatcaaggagtgctggctaagggcaaaaaacttcgcgtcgtttatgatgcgagtgctcacacaaggggtacaaacagtttgaatgactgtttgtacagaggtccggtacttttacctgatctcatcggaatgcttttgcgattccgatgccctgcatttcctcttctcgcggatatccaagctgctttcttgcagatttccttggaaccagaggatagggaagtcacaaagtttttgtggctaaagacaccgaaaaggaggcattaacaaaatataaagaagcgaaggctatccttaaagaaggttgtttcaaccttcgggaatttattaaaaattccaaggaggtgatggaagccatccctccggaggatcgactcgatcctttaggattgatgggcccatgcatccagcctttaaaacttttcttccaaagcttatgggaggaaaagaaagggtgggatgatgccctctcagaagaggactcgactcgctggagtactttccaagattcttggaaagacaagcgaatccgaattccacgaaggacgatgataaagggagaatgctcccttcaattgcatgcatttgtggatgtttcgatccacacatttgcgaccacaatttacctccgagtggagagttcatataaaattcaaaattggctgattttctcaaaaaatcgccttaagccaaagagtgcttcataagcactcactattccaagaatggagctgatggccattcttattggaatccgaggcttaaaatttatacaaactcaattgcgtcgagcaattgacattcctatttgtggagtgatt

SEQ ID NO: 28371 - DNA, 1037 bp, Heterodera glycines
ctacaacggtgccttaatggcattttaatgtcaaaatccttgacactagcgcatttctttagacaacgaaaattaattcctgaggaatttcccaaagccatgcgcagctttgttagaccgatgccgaaatggcaatataattggaaaaggacagacaacaatgcttttctttatatcagctgatggtttatttacaaaaatcgaaatacttcctgagtactttccaagaaccatgagaataaatatcgcactagcgccaaaatcgaacaagaacgctaatcatcagtatcatcttaattttcccccagtgatttgtgagtgataagaaaataaaagaaattcagggattaattcctgaggaatttccaaggaccacgtgcatcattgctacaacggtgccttaatggctttttaatgtcaaaatgcccgacactagcgcatttctttagacaacgaaaattaattcctgaggaatttcccaaagccatgcgcagctttgttagaccgatgccgaaatggcaatataattggaaaaggacagacaacaatgcttttctttatatcagctgatggtttatttacaaaaatcgaaatacttcctgagtactttccaagaaccatgagaataaatatcgcactagcgccaaaatcgaacaagaacgctaatcatcagtatcatcttaattttcccccagtgatttgtgagtgataagaaaatagaagaaattcagggattaattcctgaggaatttccaaggaccacgtgcatcattgctacaacggtgccttaatggctttttaatgtcaaaatgcccgacactagcgcatttctttagacaacgaaaattaattcctgaggaatttcccaaagccatgcgcagctttgttagaccgatgccgaaatggcaatataattggaaaaggacagacaacaatgcttttctttatatcagctgatgggttattcacaaatatcgacatacttcctgagtactttccaagaaccctgagaatatatatcacactagcggcaaaat

SEQ ID NO: 28372 - DNA, 2030 bp, Heterodera glycines
acttagaaatacttttaaaaagggattgaattttgattcttctaagcataaagttcagatcatttttcaaatttttcgatcggaggaggggttacggtgccggggaattaccgttataatccctttttggtgatttttgtataaatttattttcgaaatttttaatttattaattaaaaatattatttaataattttctaaatttatttaggcattaaaacaagtgctgcacaatcgagtggcgccctcctatcttgagtcaaagtaattttaattaacaaaaattaatttcaatattctcgcttcattatttttgaatttagcattcaacaatggctcagggaaggcaatttggcgaagtgatttcaattcgaaaattcaaaaaataatcaaatccaaatttaaatgcgtcccatttgtgcccagacttgatcagcttgtgctgtccggctgtggtgatttgctgctggacaaaaagtcgtcaaattctgctgcgcatgtgttcctcaatgagttgccaaatctgctggtactgtactgtaccattttgtttgtaccgtataacagaatgtcccccggatgagggttttgtccttgtccttattttattagtactggaaaaaaagtttcttttttaattaattctccttctttctgaaatatatttttaacaaattgttttaaaaacaatttggttgataattttgtttgttaattgtatttattttaattccgtattttatttattttttaatgattaattaattaattaattaattaattaattgctctttcagaatacaattgattccattcacaaggcggtgaaagatggtcaattggaattggtgaaggtgaaaaagcactaattcattaataaattttatgtcacttaactaattaccaataaaacaaactgattttattttttaatttaaaaaattatttaattaattttatttatttattgaaacatttttgtcaattaattataatatttaagttcaattaaatttaataatgttccaacaaaaatgaaaataattaatcaattagtaccttaataaataaaataaatggaaaaatttaataaaggccctaataatttgagggcatgatgaccggaaagcgtttggcatggcacgcgaccggcacgggtgcacgcccctgcacacggccatcattcacgaacggagcgatgtgagatcattattctgctgatcacaaggacaaaccgaactgatcagaactgctgaaaacagcagatagtggcggacaacaatttttgtttaattttgaaaaatcaaatatttaaattttcttaaataatgccaaaattataccgttcacaattttcaaaattctatattatgccgtacacaattttgaaaattttcacttgtgaaaaataaaaaataaatacgaaaataatcttgttgggcaaagatcgaaaaaacattttaaaaacaaaaatttaaattaaaaaaccgaaattttataaaatataaaaatctaaaaattttcaaaacaaaaatttatataatatttttgttcacagattatccgcttcattgctgcaacttatccgaatgttctcaatgcgcctgactatgtttgtatagaattttttttttaatttaaaatttttaagaataaacggaccgccatgcattacgcggccgctgcgcgtgacggcgggcattacctgaaaattttgggcaaagctggcgccgatccaatggcagtggacaatgtaaaaaatggggggaggggctaatttaattttaaatttataaataaaatatattttaaattaaaattttaattcaattaaaataattttgcaggaaggtcgagccccggactattatcgtagaaacaccgtttttgacttgaagctgttgaaggagcgcgacgtggaagagggtcagccagtgctaattatattttactctcttcgacactctcgaccagaacctggcccgggattttgcgagatcccagtggatttgcgggataatcccgcggga

SEQ ID NO: 28373 - DNA, 1721 bp, Heterodera glycines
atttgaaaatgtagaaatcaatggaaaaattaatatttgtatgtaagataaaatttttatatttttcatgaaaatgtaattcataatattattaaaggaaatatggcaaaattaagttgaataatatatgtcaggtttttcaaaaatttataaaattcaaaattgaataaaacataatgctaggcctgattaaaattttataattttgggattagttacggaatccggatttttgggtggaattaagtcaagaaagattttttagtgctttcgaaacgcgaaattcaaaaagagtaaaagtatggcaaataattttattttccaatgtaaaaaaattggccaaactctattttgcttataataaatggaaagtaaaaatcaatcaattatacaatctcataataatatgctagcatcagagtttttataaaaatcttattgttaattaaaatgatttggtgagaagaaattaaaaagaaaaagaaaaagaaaaagaaattaaaattattttattttataataaattttttacaaactaaagaaaaaaaaattgttattctttgcttatttatgattgaaaaagaaattttgctaaaaaattttttttttttgtacatttaaggcgtgaaatttcaaaattaatcttttaaaaatgaaatgttaaaagcaaaaagagaaaattcacaaagaaaattttatcatagcgtggaattgaattatttatttttaaaaattggacaaatatatattttttttaattgctaattttcttccggcaatttttagtttttttttcttcaaaatagcttaaatctaaattttggaaaaaaatctaatttttttacctagattgctaatttttcttctaaaaatttttagcaccattttggcccttttttgctgtttctaatttaaatttaataatttaaacaaattttatcttcagtttgttaatttgatgtccatgttttgcaatttttttccatatttcgtgattttgatccctattttatggtagcatatttggcgatttttcacccatataattggcaatttactttttttctagcaacataataaaataactctttttacacattcatcacttaaatttttattattatgatgaaacattttttcgcgcaatatcatctgtcagtttgacgtggtaaatttgtaaatacgtgggcaaattttatgcgttgtataattgattctaccttttttaatcataagcaaaattttctgccatattatcattattgtacatttcatttttaaaaattatataattttttttacaaatattttcaatattgtagtctttttaataaaaaaaattgagcaaatattataaaattctagatattcaaaaataaaatttaatcatttatttacctaaagtatggctccattagaatagggaacaccatgtttttgatgaatttgaagaaaaaaaaatttccagcctcctaaggttttttttcgaaaattttcccaaatttaagaatttcgtgatttctgatcaccatatagcagtgatctgctcaacttttataagaaaaaatgcctcttttctaatggaaataaataaaattagctcataagcataatttattattttataaattgtttaatttttttattcaagaaaaaattcgaaatgaaactcaaattctttttattagccatattaacagcaatttgtttaggcgttaaca

SEQ ID NO: 28374 - DNA, 1353 bp, Heterodera glycines
atgaagttttggtagccaaaaaaaatccaaacattaaaaatctataaaaaataaaaaatgagaattcatgcgagattttctggaaataagcttaatatggcatagttaagctgtaaaaaaaatttggggcgatttgaatgagaatagaaagagccaggttcgatgaagttttggtaagccaaaaaaaaatccaaacatttaaaaatctataaaaaatttaaaaatgagaattcatgcgagattttctggaaataagcttaatagggcctagttaagctgtaaaaaaaatttggagcgatttgaatgagaatagaaagagccaggttcgatgaagttttggtaagccaaaaaaatatccaaatatttaaaaatctataaaaaatttaaaaattagaattcatgcgagattttctggaaataagcttaatagggcctagttaagctgtaaaaaaaatttagagcgatttgaatgagaatagaaagagccaggttcgatgaagttttggtaagccaaaaaaatatccaaatatttaaaaatctataaaaaactccccataaatctgggcgcatcggttcggggggactgccccgaaaacaaaaaaatcgattttttcaagtgtccgtttggggtactcaaacaattatggggagcaaaaatccaacgcagaattaaagtacaggctatagggaagctattcccgaaggattcggtctccccataaatctgggcgcatcggttcggggggactgccccgaaaacaaaaaaatcgattttttcaagtgtccgtttggggtactcaaacaattatggggagcaaaaatccaacgcagaattaaagtacaggctatagggaagctattcccgaaggattcggtctccccataaatctgggcgcatcggttcggggggactgccccgaaaacaaaaaaatcgattttttcaagtgtccgtttggggtactcaaacaattatggggagcaaaaatccaacgcagaattaaagtacaggctatagggaagctattcccgaaggatttggtctccccataaatctgggcgcatcggttcggggggactgccccgaaaacaaaaaaatcgattttttcaagtgtccgtttggggtactcaaacaattatggggagcaaaaatccaacgcagaattaaagtacaggctatagggaagctattcccgaaggattcggtctccccataaatctgggcgcatcggttcggggggactgccccgaaaacaaaaaaatcgattttttcaagtgtccgtttggggtactcaaacaattatggggagcaaaaatccaacgcagaattagagtacaggctatagggaagctatt

SEQ ID NO: 28375 - DNA, 806 bp, Heterodera glycines
gggctcccggacaatcggacagtggacgttccgacagtggacaatcgggcactgaggacaatccgacagaggtggacaatcggacagtgggtaatccgacagtaaaatgcacaaaaagataagaaaatgccatcgccgaagtgaaccgattgtgccatatcaagaaaaaaggaaaataggcaaagaaaaaagtgcgaatgtagtctaaaacactatttcattgcaaattaatttgggtttggcatttcgtaaatgcctgttgcacatttgatgaatataaacgctttttttgtcattcctcgcacacaatgcctgtcctgcgtattatggcactagcggcccacttctgcgacggccttttcaatatcatttatcgtgggatacggttgggaacgacctcagacacggctgagaaaaacggcactaatccacctgaatcaatcactacgaaataatgcattcattaactgttgcataattaatactatattcataagtaaatgaacagaaacaataatccgattcgaacatagccgggacaagagcttatttaccattaattgatgctagattaaaaattcttttggatccctaatacgtttattagcataattttatataatctttaatatcatatgaaaatgtacagcatacgtaaaatatatgcaatgtctgatgtgaaggacccctaattagactaattcgacactttctatacagacatgtacctgtaagaaaaaaagaatttcaaatggtaattaaaatagtcaaccatttgctgggacattgctctcgattcgctcccg

SEQ ID NO: 28376 - DNA, 904 bp, Heterodera glycines
cgagaaaagtcggcaaattgaccaaattatgcgatcacttctacaggcaaaggacttcaaaatgatgctttttttaataaaatcctcctcagaatgtgattgatcagctgccgcttccgcccggctttgatcagttgccggaaaaggaactgaaaaaggcgcgggcgatctttagcgatcggagcctttcctttcaggtgcaatataaaagaattatgcattaattagccgctctaattggtcattaggagaaggaccgcaaagtgttcgaatttgtcaagtcccttccgtcgcatttgcggcgcattgtccgccccactcttccaccaatgttcgcgcgccttcgatcggacgtaattaaaagtttcaaatatcaaatttaaaattttccattttaaaatccacggatttttctcactaagacccaagcgaaaattggcgatttgctcgaggacgaatcattggacgacgcgcaaaggcaaaagcgattttggcaattggccaacggactgacggaggacgaaaaggcgacgctgggcgatgtgctgaaattttctcccgcttaagctcattttgccgaagggtcagaacaaaaaaagacgacattttggagttaaaatcattttcatttaatttaattttgtttcttaccaaataaaacctccgttccatggaatttggatccaatataattttaaatgttaaaaaaggcaattaaaacaaatattacaaaaaaacgaatacatttattgcattttaataatattaaataaaaaatataaattgaaataaaagatgtgcctattattgaatcgttggcattgtgccaatgccaacaattcatggaaagctttaaagctgaatgaaggacatcttaactcttttgtacttttcttgacccatt

SEQ ID NO: 28377 - DNA, 1483 bp, Heterodera glycines
  unsure (1)..(1483): unsure at all n locations
cgaagcaccgtaatttgaggacaaacagtcgaaatgaatgaatgggccaaatgaatgaattgagtgaattggacgaatgaattaataatttacggtccgtcccatcgccgaccgatgaatcaaaagccatggattgcctttgactgtaaaacgggagaagcaatgtgatggtcaacagaccaaaaaggggtaaaaaggagaagcatttggcactgtccgtgccgaacttcgaattcgtcactctttctctgatttttgctgaatgccttttggtgtcgtcatccatcggcttacctccgccattaaatttggcttttcctccgccattaaatttggcttttcctccgccattaaatttggcttttcctccgccattaaatttggcttttcctccgtccattcgttcgttcaattggctgaccaatgagtttctctctgatgaggcgacagatcatcccttcccatcatttgtgtatgttttcgacagatttgttgcacaaaaatgggaggagaggacaaatgacgcggtcgagagcattgggcgatcggtgtcatggagggattgcaccacaaatgccccaattcgcgccaggacaccccaaaatcccaacaaatccctcccctcagcgaaggccatctcaacagcttaaaaaatgctgcagcaaatgcataactttgaattgtattccgtcccattgtttgggtgaccaattaattaattgaccttttttttgttaatcgatgataacaattaggacaccctttagagcagagatcgcatcaaaaattttccaaaataagcatatcactgatcagagaccaaaaataatatttttggagcattaaatgcggtgattataaataatttgtaaattattcgattaaaccaatttaattttgatttaaaatttaaacttttggaccgacggtgtcgaaagacgccgcagggaagatttttgaaattaatgcgatttgttaacaggttttcaataaaattggcaattttaaaattaagtaaaattaatatttttttaaattatttttataccaaaaccgaagaaatatgtataataagcacgaatattccaacatggatccaggtcaaggtttttttttcaaaatgtaagctctacaaagaaatacacccccccccctctccctaaggattgattttaaacgtatgaacttttctaaatcaattttatttatttattaattctgcatctcccgtagttttataatatttgtgtgtgtattttgcattttgtgatttttaaaatgcanatattaagggtttttgtttaatatacaaatgattgtcctaatgtttgcaattaacaattaacaacaaattgctcacttccgaatttgacttggcattttgtgcagcgaaagcgccgaaagtgcgtttgcatgcgatggcggctgagggaggacgaatgacagaactgtttgagacaatgggagcagcgaaaagtgcctg

SEQ ID NO: 28378 - DNA, 1143 bp, Heterodera glycines
gatttcaaaattttcaattttttttagtttaatccattcaaaacggttcaaaattcaataaaaaaaaccttcccggggggaaaaatggggtttgaaaagttttttggggaaaaaaagactttacaaaataatacccctgggagaagggagtgggaaacatgatttcaaaattttcaattttttttagtttaatttactcaaaccggttcagaattcaataaaaataacattcccggtgcgaaaaatggggtttgacaagtttattggggaaaaaaagactttacaaaataatacccctgggagaagggagtgggaaacatgatttcaaaattttcaattttttttagtctaatctactcaaaccggttcagaattcaataaaaataacattcacggtgcgaaaaatggggtttgaaaagtttattggggaaaaaaagactttacaaaataatacccctgggagaagggagtgggaaacatgatttcaaaattttcaattttttatagtctaatctactcaaaacggttcagaattcaataaaaataacattcacggtgcgaaaaatggggtttgacaagtttattggggaaaaaaagactttacaaaataatacccctgggagaagggagtgggaaacatgatttcaaaatttttgttgaaatatttgtcgtgctctgaagggcgtgggagggggggggcgaaggcccaccacgaggccgcgaagaggccgagtgagtaccttcggtgcaggaaaattattaaattttaaaattttttaattgctttttaaatatgccaaaaaatgtaggcttaacttttttagtgaaaattcgatcactcatattttttgctaattgagcagaagcgtaccaaactatgcagggatactccccggtaaaggactaacttacactgaaatgagcgccgagctagctggctcaaaaaaaattttcgaaaatctgagtctttcgtttttatttattttttgcaaaattaattcataaatattttttcagaaagggttctgaaacgcaccaaattttatttacaagttaataaggctctctgatgctttttctatcaataatggaggtgaaaaaaattttaaaaattttttaattgctttttaaatatgccagact

SEQ ID NO: 28379 - DNA, 997 bp, Heterodera glycines
agtctttcgtttttatttattttttgcaaaattaattcttaaatattttttcagaaagggttctgaaacgcaccaaattttatttacatgttagtttaggcactctgatgctttttctatcaaaaagggagatgaataaaatttttaaaaatttttaattcctttttaaacaggccaaaaagtttaggcttaacttttttttcagaaactgatcagaagcgcaccaaactttgcagggatactgaaaggaagagaaataacctattttaaatattatctagtcagttcatttaaataatttttatccaaaaaatttttttttgggttttcggggcagtccccctgaaccgatgcgcccagatttatggggagaccgaatccttccggaatagcttcactatagcctgtactttaattctgcgttggatttttgctccccataattgtttgagtaccccaaacggacacttgaaaaaatcgatttatttttgttttcggggcagtccccccgaaccgatgcgcccagatttatggggagaccgaatccttcgggaatagcttccctatagcctgtactttaattctgcgttggatttttgctccccataattgtttgagtaccccaaacggacacttgaaaaaatcgatttttttgttttcggggcagtccccccgaaccgatgcgcccagatttatggggagaccgaatccttccggaatagcttccctatagcctgtactttaattctgcgttggatttttgctccccataattgtttgagtaccccaaacggacacttgaaaaaatcgatttttttgttttcggggcagtcccaccgaaccgatgcgcccagatttatggggagaccgaatccttccgaatagctccctatagcctgtactttaatctgcgtggattttgctcccataattgttgagtaccccaacggacactgaaaaatcgattttttgttttcgggcagtcccccgaacgatg

SEQ ID NO: 28380 - DNA, 688 bp, Heterodera glycines
taataagtaaatttaaaatatgtcaaatttaattgacctttttggcgtttgaatgctgagagcaattcacaattttcaatgaatccctatcattattacatattatgtgttgattttgtaaatggtgtcctctttttacgatattttctactatttttttcaataaaaaaccgattttaccatttttctttaaatcatggattcaaaaatatttctgggcaaaaaagaaattggtgtatagagtttctttcgtacgtgtcccaccgctggttgccggtcccgcgaccgtgcgtgtgcgcatgggcaagtgggggatagcgaagcaagctcggccgcggggtccacggcgaaataaaaggaaacggggccggcgagcaaccgcacaacgacaatgccgagcgtatttgctatataggatttaaaaattgtgtttgatttttcgctggggtgtaaaaagagcgagggatgggtgacagaggagcgtactacccatgcactatttcacctagtgctatcgtttcttttcttctttctttttttggaaaatgatcgctccacgtggcaagatgtcaaaggagcaaatagtaaaacgggattaggtttggagaattatttgaatttgttttttccggacaatatttggcaagatcccgcgattttttgaatttcatgtgttggagatgttggg

SEQ ID NO: 28381 - DNA, 1476 bp, Heterodera glycines
tgagacgccatgctgattgtgtaaatcataataaaaaggcccctatgtataattctgcctttcctataagcacaatgtgtttgatgggctctacaaaatattgcttgtgcaaagcaattattttcttggaggctgtaattttctgtagtcatttgatatgcatctgctatttttctagtcacaaacaccaatatttttcggcccgaattttataggcgtgaaaagtactgatttccaacttctttctattcggatacacccaaaatttgaaaagcatctgtaattcagcctcttttaaatcttaattttctgaaacccgaatttagaaaatatgaatgtatttctgcgacgccttctatacttaattcatccataatgggccaaaaatcataggttaagaccaaaagagggattttagtttcagccggaatttctataaaaatgttcgtgtgtaacctatctttatctattcggataagtaagaaattgaaatattcgtattacttttcctcccttaaagctttataatgaaagcgtcgttgtctatttaggatttgccgtcgcaattctgtaattccactttggaatccaaaggaatttgattcgcttttacaaaatagacagtgccgaaatttgtagatcggctaaaccttaactgaaacataccatatcagcgagacgccatgctgatttgttgtaatcataataaaaaggcccctattgtacaattctgcctttcctataagtgatgggatgcactggttgatccaatcaattaatttaatattttatttgggatggggcgacaaaggacacaaagtggaaaatttggtagatttctgatcacaattgatcaatatccgcgatgcttcgaatgcccgagttgtgatgtattcagagcgagttgttgtccggcttgatgagtgaagagaaccgatgggctagcagagtgaattggttgaagcatacctaaactgaaaacccttcccctttttataccaaaaatttttggttatttaatagcattcaaaatttacacattatcattttatggttttttcatttctaaattattttttatcgttttatttttttctccccttttatttaagaaaggaaaacttttcataaacaattttaattgcttttacgttcaaccgttttattgtggaataaatttatttattatttggggcgttttattagattattttttagtttttattgcgagaagcattcgcttcgttttttatgaattcattttgttttatttatttattttagtttacttttattttatattcatttattaatttaattttattttaaaataaaaaattttatgaaatgtttattttattttggatttatttttattaattattttgtatttttcagataaaattcttattattttaatttggttttgtttttattaatagttttatattttttcggatttaatccgacaataat

SEQ ID NO: 28382 - DNA, 842 bp, Heterodera glycines
ttaaagcagggttcctatcgaaaatttttcaaaatcagaatatcggccttcaaaaatcagattttggggtcgaaaatcagaacattttgcgaaattgcttcaaaacagttgtttttacattctattaaatcaaaaacgtactagttattatatttttcaactcccataatcgattttaacaacatgggaggaaataagcaaatcgtaatttttttagtgcattcgggatcaaaaaaccagatttttacaatttttttgtgacacatttttccaaaaaacttttggtggaggggagagggtccggcgccgccgggaaaaattttgtagttttaatgcgatttgctaacagatttttgtccaaaaaatgaccaaattttccgcaaatcttatgtttccttgataaatagtgaacattctgccataaaatttaaaaattatgagtttatttaagaaatcagaacaaattttggtcgctacctcaaaatcagaacatttctgataaatcagaacagatagaaaccctgggttaaagcaagagaaaatgtcgagacggccaaaaaaaaatttcgggtggccattctattcataattgaaaggataagcaattaaccacacaaaaagcagcgaaaaaacaagatgaagctcataaaaaagtttactagagaaaaggagaaaagttctgtaattgatctatataaccaaaatatatcacccaactgatcatacaattttatgtttgaaatggaaaaacattttaaagagtgcgactttatgtagcgatttttttaaggatttgttgaataaaatattttattttttacaccaagtcaaattttataaaa

SEQ ID NO: 28383 - DNA, 1160 bp, Heterodera glycines
attctgtgtcttccctgtacaccattcgttgtctcccccgccagggctttcatttttcggtctcctttttggcgaactcctgaagagagaatgggcgttcgttcgttctttgctttttgctttggtttccccattttctcatttcatttttccttttcccccaattcattcgttatttttgttatttttatggtaattcttgagcatttaatcaattaattaattaattctcgttttgccctctctttgcaattctacaaaactttgaaaacaaattttgttgacgtttttaaccaaaaattgacgaaggaaagggcagaaaaaggtggcagcggagacgaaagagtcagaataaatcgctgacgaagtttgaaacattaattattttcccatttgctatgacacagccctatggaacaaaaattcggggacaattttaaaaaaagtcccaaaaataattcacaaaaatatataaaataaaaaatataaaattattggtactttcctgttttgaaggtacaccctttttaaaaaaaactgcaacaaagagcgttcaatattaatagacttcttttggaggcataaaagcaacaatttctgccaaaaatttcctcaaatgcatcgacgttacgtcgcttacagtcctcgggccaaagaaactcgcataaatacgaatacaacatttttttaatggtgtgccttcaaaacaggaaagtaccccgacttttgcgcctcgacacttgcgccgccctaaaaaatccaaaaagttttatctaaactaaattcagcatgtattaatgtggcttatatccttggcaccaaatctgcctttgctgctgagtagggcattgacaaaaaccaaaaaataaggtgtctatcgttgtaatttttttttgaatttcttttaattgcttttttgttggtaaacagcagtttgagtaaaatttgatggaaattgctaaaatattttaaaatatatttttgagtgagtgacgcaaatgtccacttttgctggtcgaggcgcaattctccgcggcgcaaaattaattgtaagacaagcacattttatcacatctttagtgattagcaatattcaaacattaataaaatacagtatccgagttcatttgttaatttatgggtacggtattcacacggat

SEQ ID NO: 28384 - DNA, 908 bp, Heterodera glycines
ataaattaaataataaatttaattaaagttaactcatttttcatcgcaaatttcattaaaaatttgtgaaattttcccggcggcgcctatcggcaccgccggataggcttttacttaataatcctgtagaaattgagtcaaaaactgcgtcatttggtcaattttagacaaaatctgttaacaaaccgcattaaatttcataaaatttcgcaccaggtatggcacggaaagacttccgatttccgacatttttggggtcggaattccgacttccgaaatttttgatgaaaagtcggaaatttttttaatttttttttcaaaaaactagtaagttttgtacaatttctgttaataaattgaactgaaatttttaaaaatttccgcggcgcctatcggcaccgccgtaccctcctccacgttcccaaaaagtttttgaaaaaatcgcgctgtaaaaaacgtgtaaatagttgatttccgatcaactttttaccgtcggatccaatcgaaaaatcttagtcgacccatcagccccttttaatgcatcccgccagcccctaaaaattcatttttcagcatttttttatttttggaaattttttgaatttaattgaaatttttcgaattttcaaaaatcccgcaatcccgcacgggatcccgcaaattttaaatgcgggatttgcgggattaatcccgcgggatcccgtcccgcaaaaaaatttgagttccagtcccgcagcgggatccgcaaaatttgaaatttccggtctctactagaaatcactattttggcgcttcgtaacttaaaatagtgaaaattcactattttggcattttgtcattattttttagctatttccacatttttggaaatttcttaacaaaaatgcaataaaacccaaaaagcaccc

SEQ ID NO: 28385 - DNA, 1834 bp, Heterodera glycines
  unsure (1)..(1834): unsure at all n locations
tgaaatcgaagcacgcaaagaatgcaaaaacaaagaattcctttaagaaatttgcaaaaaatgcgatttctacggctgtatggacgaggtggggagtcaacgaagtgtttgttgccgtgccggtcactcgtttcgttgctgttataatgagccggttcgtggtgttccaaattttgtgatttttaatcataaaaaaaaattagacacctccctctaagaatggaaaagttttctaaaattttcgacaaaaaaaatgaaaaatgtttactgtatttggctcccatttttgacgttttttttttaataatttttaattaactttttttctacatttttttgtttgtttgtctaaaagcccgagccaaactttataaatttttttcttacaaaagaaaaaaaatatttataaaaattcaaaataatttttaaatatttttaatagattttttgactagcatatttttgcgaaaattttgaatgaataacatttgttttcacttttcagccacgcattacaactactaccacggtaaagagctggaaatgttaattctttaattattgaaatgaatgactatggctaattgatagtaaattgttaaacaaaataatttcattttttcagacaacgttgttctcaaaattgttttcaactaaagaaataattgatactttaaattaaataaaaaattaatatttatctcaaattattaaaaaaaaaattattattattatttttattattttcaaattattaataaaattcttatttatttaaaattattaagttttaagattattcttttttaaattgaaatatccaattttcagacacttttgtccacagagacaacacaaacgaccaccacaatgtaaagagtttcgaaacatatccattagggatggcacggaatttcaattccgacttccgaagttattgataaaaagtcagaaatttttggaattttttttaatttttttttntaaattggcatttttgtacaatttcttaataaattgcactgaaattttcaaatttaatgacataaagattctgatcattaccattgaataacttttgaagcaaaaaaattgaaaacatttttgaaactttgcttttctcctttcacttttattttttggtttagaatttgaaaactcagcctattaaagatttagaaatttctattatatttttcaaaaatttccaatttccaaaaatttttggggccttggaatgccatacctgatatccatgtcagagaagcacttgttggattatgatttttatttttaagcacacctccacctccatcttccattggactgccactgtgggaatgcgtgctgaaaaacgcttgcgacccgtttggatttgttttttaaaaatatttttacagaatgtcaggggtcgaaaatttacaaaatttaaaatattatggtttattttcgacgaatgaaagcaccaaaaacttttttcccacaataatttttttttttgtgtttgtaatgtttttgattatgacacaaaagtgaatttgttgaatttttaaaatttttagcaaatattttgtttttaaaattgagtaaaaagcatcaaatttttgttttttgttgaaaattatacattcgtagtaaaaactcaattgttagatatatttataaaaatatttttaatattggcataaataagaatttaattcaaaaataggggatttttttttattactataaaaaagttttaaaaaggtaaaaaaaatttttttgcgcatcattagttttataataaaatttgtttctaattctcaaattcatttttctcantaataatagg

SEQ ID NO: 28386 - DNA, 1823 bp, Heterodera glycines
ttgttatcgttctaaaattgataaaatcaagcaaaattctttaaaactcattgaaacacgaaagaaaattacattacataaaagtgaattttaacaattttgtttttgactttttgttcgagtccgggattcgaaacaggccaagttgaatgccagatttacgacacgacctcgaaacccccctacaaacatatttcacgattttttaaaacgaaaattttctgccaaaaaagggggagggtatcatcaatcatcaccaactcaacgtttatcctgtcctttttccagcttgctcggctttgtgttcatcgccacgatggtgttgatgatgctcggttttctgctcgtcctttggtcttccttcagctacagtcgccctttgtaagttcttaccgttcgctttctctgctcgaccattgccatcctttctttgtcaggcacattgtctacgcttgtctcggggctttgctctttatggtttacttggccatcgacattcaggcatttttgtattgaatttttgtggaacatttttgctttaaaagatgattatgggtggacgcaaatacgaaatttccccggaggaacacatttttgcggcgatcattcttttcatggacattgtccaaattttctggtttattttgtccatcttcggtgaccggtaacttttccacttttttcttatttaagagtttattaaggagctgagagaaaattgcgcaccgcgaatcgatgaaagaagggaaaatgagaagatattttgaacctgtgaaagtaaaactgtactgtaaatttcattattctcgatcttgatccatggattcttttttattaaaaaaccggtttattttagttttattttattctttaaattttataggctagcagaagagagactgtgcaaaagggtgtgaccagacaaatccctgggtggctgaatcccgttggccatgactttaattaaaataaattatgcaacggctaattgttgaaggaaattttactaatgattttcgaaaagaaaatgaatacaaatttcgcaaaaattaaatgaaattcaattctcaaaattcttaatataatcgaatttggtactttttaagtttaggggatacttttaacatacattttcaaatgcctataaatgtgttttagaaattagtgaaaataagttttaaagggtattgggggtcgctgatcacgaatccgggctcagatcagcgctaccgttcgctacatgagctgtacagggacaaagaattgataggcttacagtagcaataataccctcattggcaagatgccaatgaggatatcgttcatacaaattttctaattttatttttgttcgagtccgggtcaggggttcgaaattggcaaaaatggatgctgtattcgtgatcagcgacccaaaaaatcccttaaaacttattttcttttgacgccctttttcactcgtcctttcctttcctttttctacgagtgattgtctgctcaatcgattcttttctttgctttgcttcgcctgtattcattatttattccccacttcctttttcttactccgttttcaattaaatttattcacttcacttctttttgtttcttaagcaaaatcaatttgctgtattttacatatttcgtctaattttgaatttaaattatgaatcgcaacaaaattaattaggccatatatcatcaatttgacaaaaaatgcctaaggacaaaacgccaaaaaaccccgctaatttaaaaattttatcgagattttcccttgtaaaactgaagagccgatctcgagtaaaaacttagttccataa

SEQ ID NO: 28387 - DNA, 1026 bp, Heterodera glycines
  unsure (1)..(1026): unsure at all n locations
tcttatttntgagaaattttatacgttacaaatgctctccagcatgataggaagtgcggtgcgcaatcgccatttagtttcacagagaatttttaaatttatcttatatccaagaaaaatgactatctcttattttgagaaattttatacgttacaaaagcgctcgagcgtgagagggagggcggtgcgcaatcgccatttaatttctcagagaatttttaaatttatcttatatccaagaaaaatgactatctcttattttgagaaattttatacgttacaaatgctctcgagcatgataggaagtgcggtgcgcaatcgccatttaatttcacagagaatttttaaatttatcttatatccaagaaaaatgactatctcttattttgagaaattttatacgttacaaaagcgctcgagcgtgagagggagggcggtgcgcaatcgccatttaatttctcagagaatttttaaatttatcttatatccaagaaaaatgactatctcttattttgagaaattttatacgttacaaaagcgctcgagcgtgagagggagggcggtgcgcaatcgccatttaatttctcagagaatttttaaatttatcttatatccaagaaaaatgactatctcttattttgagaaattttatacgttacaaatgctctcgagcatgataggaagggcggtgcgcaatcgccatttaatttcacagagaatttttaaatttatcttatatccaagaaaaatgactatctcttattttgagaaattttatacgttacaaatgctctcgagcatgataggaagtgcggtgcgcaatcgccatttaatttcacagagaatttttaaatttatcttatatccaagaaaattgactatctcttcttttgagaaattttatacgttacaaaagcgctcgagcgtgagaggggagggcgggtgcgcatcgccatttaatttctcagagaatttttaatttatcttatatccnagaaaatgactatctcttattttgagaaattt

SEQ ID NO: 28388 - DNA, 934 bp, Heterodera glycines
ttaatcaatgggaaggctctgattggttttttcgatttttttaaaaaaattttaatcctaaacccctttaaaattataccctgttccagggatggtcttaacaattagggttaattggtttttttaggcttgggctgcactttttccagccaggcccatttttctcgtttgtttttcctacgaaatttactttgggcgcggtgtcggcgatgccaactccaacacggcgttccattcccggcgccattcctcctccgacagcaccaaacccgacgccaaattgttcttggactcgtgccaacgccaacgccggtagatggcatgttttcggctcccgaatttcagcacatcgtgcagcgtgttgcgccagttcagctgccggtcgtggacaccccaaatgccttaatttggttgaacataatgccaatgccaaattaaaaaaggaattaaaatatttggaaaatttcttggcagttttgtcaataaatgtgatttgataatgcaaaattgaacaggaaatttcccagttttgacaaaaaatttatcctttttaggaatagccatgaaaatctttgaaacttactgaattttataacctaagtttaagaaaaaaaagcctagacttaggtctggaggtttcatgtttgaactgggtccaaatttttgggcaaaaaaccaaaaaaatcggggaaaatccatccaggtctgggtcgaatactctattttccctccccatttttggtgccggtccaccaaccaagcgacgcggcatggagcagacaattgccatcgccggttgtcaccaggggccacagccgttggttgctgtcatgttgacaccaccaattcaaatgtcctgcaaaaaggggaaattgagggattcggatgtaaaaagaggcaaaaatgggggaaaatcaaaaaataattggtaaag

SEQ ID NO: 28389 - DNA, 1478 bp, Heterodera glycines
  unsure (1)..(1478): unsure at all n locations
attctccgactcttttgcccgtgcccaaattgcatttttcctgggcccatgggcttaatagtaaatccctttttaatttgttttgtctctttcagcggacgaagagttcgacgaaaatgggcgtgagacgcgggaaaggatagggacaattccgaacatcatttgcatgctaaggtttgtgacttggcttcatccattcattcaacattgcttttttggggaaaaaaaacaaatttttgaaaattgaggggttgaaaaaaatgcaaaaatttagtgtattttttctgataaaccagtgaccagaaaagttcagaaggcagcttattcatatcatatggtttagccatattttatcaagatcttttttcaattttgcatgctagtaaaaaaaagaaatggccaaaaaatgttttaaagttttttttgcaactttacgaagttttttttttgaaaatttcagtcaaataaaagcaaacttttaaggctatcaaatgatatccccacctaaaactgaatttgtcccttcgtttctaaaaaaattcccttaatacggtttttttctcactaattttcccattttttcgtccattttcagaatggcttccactccgttgctcggctatttggtggtccacgagcagtatttgccgggttgcattctctttgtgctcatcgctttcaccgacattgtgcgttacattttttagggtttggtgggggtcggtcctaaggacggacgatcgtttttgagggaggcaggtctccgccgattgggcgacgccgtttgggcgccgccgattgggcgcgggtacgattgggcgccgccgtttgggcgccatgcggcagccaaatttttcgttttcatattatccaaaaactgaaattactacaaaaatttctagccattcacctgaattacgagaaacagcactcaaaaaacgtaatgtttatggggttaaaatctatttgagtcacaaaattccttcatgactctttttttaatggcatgggttctcgaaattatgccctgtaacttaaaatttgaagctgtccttgaatttaatgtccttgaaaaagaattcgagaaaaacaattattttatataatgtttttaatcatctacattcttttgaatagattttgngacaacaaaggttgatttgatgaaaaataaattttcgtcttttatttgaattccgggccggggaatcgaaattggtcaaaatagatgtcagatttgtgatcagcgacctgaaaaccccctaaaaatgtttttaaaaataatttttttatgggttggaaaagtggatacataagtaccctgaaatcttttcaaaaaatttttcctggtgatcgggaaaccgccggaaaccattgttcccaaaaagttttttgaaaaaaacatacggcaaaaaagggcccatggcgggaaaagaggaaattgaaggacaaaaaagtccttggaaatttttaaaccc

SEQ ID NO: 28390 - DNA, 1802 bp, Heterodera glycines
  unsure (1)..(1802): unsure at all n locations
tgcattttcagggccccggagagaataaattacaaaaaacacagaataaattaattgatgcaaacaaaaggatttatttatttgcaaaataaagtaaaaatttaaaaaaaaatagaaaacaataaataaaatctggtactaattgaatgtactttacaaattttagaaagaaagtcaaatgaaaatattatcaaatattgcagaaaataattgttttattggaacggcatcattcaattggatgccgtgaaaatctacctaattttaaattttattctaacaaatccttccataaaattaaatgtatataaaatttatttataaaattaaaataaataaaactaactatgacaaaaatatcgctttgaaaaataaaatattcactcaatataaccgtaataaacaatgatgtattaatttacggattattgggggaacaaatcgcaagcaaattgctcgcgaaatgatgagtagcccaaaatttttcaaaatcagctctaatttatgtttgtactttcttgtatatatttctttaatttttatttttaaacgtaggaacaaaaaaatcaatgcaaaactacgcacaaaattcgtccctgggggcaccgccttccatcgattttcgttgctcattctccattttttggttggttggcaaatggaaaaagaattgttgtcatcctccgtttttcatcataatttaacatagagttgagtgggaccgggaccaaaacacgggcaactgagtaccaaggtcctggttttgaccagttttgaccgggaccgggaaattcccgtttttcccggttttttggcctttcagtcccaacgaaaaagtaatttgattaaaaaatgatcaaagctctttttacgctcgatcccggccctagaagcgcttggtgcgttagattaaaaccttaattttatgctatttccagaaatattagaattaaagtaaataaaaagaatcccgattaaaaagatgcggtaatttagataattaattatattttaaatctgttgtaaattatttntaatgaatttgctaaaataaaaataaaattataaataaaggaaaataaatgcaataaactaaaattttattgctgaagttaattgtttgctaaagttttacaaaagttatgaaaattttatttatctttttttaattgactaatttgagatcagagaaaccgtcgcattaatcaaaaaaataaaaaataaattttcaaattatatagcataaatcttataaaaatattcatttaatacaaattttataatcaaataaaagagaaaaagcaaataattagattatatgattttttaaaaatctttaattttattttgactgaatattactgattaaatacaattttttaaaaaatcaaaaatctttgatgttctaagcttcaatcgaaggcatatgagcaagtgaattaaaaaaaataaaacaatataaaatgaatttgaataatatttacgaaaaaatattcttaaaggcaccacctttaatttattatcattgtcaaatactttttcggtgcactaaaaataaaaagtcgagacaatggctataaaatcttcggccaatcgcttaattttgttacggcaacctttaatcgggaaccaaaaataatgactgataaataaatggaataaatttatctaataagaatatatgatttacaaattttataaatatgtaaatccattttatttttactactgcattaattctctcgaactatactaaaacaacgggaaattaagattaaataaataaatattcaaagataaat

SEQ ID NO: 28391 - DNA, 1340 bp, Heterodera glycines
agcacatgggtgagtactcgatttccgctttccattccctgacgtccaatggcggagccaatttgctttccaatcggcagcaaatatctcataagacttctgaacactgcgccaactcccgctccacgctgatagggcaacccccgataaatgttgtatccaccaaattgcacacactcggacgagaatgtggaccaatccacttgtagaggatcaaaatcaacatgcatctttaattgatactttcgctgttttgttattatttatattctttgaaaattatgctttttataaaattgtttacaagcttatcaggttgcagctttccaaagtgtaaaaagctgacaattttttcaaaggtcattccaacacatcgacagtacaaaaagaaaatgacatgtcgaccacacgcacttgagttgggagactgaagtggaagagagctatattcaatttgtttgtagcgtgacaaatggtcaacaatgtgaaaactgggcggtgtccatatccccaatgagtcataatactccaaatgcaaaggagaagcgcaataaatgcacacccaatgagaaccatgagatgtgctggggtcaagattcaccaccatacagtgtggaaatttggcaattgccccggctggtatttggtctgccgcaaaacagccaatatagtagtggcgagtcacgttgtttcttgtcaatgttttgtcaatttccaacgtgttcatcatttaaaaataggacatttttctaaagtgtaatgttaatgtacatgttccgtattggaatggcatcaagatgccgctattggtacggatctcaatcagaatttcagaaacctcttttgataagagcttgtgatactgtatggcaaaaaattgttcttcaactacttggtctgggtttccgcgtatggtcactatgcgcaacactggggccgtcacatctccaatcatcattggttcaataagatccggcgtgtaaacgtggaatgatgacacaccaccactcatgtccggcgaaaaccttgcctcctttgcgggctgcataaactccgtgttgttgaaaccgagaatgtaggcaagttgaggcgagacttcgacctttttaacgtaccgtgggtcggtgttcagaacaaagcgatttctatggacgtcatagttaaattggcaaacaagacgtatctcacggtacgcctgaatccatgcttccctttccatttcctttgtggcttcgaagatcgtacgttcctcttctgtcaaatttttgatttcggcggtcaattttgtcatgcccaattcatccagaacggtcaaatttttgtcacttaattttgaaaag

SEQ ID NO: 28392 - DNA, 971 bp, Heterodera glycines
agggacgcaaaagagacgatttaaaagcgattcgaaaattctatcgactgatataataacgatgcagtcgcggcgttgacaactgagatggaaccaaaagttccataatatctttccataaggctggaaaggcagaatttgaatggccagtcgatatttacactgagcacccgttgaagcgggtgatgcgaagccatagcaaactgtatttttaaattctggccgcaattctaccaaaaacgtgtttagaccgcagtaactcggctcagagtgaagattaagggacgcaaaagagacgatttaaaagcgattcgaaaattctatcgactgatataataacgatgcagtcgcggcgttgacaactgagatggaaccaaaagttccataatatctttccataaggctggaaaggcagaatttgaatggccagtcgatatttacactgagcacccgttgaagcgggtgatgcgaagccatagcaaactgtatttttaaattctggccgcaattctaccaaaaacgtgtttagaccgcagtaactcggctcagagtgaagattaagggacgcaaaagagacgatttaaaagcgattcgaaaattctatcgactgatataataacgatgcagtcgcggcgttgacaactgagatggaaccaaaagttccataatatctttccataaggctggaaaggcagaatttgaatggccagtcgatatttacactgagcacccgttgaagcgggtgatgcgaagccatagcaaactgtatttttaaattctggccgcaattctaccaaaaacgtgtttagaccgcagtaactcggctcagagtgaagattaagggacgcaaaagagacgatttaaaagcgattcgaaaattctatcgactgatataataacgatgcagtcgcggcgttgacaactgagatggaacccaaaagtccataatatctttcccataggctggaaag

SEQ ID NO: 28393 - DNA, 1152 bp, Heterodera glycines
  unsure (1)..(1152): unsure at all n locations
ttttatcaattaattaacntggattttgaccaaaaaatgaccaaatgtcacaccttttgactcaattctacaggattaatgtcgatccaatggtgtcgataggcgggaaatttttttgcaaattctaggtgaaatttgagataaaaattgaatttattttgattgattttattataaatttattcaaaaattttggcattccgtcttttaaattttcaaagaatgtaatgcggatcctgccggatcccgcacaaaaatcaaattttcggatcctgttgcaggattggaattcaaaattttttgccggacctgatccggccggattaatcctgcaaatcctgcattttccaaaaaatgcaggattgcggactgggatcctgcaaaatcctgcgcaggatccggtcctgctccgggctctagtttttattgcatttaataatttacaaaacgccaaaatagtttattttaggttctaaaaacaaagaaaatagttgctaacaaatagagaccgcattttgaggcatatgcctttttttctgcgcacagtttcgatatattaagccggaacgggacgattcggtgccgccgattcggtgccaggatgggttcactgccagtacttttctgcaccaatttgggttgaagtgtcaacgttgacatgaaatgacgaacgtgccatctgcgaaaacatcagtcatttgtgccgcccattcactgtgtgacgctctcccaaaaataagaatcctataaaatggaaagcacgtcttcagagaaaatagttaaattttaccggtgaatttgaccgttttctgcatatagtccggaatcagccacaaaaaattttctgtgatattttctgatcgctcgtattgactgtaggccagaggaatttggagctctgcgatgctagtcgggactgccaaaagcacattttcagcctgtctcgcgcgcttcacaacctatgaatttttttatgctatgcaaatcgaaataagaaaaaaactttatttgttgcgtctttatccggaaaccgagccaaaactggagtaggaacattgtcaagtgttatagaccgtaacacagaatggctctccatcgtttcatgcgcacgtttnttcagcgatgtcgtaagtgttgaaactttgatgtttt

SEQ ID NO: 28394 - DNA, 2326 bp, Heterodera glycines
  unsure (1)..(2326): unsure at all n locations
acctcctcagaaaaggggggataattagagactggccgtttagtgtagagggattatttttcaaaacacctcgtagactgtgggataattggagactgcgggattaatagagactgggctataattagagcatatacggtaatttgtaaaaaacgtaaaactattttatccttcttttgtaaaaaaacctaaattttgcatttaacttttataaatgtttatattaattttgattatatgaaattaaaaaattaattaattaaattatttataaaatcaggccgaatttctgacacatttgccaatggagaacacggaacaggccaaggtggcggcactccgaatattggagatgggcccacgggtggcaattgtcacgttggggccacggggtgacaaaaatacatataaatattttaatttttaatataattaaaatatttttataaattttaaataggcgcaattgtggcacgacgcgaacacaacaatgggcatgtaaaaattggtgaagtttcggcgccgaaagtcactgctgtggacacaacggtagaaaaaattattatttttattattattattattaatattttaatgcgaattattttcatttacaaatttaaataatgttcaatttaataaattaaagaaaattagcatttttaaattgaataaaatttgcttataaatttactanataatttgttaaattttctaaattggtttaaatatacaacatacaaataaaataattagaaatttattattgaaaagaaataatttttatttaaaaattaattctaacttttgcatatttaaattagattaagaataaagaataaataatttacaaatatatttaaatagattttttaataaataaaaaataataataatttttaaataaatttaattctaaaataaatttaattttccaaagggtgccggcgactgtttctgtggtgcgttggcccactttttggtggcccaaccgtccgctgaactgcttgaagaccacgtgcgtcgggctgtccaaattgcggcactttctgtccagaaaaagggcacccaggccagctaccccacacgggacgagttgatcacaatgggaatactgcaggattagagaaagagagaaaagcaaaaaacaaaaacaatcgatcatgacaattctaccgtattaaatttgtgtgtttctaccgtattcattcattttcctgtgtttctaccttattcaatttgtgtaacctaaggcctcgtgtacatagcccgagggcatggcaacccgagggtggcactgaaatgttttgaaaatttttaaaaccaaatttatttgaattttcctgacggcaacgatggacacacccaattaaatcaacaatttttgctaaactcatttcaaaaatgcaccgatttgatccaattttgttatcatatttttggttgataaatcgaaatttcaaaaaatttatcccaacgattttcaataaaatttctctgacaacgcctacccgtgacctttaccacattttttttttaaattgctccctggacttctaccataacttgtttttttttatttgtatttatttataccataaaattatataaaattatttggcagcgccatttttgtaatgcttcaaattcattttnanaatttctcnanaacnnttnaacaacaattcttnaanttaacctcaattaaattnanaattttcannaaaaaaaaaactaatttctnctctcttantaattaatatttttaattattccanaanctaattnttantccaaatacatcatcatcttatnctaaatnttttctnctnatcttnccttttcnnttttntttcaatcaattttnttattttcaactcnntccaatcnnanncatattcattaaataaatttcaatttttctaaaataaaattatttcnaaatttttattttatttattttttttttctnattcattncnatttattccattaantacaaacaatttttttaaaacattttccatataattatataaattaaaanncatntttaatcatcctcatcatataattactcttcactatnattatcataaattcaatttatataatcatcataatttaatcctccacctnccccattttntctaattccacctaattantnatcaaaaaatacccaccnccacccnatactcnatcacnctcaaactcattcaaaattnnntcntttntcaaaacatctcaaaacnnttcnncnncnnnnnatnnaatnatnnttccccaggtaaatttttttcctgatttatggccaaaaaacggt

SEQ ID NO: 28395 - DNA, 738 bp, Heterodera glycines
tggcctggacctggacctggatccagaaaaaatccaggcctgaatccaggtccaggccgatctctaataattatttttaactatcttaaaatggtgacgtatttcgttgctttttattttagttttttaatttattttttaattatttctttagaattgcatttatggaacaacggaaggcagccgaaactgaagacattccatcgacgaggccaaaagaggcggaagtgtcgccgccgcggactccgttgggcattccgccggcatttgtcaaacggtcggtcattttcattggcattttggagtcaaaagagacaaaattgggcaaaactaagggccaataatgaccggtggaatgaattattaatggttggcccaccaattccctcctttcatccgtttggtcatccctcgtgccaatccctccccaatattcttttgtcttcatttttatttttaatcccatttccaaattggcccatctccccccccccccgcccccttttgcctcgccctttcccttccctcccatcggaaacatttcatttctctcccccaattaattgctctttccccgaatttcgcattgagaagcgtgaaaaggggcaatttgcgtggcatgctgttgaagtcactaccaaagatgaaatgctttatgaatcgacagggaaaggaattttgagtaaatgacgaaaaagggggagagattttgaaaaggcgggggggggggaggggagg

SEQ ID NO: 28396 - DNA, 1943 bp, Heterodera glycines
  unsure (1)..(1943): unsure at all n locations
atgagcggcatcgtaaaatggcattgagggatttagaaattaaaatttttcanaatttcgatataattatgtatgtctaaagaaattttatttggataaagagaaaccaggtaatcctacatttgcatttaaaagttaagtagtaaagtgtcaaaaaatttttggcatggtaaggcaaataaattagcttaaaaaatttatttagaattttcaagaatctcccagtggtaaaaaattctacttttatgtatgattcttgtcactattaagtctcttaggcacaaaaaagcaacgaaacataagcaataggcacaataattatcaaataataattaagaaaaaggatgaatttatttttagattaaaccaagatttcttttttaccaaaagcatataaaagccgattttttatggtatcattagttagcatgcagacaaaataatttaggatttaaaaaattattcaaaaagggtaaaaaattctttttaaaagtttcacatttaattgtttttttctgaataaaaaagattaaatattttatttattataatttttaaataaaataataacaattatacattatcttcaataatttaatattgtttttccaaaaaggcaaaaatatttatgaagatcggaaaattattaaaattttagttgaaattgttaacagattttgtcaaaaattggtatttttggcagaaatctttcattcttaaaggtgcactttttcagggtgcatttttcagtttttccgttctgttaaggaatttttataaacatccaggaaaatccaaaaatggcataataagaattatgataaatgtcgtaaagtaaattgtaaaatttaaaaaatagctgagaaattaacagaaaggataaaatttaagattcatatatctcaaatgatttttttgttgtaaaaaatggaatttaaaagaataattatgtaaaaaacgaaaataaatatattttttaaaattttttacttgctcaagaaagtctaattataataaaaacttctttgaaaatttagataaaaattaaattacgctaaaactgccaaatgaaagtttaagtgttcgtttatgaaaaatttagtaaaattaaaagcgtaacggcattaacaaaattccaaaaaaggctttagcttttccactgacaacaatgaatcgtgttgaatgaacagcagcagcaccgaaaagcacttcccctaacccactaacccaatcaaatcaaatcaaatggtcgaagcgacggacggacggatttccgtaaaaaattcacacacacaatttgttacaccaccgtcaccaccaccaccaaatggggggggggggggagttcgccgggggctgtcatcatccgccgatctgtccgtcccgtcccgtctcccccctccccgtgggggatggactcgtcagttttggtgtgattgggaaaaggttagtccctcatcactccagggatggaacttaccccccccccctccatcccatcggaagatggcggggcccaacaacaacgtgcggagggggggatgtcccggtaagtgcggatgataaaatggattcttctaggagggtggattattttgtacaaaacttatgttagaccgttattggaatatgctcctgaggtttggaatccatctcttctaaaaaacattaaaaaaattgaaaaaatgtcaaaaatatttcaccaaaagagttcttttcaaatgcagccttccacccattccataccaacaaagattagaataccttcaattgccgacacttgaaagcaggcgaaagctgtctgatctgttcatggctcataaaataatttatggccgaacagatctgaatcccctttgaaatacttaaaccttctgaacgctttaaacatttcccttttatagactttaactcgaaatataaatttaggcaaaaaaattata

SEQ ID NO: 28397 - DNA, 608 bp, Heterodera glycines
aagccttttggggctagttcaaaagtcgcatcagcgaccattatccgacaatttcttgctgcgtctaagttatgttctgcctgggtgataaccaacttttccccgccacgaataactgccctcgcaaccattggcttaatttttttttcttgtttttgaagtgctgaacattttgagcatgatatatatgtatctgcattgttttcattcattattcggtattttcgccaattgctcccatttccgattaaataaacagtatgtgttagatcacgggagagacacttttcaaatttcatttctaatatgtttgggctttcttcgtttgctgtgtcagaattagcactcttaattttacaaagatatagtttcaaactacgtaatgccaattgaatcccattttttgttagttcaacatgtaattctttaatagttttgattcgcttttctcggtaattttggagcagcttcattgcttcttgattttcaaggaagtcctcgaattttgactttatatttgacgtaaagtcaatgaagcagaggctaaaaaaaagtatcaaacgtagacttttccttctaaatattttaaaaatttaaaatttaaaaat

SEQ ID NO: 28398 - DNA, 885 bp, Heterodera glycines
aaacaaaaaaatcgattttttcaagtgtccgtttggggtactcaaacaattatggggagcaaaaatccaacgcagaattaaagtacaggctatagggaagctattccggaaggattcggtctccccataaatctgggcgcatcggttcggggggactgccccgaaaacaaaaaaatcgattttttcaagtgtccgtttggggtactcaaacaattatggggagcaaaaatccaacgcagaattaaagtacagactatagggaagctattcccgaaggattcggtctccccataaatctgggcgcatcggttcggggggactgccccgaaaacaaaaaaatcgattttttcaagtgtccgtttggggtactcaaacaattatggggagcaaaaatccaacgcagaattaaagtacaggctatagggaagctattcccgaaggattcggtctccccataaatctgggcgcatcggttcggggggactgccccgaaaacaaaaaaatcgattttttcaagtgtccgtttggggtactcaaacaattatggggagcaaaaatccaacgcagaattaaagtacaggctatagggaagctattcccgaaggattcggtctccccataaatctgggcgcatcggttcggggggactgccccgaaaacaaaaaaatcgattttttcaagtgtccgtttggggtactcaaacaattatggggagcaaaaatccaacgcagaattaaagtacaggctatagggaagctattccggaaggattcggtctccccataaatctgggcgcatcggttcggggggactgccccgaaaacaaaaaaatcgattttttcaagtgtccgtttggggtactcaaacaattatgggtgcaaaaat

SEQ ID NO: 28399 - DNA, 1130 bp, Heterodera glycines
ttccactttctcttccgcttttctgttcctattacactttctcttccactttctgttcctcttccactttctcttccgctttctgttcctcttccactttctcttccgctttctgttcctcttccacgttctgttcctcttccactttctcttccgctttctgttcctcttccacgttctgttcctcttccactttctcttcactttctgttcctcttccactttctcttccactttctgttcctctcacactttcggttcctcttacactttctcttccacgttctgtttctcttccacgttctgttcctcttccactttctcttccactttctgttcctcttccactttctcttccgctttctgttcctcttccacgttctgtttctcttccactttctcttccactttctgttcctctcacactttcggttcctcttacagtttctcttccacgttctgtttctcttccacgttctgttcctcttccactttctcttccactttctgttcctctcacactttcggttcctcttccactttctcttccactttctgttcctctcacactttctgttcctcttacactttctcttccacgttctgtttctcttccgctttctgttcctcttccactttctcttccactttctgttcctctcacactttctgttcctcttacactttctcttccacgttctgtttctcttccacgttctgttcctcttccactttctcttccactttctgttcctcttccactttctcttccgctttctgttcctcttccactttctgtttctcttccactttctgtttctcttccactttctgtttctcttccactttctgttcctcttcttctcttccgctttctgttccttttcactttctcttccactttctgttcctcttccactttctgttcctcttcttctcttccgctttctgttcctcttccactttctgttccacttacactttctgttcctcttacactttctcttccacgttctgtttctcttccacgttctgttcctcttccactttcttttcctcttccactttctgttcctcttacactttctctaaaacaatctgttcctcttccactttctcttccactttct

SEQ ID NO: 28400 - DNA, 923 bp, Heterodera glycines
ctaaaaaaatttaaaaaaacttattttcacctattttggcgttttgcccaaaatttgttaacaaaaatgcaataaaaaagaaaaatacacccctaagaatcgaccagaaaattttcaaaaatgcgcccctaagaaatgaaaaatttctcaaaaatttatctccaaaatttatttattttattttcttgacgataatttttgattttgaaaattatgtatatccttaatgacttggcaaaatatttttgctttttgatgaaaattttcgattttacacccctaaattcggaactttttggcacctattttcccatttttagcacctattttgggggttttttagaacctaaaacctacttattttggcagtttttagcacctaaaaatcgaagccctagtcattaaatggagtttgaataagcaatcgtttccttgccttaagcaccgcagtgccgttgacactgccagccgcgttggtagcggtgcattggtaatagccttggtcgagcgcgtccaactcgaccattaccaatttcgatgacatttccctgtgccgaattcgaatccgccgactcttttccaccggcgcataattctttaaccatctgaaagagtgaaatgttaatttcgcattttccatgaaaagtcagcaggacgtgaattggacgggcagtggcgaagcggcgacttcgcaacgcatgcgaacttcgccgccgatggggcgagtggcattgctcggcggaacggtcagtcggatgtacggccgtttggcggacggagtgccatcggccattctgaaggcgtgcggttttagcaaaggtttggcatggatagtgagcattgaatgggaaaatgggacgcgacaaatgcccacaaaggcaaacatttgggcaaaaaaggggaaagggggggggggggggggg

SEQ ID NO: 28401 - DNA, 1726 bp, Heterodera glycines
  unsure (1)..(1726): unsure at all n locations
gtaattataatttacaactagagacattagtaaagaataatgctaaataaacaaaaaaaaacactatttnntaaaggttaatggctgactcttcggtggctagaaataaaaaaaatntaatatttttcattaaatcgtcgtaaaacataatcgaaaataaaatagagcttttgctaattcgagaataatctttcgtaacctttttaactcaaaaatatttttcgaaaatgaatcaacaataaaaaaaataaaaatatattcattaaaaagttatataaaagattaattaattattttatctaattatcttaatccgaacaccggcatctcaattactccatgaattgcaaacattcttcaataaaagacatgttttgagaatttttctaatcgggaattgtaagaaaattgctttaatataataaaaaaataaaaaagaatttagtatttttgtatatgaatatccaaactcacaataatttaaaggtatgaaaaccgaaaaggctaaatattattcatttttaataaatatgttctgagttttataaaaacaacattcttgtcctaagaacaacattgtgtataaaaaatattataaaaataatataaaaaattatctaaaattcaaatacagataaataaaaaatattcggcagaaaatatttaaattaaaatatatttcccagaagaatcgaataatcttaataaataaagaagaggtgtcatttagttagaaataaacaaaatctaatcaaatgtcaaacatataaataaaagtttacagaaaagataataacaaattttagataacaattcttaaattcttcaataagtaaatctcaattaaagaaaatagaaataaaagcataatttaggtaaaattcaataggacaatgttttattttcctttgtttaaaggttatatacaaaacttttaaaggaattgttatcataaataattaaataaaacaaaaaaagattcaattaactaagcaaaatagaacaactaaagatattagaaaaattaaattaaaattatatgcatagagtttttaattaaaaaaaaaattgatatgaaatacaacaaaaaccaaataggcggtaaccatgtgatattattttttctcgaatttttttaaatgttataatttaatatatgaaatttaatgatgcaaaaataatatcactcaaaaaggcgaaaataaatatttaacagctaaaatttattgaaaaagagaaaattcagaataattaaaattgttttgttgattttaaaattattcgagttcgccaaaaaaaataattatgaaaacaaaagttcttttggcaagacaaaaccaaatgtaattcaaaactcaaaattttaaaaagttttaaaaattgatcattagggatatcaaaaatatgtatggtcaaaatatgtaattatgtactataaaaaaaatttcggaaatatgcacaaagaacccaaaatatgtaaataaaaattttttaatggttttttatttttttgaaaaatgaaataggcacaaaatgcgataaaatgagctaaataggcttagaaacacttaagtatttgaaaaattgttttctggttattttttattatttcacaagaaattttataaatttttanaatctacaaaatatgtaaaaactatgaaaatatgtaagaaaaaattttgccgaaattttgngtttttttttgagattttcaaaatttctg

SEQ ID NO: 28402 - DNA, 1014 bp, Heterodera glycines
tttaaaagtaaatatacaaaaaataaaaacggttcattttcagttaacgaaagtgatgcaattccgacgcccaaaaatttcggaaccaaaccctggtttacggtatacaaaatcttttgcacaatacggtagctcacaaatcagcagctttgttaccaagaaatgccccgaagcttaagagattgcccattttattttatattaaagttaaataaacaaggcaaaattttgtgttttaatgaaaagaatcatattatgtaaaataaataaaatttaaattgttttttgtattcgggtcggaatttgacatcatttaaatgctaaagtttaaaaattgtaaagttagcggaccgggaaccggacccaacctggaagaaagccagtaaaaaacgactaaagcttgttcttcccggatcggtccgggttcccgattagggacttttggtgcccaaatggggtccgctgggcctcccaaaatgatcgatcaaatttgataaatttttgaccggtcctgaggccgggcaaatcaccaaacaatttttcctagttaattcaaaccagtggaatcataatcccgtctcagattcccagaattccgcatttttaggagtccgaatccggaattttccgctcccactgattttacctcgggtgaaacttcaataatgaaataagaattttgcaaatttttttaggaatttccatcggaaaaactcaatttgtctaacaatatttaaaaaaaagatcaaatatttaaataaaaataataatttggttgatggtaaatttattaatcaatgtaattaataagtaagtttaattagggaaagggtcattttggcgcccacgttttggcgccaagccatatataccttaaaagggtaaaaaattttaccttccaatgggcttactctaattttcaaaaaaaaaaaaattcccaaccccataaatttttttatttgatttttcatataaattatatatatcattcgattcgtctcgatgagacaaatc

SEQ ID NO: 28403 - DNA, 1055 bp, Heterodera glycines
gcctcaagccccgctttttagaccaacaacaacacgccgagtacatgaggtgcaatgcgcgaaaaacgaccagcctgcttttgtaaagaatggtttagatcgttgattaaatcttaagcaattttgtaatttgaattgacatctttatttttattttttttgctttttaagaatgcggcacaaacgacagtcgctagccgacacgtttgtgtccgcttcccccattttttaacttttgttttgctgccccccattttgtttcgggtatttttattttgtgtgactttaataaaaaaaattgggaaaccccaatatttttgtgaaaacgggccgaaaagtgggctggaggaggggcacaacggggaaaattggccatcaaagcctattttggctgaaatctaaaaaaagatgtaaaaagggaaaacagttgctaaaatgtttgaaatttaggggtgtaaaataacaaaattttattcaaaaataccaaaatcatgccaaacataccatgtttattggtatggtcattgtttaaaagtttttctttcacaaattaggaacttgcataaatcaaaaactaaatcggtcattgaaatcaaaacttatgaattgttcataaactcaaatttattttaaaaaaattcttgaatttttgcttgggacggagttgaccctttttgtattgggacggagttggcgggacggagttggctcgggacggagttggcgggacggagttggcgggacggaagttgacccgcttcgctctctctctctctctcctctctctttctatttctctatctctccgttctctctctctctctgtttctttccctttccctctctcctagagaaagacaaaacaactttttcttaaggaaaatattgtttcatcggagatcaacatttaggttgatattaattattaacaatgttcattttgccaaacaatgtataaaacaacttatttttaaaatttcgttcaatttttacaattttattttagcgtgaaatatcatttggaggagagataacgcaaaaatgagagggtgctg

SEQ ID NO: 28404 - DNA, 1331 bp, Heterodera glycines
atattttcttgataaaatagtgacattctgccataaatttcaaaattatgaatatatttaagaaataagaacaatagcccgaaataaggacaaatcttacaaataaggacatttttattttgtaagatttggaccctccaaataaggacaaatcttataaataaggacagatccgagctctgatattttattataaatttgtaatgtaatcctatttaataaagttgagtgtctgtatccgccatgctttgaattggcgtggcgttttgtaattgttttgcgttataaatgaatttgaaaaaaagaaatgtttggttttcgtttttacatatttgttttgtcagtttttgatttttgcaaaagcacagttaaaaatttcttttttttttgtttcttatattcatagtttctattgttttgttattagcatatgaaaagtttttgtttctgtttatgtaaaagattaaggaaaagaacagcgtagctttttgttttagtttttctaattttcggatatgattgtatggttgttatttttagtcttcgtttgtttggttttttagttttgtattctttgcatgaaagaagaagttgatgttgttatttgtctatttacatgcattgttttctgttgttgtataatttttgtaatttagctattctgccgcttcggcaatattttttttttgtgatgactgcaggtcagccatcattcaacagcatgctcagactgagtctaaatgcttcatgaaagtttgctgggatgactttgtttgggattttttttggctttgctgtttctattaagaatatttaatttagaaaagaaatccaatagatgaagaaaggacttattgtatgaacgtgttggattacaattggatgtgatttcattgcgtagttttggaagccattgacttttttcttactctcgaggaatgcactatttcagctttggatggtcgatcatttgtaagtgggttgggaagcgttatgatcagaatttgtttaatattttagcgaattagtgtctgttctgtgactttagtgtgtcatgtctttgataaaacattagtgtttgttgtttgagtttagtgtgacacaattatgtgtgtcatgtctttgataaaacattagtgtttgttctatgactttagtgtgacacaattatgtgtgtcatgtttttgaaaaaacattagtgtttgttgtttgagtttagtgtgacacaattatgtgtgtcatgtctttgataaaacattagtgtttgttctatgactttagtgtgacaaaaaaatgtgtgtcatgttttgaaaaaacattagtgttttgtt

SEQ ID NO: 28405 - DNA, 408 bp, Heterodera glycines
gcattagagccaatggcatttgtagagatcgacctggacctggatccaggcctggatttttcctggacctggattttcctggatttttgtccaggaaatccaggtccaggtctaatgtgaaaaaaaaatccaggtccaggtccaggcaaaacacgaaaaaacctggattttcctggacaaaattttagaatttattttttcaagtgaccgatgttttttcaagttttaaaaacagattaaataaatttaaaaacacattattattattaattagatatttttagaggtttataagcaattgattttttcaaacctttttttgatttttaaaatgagtttcaaaaaatccaggtccaggcctggatccaggtcccgaggaacctggatttttcctggacctggattttc

SEQ ID NO: 28406 - DNA, 945 bp, Heterodera glycines
  unsure (1)..(945): unsure at all n locations
actttttgggtggatgttgtgtctttttntgggcccccaaatttggccactatttaattggtcctcccccaacccattgccctaattgggttttaattacattttattgtgttgtgttagctgttttggtgtggtgtagtcatttgatattttgccgattcttatgagtgggcgtcctctgctgctgtgatgtgattagtcattaacaatttatttggggaggtccgccgggagaaaacgaaacgctaaacaaacgcaaaaaaaaacatataaatctattgtatttaaattgaagaagaaacattttatttttattttgttaggttttctggggattaattaaacactaatcaggtgacaaattaaaccatccatcactaattgtagtttatataccaattaggcagtaattgtcctgcctgtactaattgagccaacacgcacactcatttgaagcagtatcttcgccaattatatattttgcctattttaattataaataattaaattgcaaagtttttttttaaattttgctaataatttaaccaattttctccaaaatttactcgcaaattttttgttttgtttttgctttagtttttattgcatattattaagaactgagcttttctttaatcaattaaatatttttcatttttaaattccttacatttttaaaaacatttgtttccctttttgaatataaaatttttcaatttttttgcgcttttaaaatttattttcaaaaaaaaaaggaatttcttcctgcgaaattaatctaaaaaaaattaaatccccctgccttctgggaatggcattagtgtgccgtggtcgtggtggggctgtctgataactcactcactcgcaatccccgcccttttctcctccccgcccctccggcggggttagtgtaattagcgtaaatgccctgcagcggatttaaaa

SEQ ID NO: 28407 - DNA, 1024 bp, Heterodera glycines
  unsure (1)..(1024): unsure at all n locations
aaaaatgcattttgggatttatgaacaatggtttaataaccaattaatttccgaatacagtttgaaaactcagccatttgccggtccaaaanaattctattaatgaaataattgcggagggatttttttctaaaaaattaagctccgaactttatttatttattttcttgaaaagaatttttgattttaaaattatgtgtctcattcccattttagcacctattttgggggtttttataatcagggagcaaacaaacgttttttgctgtcttttttcaattttttgtgcctgtaatcccttaatttttatgcttttttccatgattttgccttttttgtgcttttttcatgcttattttgggaaaatttggtgctttttacagtgcttaatcggtgattttttgtgctgaaagagaagaaaattctaattttttggggtttccgtgtggtatcgagtatcgaagtcaaaatcggtatcgagtatatacatgaaataatgacaattctatgtaaatatttatgttatttcttttatttctattgttgtccaatttttcggtgtacttttttaaatcattttaaggccatttaaagtcataaattcaacagctctattgttatcagaatgctaatagagcatgttaaaagcttttaagtgaagccattttgttcaacttggcaatcaatcaacttaaaaatttgactggccagacagaattggccactccgccggcggaccagcgacagtttcgggggtcgactacccgacctattgggaatgtttttaaaaatatttaaaataatttattttttaacttatcgctgatgctaagccgctgaaagaagggaaacgttttgccaatttcgaacacaaacaacaaatccaaggccaaatacggtggcatcatagaaaagggccccgtctgacggataatttcgtaaaacatttccgaaggtgggctcggcatttgagtcttaaaaaaggaattcgtcatcattttttgtgattgatttaattaccgag

SEQ ID NO: 28408 - DNA, 1657 bp, Heterodera glycines
  unsure (1)..(1657): unsure at all n locations
caaatttaagcaacgacatttgaccctcgccggggggccaaaatgtgtaaagttagaggggtggagggaggttggctgtgtttatgttgttttatgcttttggacggattaagaagcgggcaaaatcctcgtcttaaattccaaaagctttgagcagcggatatgcccgggccaaagtttaaaaacggagacaattcttatttaaattttgggaatttagttaataaaaattttacaaattaaaactcaaaaaataaagtaaaaaaagaatatttaaaattaaccaaatttttaattattaacccgaaaattttcttaaatttaattgcatcttatagataatccagcagtgtttttgcggataaagaaattttaaacatttttctttgattgttttgcggcataatggactgttataataattaattcgaaattaaaataggtatattaaataaaaaagcatcggtgatttttttttaatatattttcccacctgggactggaaattttacgatgctcattacatctggcagcgacaggagcagcacggaattgcgctaaaacaaattcaaaaataattatttaaataaaaaggtgcttttaaaaatatttattttaattttaattaaccttttttgaactaaaaaatttaaaaaaaaaagatcaaagattcttaaaataaaattcattaacaatcaatttcaacactaatttggatattattctcaaattaaaggaaatttaaaatagaatttatttagaaaaaaatgcttttcaaaaatgtttatttttatttaattttacttattttaaattaaacaatgaaaaacatatttaattatttaggcgaaaataaatgcattaacaatcaatttcatactttaatttggatattattaaccaaatgaaagggaatccaagtaaaggttaattaaagttaaatatttttatttaataaataattaaaatattctttaatgacacgatagaattgtcgcagtccgttcagcaaatgttggaagtgccgtagacgaactgcttgcgaaggttggtgttgtgttgccacagtgccaccaccgccaccgccgttcactgaccctccgccagccgaggacaccccggagctcagactttcgctacgttccaccacatttttggccgattgattgtgttggtgcagtaacacaaggccaaccgtgtcattgcttgtccttaatgaaaatttaagaaaattaatttaaaaattaaaaaataatttcgctaaaaatttcagaaatttacacgaaaagcatttattttccttatcgttttggtggctgctcgagagtcaatattgttcaagtcgaggactaacagtaagaagaattaattagaaactcaaaaattaaagaaaaattttacccttcatttttgataaaaaatttcgcaaaaataaaatttttttagttttcttttggatcgccgccgtaaatattttaccaaatttgacaaaaataacttgatcgtcagtcactgattagcctttaattttcctaagacttgaaaaaatcaaaaattcacttttcccattgcatcaccaaaaggcaaatttaaatttaatattttttccanaaaataatcaaatgaataattggctaatgatattaatttcctcaat

SEQ ID NO: 28409 - DNA, 1345 bp, Heterodera glycines
  unsure (1)..(1345): unsure at all n locations
ctacantttcaatataatatgtttatgcatttgctaattgagggctcttttttagcgtcaactaattgcccaagcttaccgaaatcgttacgaacatgaggacctcgtcgataccattcgcaaggagttgcccgacgatgggcccaaggagctgattctggcactgctttacagcatgggcacatatgactcgatcagcctgcacaatgcgatgaaggcaaaaataaacaaatatatttggaaaatgaaccgtccttatttccaagaatgtccttaaaaattgactaaatcctctgcccataggagtaaaaatatgtcgatttcagttaattataaatttttgaccaaaataatttttgtactgtccttggatttaaaaaaaaaattgttgtattcttggaaatcagcctatctgtcgttggataatgagttcaatcgaaccctgattacccttaattaactttaggggctcggcacggatgagcatgtgctgactgagatattggtgactcgcagcaatgatcaaatacgcgccattcgaacggtgttttaattttttaaaatttattttataaaaaacatttttaattaaatttaatccaaaacttttttacccttttgttcattttaaggcatacaccgagctatacaacaggcagttggaggtggacattggcggtgacaccagtggcacgtacaagcgattgttggccattttgtgtgccgcaaatcgtgacgagtcaggcgtaatgaatgtggataaagccaagcaggtcggcactgtttcttgacactgatcggcttaattaattgctcagagaactcaaaaaaaaaagccaaaacagcaaaggcgtatatgcaatagataattcaaaaaataaaaaataatacgaaaaattattttttataattttgaaatataattttaataagaataaaaatttggcatatggatgcgcttggcgaaggtggggggggggagactgtgcgccttgactaaataatcatacgaccacccaatttttcccctatgacgtaacatttttggtttgcttttcgtcattgcttttttcgaagcggaccttttaagaagctccgtgcctcagaagggacaaggtgcttttccgatccttcggggatttaaacacggtatgagatgccccgattgggaaaacgctcgaaagggcttgcttagccatcgcggctgaatgggctgccccaccctctcgctttttcacgcccgaccccctgcggtaggaacacactacaacttccatgatttttctgaatcgggtcctaactgcttctccgccgctgcttacctgcgctcaaagaatagtggatg

SEQ ID NO: 28410 - DNA, 1145 bp, Heterodera glycines
aaaataccgaaaaaaggcaagataaagccttcaaattccggaaaagccttgaaaataccgaaaaaggccagaaaaagggcataaaatcccggaaaaagccagaaaatccggaaaaaggcaagaaaaaggcataaaaatcccgaaaaaggcaagaaaaaggcccaaaaatcccgaaaaaaggcaagaaaaaggcatcaaaatcccgaaaaagacatgaaaataccgaaaaaaggcaagaaaaagcatcaaaatcccgaaaaggcaccaaaatcccgaaaaaggcaagaaaaaggcaccaaaatcccgaaaacgcgtaaaatttaatcaaaaattaattttggtcatttaaacgattttaaatatatttatataattttttttaaataaggaaaatttttaaacaaattaaaaaaaaaagaaattaaaataaaaaggcatatcccttaaacatacaaatgttatccgcgtgcagtgcggattcatcgcgcatccggcggcatatcccgcttggtgattggccgtccgttggccttccttgagattgctctcttccaacatgttctgaaatagaaatcatttgattttaatttacaaatcattatggccattatttaagctcccatagtctctaggacttaaaaaaatacatccctgtgaaaaatgaaagattttctcaagaattcatttccaaaattaatttatttatttcttgacaagaatttatgattttaaaaattacttaactctatgctgattcggtctacgtcagttcggccccccacggttcggccccaatatgtttttccactataactttctataactttttttccaaccaaatccaacattgttggtatcattcgaaagcttaaggtgtttagaagctttttctaagttatttctttgcgattagacaattaccaaaaaagttatacatttttcttaaaaacttttttaaaagccagaaaatctttttgtttttaataaggctaatagagcatgttaaaagctttcaaatgatatcaagattgagggataaaaggttttttagtgcctattttccattttttagtgcctatttttaggttttttagagcctagagccaaactattttggcagtttttagagcctaaaaatcccatcc

SEQ ID NO: 28411 - DNA, 826 bp, Heterodera glycines
tcatgcatagggatcggatttttagtgataaaaaatcccaaaataattaactaaatagtgagaaaaatattccaaaatagtggcaaaaatagtggcgaaaaagttccaaatttaggggtgtaattttttaaatagctgttttttaatttgaaaataatttaaaattaaggaaaaagattttattcactgattgcagttacaaaatattttcttagaaaatattgaacaagaaaaaaaatttgggggaagaatttttgtgaaatttttccaattcttagggatgtatttttgaaaatttttaggtcgattcttaggggtgtatttttgaaaattttttaggtcgattcatggggtgtatttttcgtttttattgcatttttgggaaattttccaaaaaatgccaaaatagtggcaaaaataatgacgaaacgccaaaatagtggcaaaaaattattttagtggctaacttccgaaatagttttttttagtggcgaagctccaaaatagtgattcctagtgatgaatagtggcactaaaaacgaaaaattttcgaaaaagaatgtgtttttcgtgcatttctcgtcgagttaaagccgcagaaaaaatagttaaaaaactaagaatccgatccctaatcatgaatgtgaattttgatgaaaaatgaattttcgactttttgttcgaattcgggtccgggattcggaattggtcgaaatggatgtcagattcgtgctcagcgtacctataaacccctagaaacatgtttttaagacttttgaaaattttgaaaaatttttcaaaaaaggtgtcataccatctaaactat

SEQ ID NO: 28412 - DNA, 2331 bp, Heterodera glycines
  unsure (1)..(2331): unsure at all n locations
tttattggggattatgccaccantttttgcatcaccattattatatcaacattattgtgctttagccccccatacacgggcggaaaaatgttcggacaatccgccgcctggcttccctggcattgaattcatgctcccattactgctccaagcggtggcggacggtcggctgaccatgcagcaactcgttgaaaaactgcatgacaatccgcgacgaatttttggcctacccgagcagcccgacacttacattgaggtgattgtggatgaactctaacaagggaacatcccgaattgtaaatgtgttcgactcaacttttaaaccatttttatcgaacttttttttttttgctccggcgccagaagtgatcagtcagaaaaagtcgatcaaagttttgaagaatcaacaaaattattaaatttttaaaaattcatagccatcaactttaaaaaaagaatgatcagcgaaactttctgaattttggcaccaaaattaaacttttttttgagtaaattctaaaaaacccaaaaacactaaatttcaacaaaaaaaacaatcgaaatgcgttttgaaacccttcatctttttttccttggttttctaaaagtctaacgaaagatttttttaaacaaacttttggaagagctgattttttttaaacaagaaggctggaaaaaatgtgttgacttcacgaataaaaaataaattcccaggtggaaatgaacgaagtgtggacaatccctgagagcggtggctggagcaaagcagggtggacaccgtttgctgggcttcaagcgcgtggccgcgtgtgcaccgtggtcatccgtggccagcgcgtgtatgacgagggccaattcctggttgggcccggctttggccacaacgtgcgattgttgcccggcgccatggcggccaccgcctcaaatttgccatcgccgtcgccagcagctgaattgacggcagcagcaaagaaaactgacggcgccggcggaggcggcaagaaaagaggggtggcggcggtgacagccggcaccggtggtggcaccacaaaacggcacgacacgttgcgacagcaccaacagcaacgcatttcgcccgagctgagccccgaccggaccagcgttgtggggccaagccgtctgtacggccagaacattttgtgcgtggaacagtttgacaaggagacggtggagcaggtgttgaagctggccaagcactttgaggaggtggcggtcaaaatggcgggcgcggacggcgttgaacgcctccatccgtccgcgtttggtttcccgttgcgcgacttcagcgtcagtttgctgttctttgagccgtccacgcgcacaatgtgttcctttgacgatgcaatgcgtttgctgggcggcacggtgtccgtgttcaacgcggaacactcatccgtgaagaagggcgaaacgttggagggtgataaataattatttaataaaaacttggagccaaaattttttttttgaaatttaaaaaattttgagtttttactaaattttctttttttttatataagcatcagatcaaattaaaaagtgctgcttctcccttttgtttttgataatgcaatggatgtaaaaatgccgaaacgcgaaattttttttaaattttatcaatttgtttatcactcctaaattagtttaaatcaatatatccttggtttagtcattatttatatcaaaaatattggtcaaaatttgataacttatggtgaaaatgctgattgtgaggaaatttagatgatgtcatttttgtcagattttgtatcaattgaaaaataaaaattccactttttgtcgcaattttataaaaaagtgccgagaggaaagcggaatgtgtttaagtcctgtgccatataaaaaatctcacacctctctccccatacacagatacaatcatcacgcgttgccaccaatgcaccgatgtgattgtgctgcgtcatcccgagtgcggctccgcccgacgcgcctccaccgtttcgtgcggcgtgccaattgtcaacgcgggcgacggcagtggcgagcatccgacccaggcactgttggacttgcagaccatcaagcagaagttgtccagcgtccatgagaaaacggtggccatggtgggcgacttgcgcaacgggcggacaggtgagaggaggagaacaaccaaggggaggagaacagcggatttggccctgtatcaagttgtacaaaaattttgggataaaattcctttgtttggcactgatattgtgcaaactttggcgcatattcccaaaatttgggtcaaatttatggattttttttcattttaaaacggcaaaa

SEQ ID NO: 28413 - DNA, 1313 bp, Heterodera glycines
ttttcggggcctcggtctcgctcgtggggttaattgtcggtcttggttctcgagtctcagaaaatttcgactcccgagcagaccaatttctgtatctgtccatccaaaaaaaattttcacctgattttgaaagggttgtcgtccattggttgccctggacacagaacagttcagttttaaagcacattgttgaaggcacatttgttgttggtggcccgccgttgtcctcctccaaattgggcactgagacggtcaaagttgcggatggcactccatcgatggcattgaaagatgcctcaaagatataacaataatttgttgggtgggaaaaacaagaccaatttttattagggttaaataaattaaatatttcatgaaatagtttaatttactataaatgtatttttaaaaaaattgaatagatttttgacagcaaatccaccgatttggaccaatttgttaacagagttcgaatttaaaaatcttaaaattcacaaaatttgcttactaaaatactgtcaaaaaattatacctacataactttgcataattaatgataaaaatgaagatctttcaacaaaaatctttagaaaaatgcagtcaaatgaatgcccaaaacttccaaaacagttgtaagaataaaaagccaaccgaatgttggtcaatgtcaactcgaacatcaatgctttgttgctgttgattaccttctttaccttttgatataaataattatgtattgtttattaaattaattaaatttttattttattttatcgggattttgttgcgcgggaaaatgaaaatcgcgggggaattccgaattgctgactttttattgggagggaggtgtcacggaattttcgacttccgatttttagggcctcggaattccccatcccgaatatgtacacactttttttggtgctcctccaaatgatttcttcaaattctcgcagctcctttttccgactttcgaaatcgatgaaccgcgactcggtgaccggcattcggaacagcgacggttcggtgccttaatttggggggggggggcaacaattattctcgagtctcaattctcatgaaatcactaatattcaccaagataaccaatgaacaggttgccctcatcgctgagaagcgctaacattgatcgtaacgactcgctgaaaggtaattaattaattaattaattggtaagggaattgaattgaccccgaaaattgagaaccgaaaaagaccaaaaactcgagaaataggtacaataatcgagaaccgagactctcaaatgatcccgaaaatgaagatcgaaaaat

SEQ ID NO: 28414 - DNA, 1417 bp, Heterodera glycines
  unsure (1)..(1417): unsure at all n locations
tggatgaagtatacgacccctgtaattaaaagattttcttcgattattnttaatgaggaccagtcgacaacaaaaaaaaataaaaaaatgttgtaagcattgtgtggaatagttctggcacgctcaacagaacgacaggactggaacgggcgagtcacaacagatgcgtgatctgttgtgcggtgatcaatctccaaacgaagatgaactgcttgaaaccggcattgatcagcagttctattacccaaagtttataccaaaaaggatttttttttctgaaaaatgtttagttggttttttaattaaattatattttcggttttttcatggaatagtgtgaattttcatgaacctaggttttcataattcgcttgaggactcatggctgccatataagtgaggcctttgtactcctaaagtttgtattctttatataatttaattagtgcaaaaagataaatattgtgggaatatagtaatgtctcttagcatggcacgggttcgtccttagatgccaaatttttaccgggacttgaaaaattgaccggagcgggtcccgggaacgggctctataaaatatacatttttgatttcaaataaacgcacgtgttttttcaagtagaattagacgggcccgggtgcccgaccgggtcccagacccggacaccctgttttttcaaaacagggacccgattttttaaaatccaataccaatgcccgacccggtaggtaagggtccaaccgggtccaaaatagggtcaaattgttgaccaaagtttagtgtgaacaaaaaaaaattaatttaatttacaaaaattaaatttaataattatagtaaaagggaatcatttatctgctgggcgccggacttttcgacagtaaaaagtaattaagtttaaaatttaggggtgtaaaatcgtaaaattttatcgaaaaagcaaaaaaattaagcctaatcatatgttatcgaaaagaaataaataaaaattcgataaatccaaaatataacttttaaaaatgcacaaaaaaattaacatcttttaaacaaacacaagaatttcttattttcaaatttaagcatgccaaaagtaagtcaaaaaatggaaaattcctattatcgaagcaattttcttcaaaataatttagttttaattaacttatttgtagaatttttagaatttttttactttttaggtgcatattttgtaatttttgatgcatattttatgcgtatctttttaggattttatttgcatatttttgaacgccatataacatggtaataatttattggatattcagctgaatttattcaagaataataaaattaattatattgtttaaatttgatccattttaaattcaaataaaattcaatttcgcaataaatttttcaatattggtaacaatgnaatct

SEQ ID NO: 28415 - DNA, 1076 bp, Heterodera glycines
ttttggtaattgtctaatcgcgaagtgatacatagaattatattcgaaacatgttaagctttcgaatgataccaacaatcttggatttggatgccaaagaaaaaagttatagcgaaaaacataaaaatttttgaaaatctgcccacagataacacaagtacctattttttacaatcaggacgccatatttaattaaatttaaagaagttgggatttcccttgctttttacttggtcaaatattcttggtagaactcagcaacctgaattttcatttttctttttagcttgactataataattgaatgaaaatgcgattgcgaacagcgagcactcaacagcagaaaaaggtgccgacgggtgtcagaacggcggcgagggcttcctctacaactccgactccgatcagttcgagcagtgcgccctcccgggagttcagcagagagtcgagcagccgaccgccggacggcacggcgtcgcccctcttcggcttacagcacgaccgacagcagcagcaggggccgatgttctccgcctcaagtgtttgttactggtaaatgactgcgaatttatttgtttggattagagacatggttcgaaagggtcaatcttgaagttctagtcttagaaactaaaactaatcgtaaattgatttcgacatccccccccccccccgagtttattttgatttttttaacgaaatttattttaatgattttgtttcccttaagtaacggcgagcgtcaaatgggcaaccttgaggttcattgtgctctgtgcaagcgttggttccatcaaaattgcttccaagacttgaaggatttgtatggaattttttttatttgccaaatttaaaaaaaaattgaattttaagcggtggtctcccctttatggtctcttacgttttccattgtcgaaactgttcttcggatggtcgcgagaagtgggcaattaaaagtgcaagttcgtgttgtaccctactcgaaacactaacatttagaacattttcatgttattttccacctccccatttccgtttagtcaaatttttctaaaaatttccctctgcgttcttca

SEQ ID NO: 28416 - DNA, 802 bp, Heterodera glycines
  unsure (1)..(802): unsure at all n locations
ttttcgcgatttaaaccggttcaaaagccggtttaaacgctttgccgcgtcgttttttcgatggtttaggcgttttcagcacctaagaaaacctgtaaaagtgtttttatgcaattttgagtctggaaataaaagtgatattcgtgatcagcgtcacaaattaccctagaaatgactttttatttgaaaatttcagggagtcacaaaaccgaaaagtattctattcaattggaaaaatattccatacccaccaaaatcagtaccacaaattccattcaaagtacaaaatttttaaaaaattacaatcacacggatgcgctccgcgtcagccgcgtccagtgccgtgttagcattcgccgccgcgttttttgccgcgttcagtcgctgttgtgccagtttaaatgccgcatccgcagccgcgagttcggcgtccgcgtcgcgcttttgttcccaggccaattccacgccagcgactgttctctcaacattttgtcgagccgacctcagcttcatatccatttcaattaatatttgatcagtgctccgatccaagcctcttatcaaaatgccaaaggtcacaaataataattataattggtaaattgatccggaaaagcaaggttctcgagcaaaaaaaataaattaaaaaaacatttaactgagaaaaattttttaaaaaccaaaaaactgttcccaaaattcaatttttattataaaataattcagggaatttttatgctatttccgaattgttttttcttctatatntcacatatttttatatttatggatatttatcatt

SEQ ID NO: 28417 - DNA, 1810 bp, Heterodera glycines
  unsure (1)..(1810): unsure at all n locations
ccaaaattttcattttttcaattaaaaaaaaattaattttttgcattagggcgcccgaggttaaagcttgggctcaagcggtggccgatttggggcgccaaatttgcacaatcgggacagtgactacaaagcggaacggagcgcggaacatttccgcatgcaaatcattgagccaaaagtgatttcacatgcgcacattccgggtgagtgaaattattgaaactccgacatagccagggggggcctaacctaaaaaatccaattttaagggaaaattgattaattttcaaaatttaaaaaaaggccgtgatcaagagggcacctctcacttttttccccagaaaatttaaagtaaaagattttcagtcaccgattgaaacaacaatttaaaattttgaaaggaaagtttaattaattttaaaaattttaccgtcaattgcaattcattaaaatttaaaaaaaaatttccctgcttttcccctgtcaacaccgctggacacccaactttcattttgtttatatgtcaaaatttttaaaaataataatttaaaattttttaattaaacaagcacgaaaagtgctaattttatggatttttgggaaatttaacgaaatttcaatgttatttttctcgtcaaaatttaaaaaataataaaaataattaatgccaattttaagcgcacgcaacgcgcgactacgccagacgccatctgatcaccgattttccctcacttcacggcaaacgttccttcatcgaccttgaagcgattgaacagcgtaaacttcgtcaacaacgaaaattgccggaggcaaaattcgaaaaaaaaatttttttttttaataaaaaaataataaaattccatccaatgataggccggtgatcgtgatcgggatttggacaaattcttgaaggttcgagaagataaggagcaatggaaaacgccgtggcccgcgccgaaggtaggaaaattatatttaaaaaaataaaattttttaaatttagcccgaagacgaatcattgcgcgagttggaccgtcttcgtcaggtataaattaaatatcattttcgatcaaaaaatttttgaattttttagaatttataaaattgcaaatatgttctaaaataaaatttgtatataaaattttctttagtttaattaattaattagaaatttcttattaaaaataacaattaaataacattattttttaattttaaattttgtctaaattaaaaatatattttttaaatttaatagcttaagaggcgcttatcacaaacaaaaaaagaatatattaaaataaaattaaaattcccataatttctcataactgatatgaaattaaatacaattaatttaattttatttattttaaaaaatctgcaaaatataaattaacaattaaaagaaaatccctctttcagaacattgatcagctgcagaaggtcagcaatcgctttgcttttgctttcgttttacgctttttcgcttttgcttgtatatatatattttttttgcgggcatttcaaaaatatttaacttcggacggcacattctcttaaatttgaattttttttccaaatttggcataatgtgtccttttgggccaaaaattccacaggcatcgatgcgcagaagcaaatcgttgaacgaattgcgcccggtgaaagcatccgcaacaaaacctgaacaatttacattaccgccactgttgccctcgaggcacaaaattttggaggtaatttttttttaaattttttttatttanaataatttttaaaccgaaattttacaagcattgaatttcaa

SEQ ID NO: 28418 - DNA, 1186 bp, Heterodera glycines
caaattgaaaaaaagtccatcccaaacgatgaaagcggcacgctgccgtaggcatttgttgtttaaaatgtcaaattccggcatttttctctggttcggagtccaatgaacggtccccataatttgccgcaatatcaaaaaattacagagtttttgaattggaatatttcggtaaattattagccttttttcggaaaagtaatgcattaatttgtaagcacaggaggattctatgatccgcttctgttccgggttaaatagaattcacaattttctgcgtccatttgccctttgctcaatttaaattgtcagacaaatcattttgtttcaataattttgttttcccttttgtttttataaattcaattttttcaaattgtgaattgccactaatttgagaagatttcggcggcacaatttcctcgttttgcccaatcagcagaagcaaacacggcgatgggaaggggggggggaggcgatgtttggacattgaaaacggaaattttttattttcatttctaagaattacttttattacaattttaatttttaaaaatatttgagtttccattcatttttaaattaaaatagaatttattttaattttattaaatgctttttttaaggccttaatcgaccaataatatactcaattttcactttcaatgcaaaaatttgaataccaaaaagcaaaaaccgaataaatgcaaaaaagagaaattgaaattgaagtgttccttcgggaattggcacttacattatgcccatcttagccttcgttcggttgtttaatcatcgttttggcatttccatgtgccgcgaaagacaaagattttatcaaaaaatgtcaattctttatgttttgttgatgaaccttgacctcttgagttgacattttgacacaaaatttgtttccatttttggcaatttattttggagtcattcgtatgcatttgttttgatgtacataaaaataggcattcaaattcttgacatttttctcgacaaatctcttccgcgtgccattccattatttttccctttctcatttattttcggcatttcacttatgccattgacaaaaacattgcgtgagcatgaatcacttcatcatcacacacatccacaaaacaattcatttcattctttattattgaatgactgtggtcggccatgggacggcgga

SEQ ID NO: 28419 - DNA, 1289 bp, Heterodera glycines
aataaataaattttttaaaaaacggaaaagggtaaagaaaaattttaaaacgcaaagaatgtgttcttttttatattgtttttgagcctctggacccagtttaataatacctatttttgcctatttttgggtttaaaaattgtccttattcaaaaaaaaaaattaaaatttttaataatttcatttacaattgaaatataagcaaaattaagttttttgactaagttttattggtttgttatataaaatcgttaataaaaatggaaactctagtcatctccataatgtcatttaattttgataaaattttttttattaaattaatgtttttttgcatatattgatattttgatgaatattttatatttattttattcatttgcatattataaggcttttatgggcatattcattgcttaatgtagcaatgtattggccaacaatttaagataattaataaaaaatatataaattttcattattacgttactttatttatttgagttctttctttaataatatgaatataaattctttgttcattttactaattactagggaagtttctgagagtcaattgagattaagttgaataattttctaataagataatggtaatataatgtcaacaattacacatttagaagtaattaacttgtgatttatgctgatgaagctcttcattagtttattttcttctgtttttctctttatgccatcattttctacaaaaaatgattcgctaattgactcctctaatcgttctgctgctgatgctaatttgggcaatgttttgccatcggaaaatgatgatgattttgtgtcgattccgatcaaaactgatcaaaaacaaattgatcaatttcttgaagaaatttatgacgaatgtggagaaaaaaaaggagaaaaatttggaaataattaacaaaatattaaaaattagaagaaaaaatgataaaaaatcattgaaaacagaggaagatgaacaaaaaattaaaattgttcatcaatttattgaaatgcaaaatgaatttgacgaaaatggaaaacgaaaatatgaaaatgttaatgaaattgcgaaaattattggtgtaacacattcaagaatttaccattggattgataaatatggattatcacgtaaaacaatttttaatttaaaaaaatgtaataaatgcattttgtttatttaatccaatttaagatttgaaaaaagacatacaaaatgatcgacgaattgcaattgttcaccaattttttgcaatgcaaaaggaatggacgaaaatgga

SEQ ID NO: 28420 - DNA, 1734 bp, Heterodera glycines
  unsure (1)..(1734): unsure at all n locations
tatgataatttaatagctagaaatttttgaacaattccctattatgcaaacagcagaattaatgctcctaataaattagaagacgctctttttttaatgttgtttagtctatcagagattgaaaaatttatatctgaacgaaacaaataattggaaatattttttctaaaaaattttaatttttaataagtattacttttatttggtagaaaaaaggcataaacgaagattgattacattttcagaacgagggtctgcctttggacgatcatccgctgattcagcattttcatcgcattttgactgccacattcccctcccaaaaaaaaactatttttttcttaaaaaattatcgtcgcctggccaaaaatcgtaaaaatttggcagtttttggtcaaatttgataacaaattgcactcaaattttcaaaaatttttccccagcggtgcctatcggcgccgctgccgcccccctttctcctcaaaagtctttgagaaaagcgtgccgcgaaaaatgtttttaaaagcaaaaaagtgatcaaaatcaatctcactctgatcttgaaaataattttaatgatgtaagactttttttttattttttgcttgtataaaatttaaaaaattatatggaaaattgaaaaaccccgaccccgagcgattttgtcaaccccgaccctgaccccgaccttgctgaccccgacaattccgacttttccaaccccaccggtcgggggtgcaaccctagtttaaactttgaactgattcaaaaaccatttatattgccgctgacttttttttgacttttctgtcgttttcggcacctaggcgagaaaaattatgataaattggaaaattatttttacgagagccggggaatacgggcatcttttgaaacaggggaagaacaatctaataattttcaaatctttaaatgaatttgactcattattttgaagaattttttattttagatctgtttgtgactgcaaattcatcatgtgctccaaagagcgagtgagtggaaattatgtaatataatttaaaaaaagggttaaactattttaaaacaatcgaatcctgacaaatttggtatcgttctaaagctcttgagagctaggtctaaaaatcagggaatgaagtcgagccgatgcaaacccggactcgaacaaaaaactcaaatttaattttcgccaatatgaattatatgtcttgccttcagaatactattttctgtttatttcatgcagactaggcctaagcaagcctaagctgaatccaaggcctaagctgaatccaaggcctaagctgaagcctaaacctcagttgtcccagtgcactgatggcgtcggctgggttcatttcctgatttttagactaagctcgacaagagctttcggatgtaccaaaattgtcaggattctatcgttaaaaaaagttagagtgcncaatctccccatttttcgagtgttggtcggttcaaaaaccggttttcacgggctgttcattacagtacacccaaaatttttaggagcgtattcagaaaaaagtaaaaaacactttttttattnttaggaatgcactcgtaaacggggcaacagtgatggatggtatttatttgaggtgatattcaaattaataattattttgtaaattaaaattctctaaaaatttgtttatgcagttttttcgtaaaatataatttacggttttttttatctgaaatttatttttg

SEQ ID NO: 28421 - DNA, 581 bp, Heterodera glycines
ctgtaaaaaaacattttatgccatattatttgttaaggaacagatgcagtcccatgggctgtatccttcagaagcactacaggatccatcaacgcgtgcttcacaaataaggcgcaaacagtttactaagggggtccgtgctccggcaaagggtgcgccgggacagccacttgcatgttaccattgcggcggaccacacctcgtcaagaattgtccaaaggtgtttttgagcttaaaactataaatcaataatgttttaagcggcaagcaaaccccaagtgctttaaatgcggggggtccggccacaaagacgttgattgcccaatggcgttcaacttgggtaacactcgtggtattttttaaattttttttagattttttgttatgcgaattacattaagcaggatgctacaactgtgggggtccgcacaaggatgcacaatgtccggcacgcagcaactttccatcttatgccggcattgatcgagatcgtaggcgcatgtattgcacttccgcattcacaaatcttttttattcaaatcaaaaaaataaaataaaaatggtggagggagggggggggg

SEQ ID NO: 28422 - DNA, 1012 bp, Heterodera glycines
  unsure (1)..(1012): unsure at all n locations
caataattgttaagttttctagaaaagcccataataatgtgcgttaagcaaaagtttttgaaaatgtttaaaaaaatcaacatatcgatcggcggcgcttgtaaaagtttgccgtttttgggtcagaaattgtcaaattctgcccaaatggacacttttggtatccgcgggcatctcagtgccatcacttaccattgctgctactgcgatttttggtctctttggtttttaccaccaaattgtccggcccgattagcgcgagatcagcgtgacatgcctttttgtcccaactgttttccgactcggacataaacacctcaaaatgtttttgttttaattatattttacatgaaaccttaattcacgtatgtacaaataacatttcgtcataattaatcatttaattaattaatttcctggtcaattttggtgcccagttggtcactgtcatttttcgactctctgttgtggaaaagcttttgcgaatgttcaaatgggactaaatgaaaaaaatgatggcagtgaattaatttactctttaagcatattcgatttatatattttatttccgtaaatacattttttattttttgacttttattaatttaagtttataattgcgtgccttttccgtgaccttttcccaaattgttgaccaacaaatcgcctgctgcaaaaaaattaattaatagtaattttatcaaaatattataaaaaaaaatttcatcctctaccacttttgcttttcatcagttcctttttcttttttgggtttgtttttgtggaagtggacgattcggcgacctcattcgaccgctgagaaagctttaaaatctaaaaaacaactaaataaatgaatcactaattaggtaattaattaattgttatacattcagcatttcaagttgatcaattcgatgtttcaagtcatgcacttcgttttctaattgtccaatttgaactttagcggcaatgtggttttgctggaaacgnatagttcaatacgtcaaaa

SEQ ID NO: 28423 - DNA, 829 bp, Heterodera glycines
cttccgaagaatgccaaatttgtccgagtttggccgttttaaaaagtcaagaaccccccttttcactcaaattttcgagttttaaaccggttcaaaaaccgattttttggcatttccgcaattggatacctactttttcgtgcatagctcctcgagacgatcgattggtatatcatttataccattttttccggggggttgactatagtacacccgctgttgagattgggtcggggaaatttttagcatatccaaaacatttcggattataccaacggcaccgactcggtcggcgccgaactgggcggttcttctcctctgacaatccccgattgcatcattccgatgctccaaaatttttcggaaatcggaatttttacctcccaaaatgacgggaattggaaatttttaaaatttagaaaatgattaaaaattttcaagcttttaattaagctaaatgtaaaatttgaagagaaataaaagcaaaaatctgattaccaagtaaaaatgttaattatttgcttcagctaatcgtcgtttcattaattaacatttactaattgtactcatttgcattacattcaaatatgccaccgcgaatgatacagccggcagcacttactgaggctgtaggcaattttgagaaatcattttacaatgcttatctgtttgagggggtcgggtgagggttggttaccataaaggcgtagccagggcgggtgctaagggggttaaagctccccccccccccccccccaaatacaaaaaataaaaattttcaaaaaatgggcaaataaaaaaaagaaaaatacatccaaatgggattttt

SEQ ID NO: 28424 - DNA, 235 bp, Heterodera glycines
  unsure (1)..(235): unsure at all n locations
cccccccccccccccaaggcaccgccgcacccgaaatttttaaggaaaaatagtatttctgctgaaaattttagattttccttggtggtgccccccagacttagcctctcacccaaattttccaaaaaatttcactaaatgttcaaaaaaatcgacatttttttgattaaaatttcctaaaaatggctcaaacgcgcaaaattcgtctcttttttggacaanaattcgttaacaa

SEQ ID NO: 28425 - DNA, 772 bp, Heterodera glycines
aaaaaagaaattgtcttctgtttagcgctaccgaagcgaccccgttttcgcagaaacggctcgaatgatcactgcgcttgcatttgtgccaattcagcatttaactgctgcaattactgcgctgaactacatcgtgggggaagaattggacccaattttaggctggtaagtttaaagcagggattttccaacaatttgcttataaaaataggttccttatcaactacaccggcgttcctttgccaaatggaacccgaacacgtccgcgttttccggtggactattggaacgtacacgaacggactgtcaatgaagaggaacgaacaaacaacatcgcggaagcagcgcatcgtcgacttcaaacgatcttcagctgtcgctatccgtcaatttggcgcttcatcgacgtacttcgaaaggatcagcgttcgcgtgacgctgattatgtgcgctgcgtgaacggcgaagaaccagcgatgaagaaaaagaagtttcggaaggcggacaagcgaattttgaatattattgaaaattttgatgcccaaaatattattgagtttctcaggggaatttcaagtaattgtgttatggacccgtgattttgttatttaatgatttttttaaataaacatctgaattttataattagaatattgagatgatgactgtttttagcgaaaaaaatctggcggcgagatagccaaaaaacaaggcgcggcgagttgggcggcggcgagtttctcgcggcgagatggccgcggcgagttgggcg

SEQ ID NO: 28426 - DNA, 1580 bp, Heterodera glycines
atttaaaggcaaaaatatgtgcggtcgtctgttagaagacattcgcgaaaaactttacccaaatgggtacaggaaaccaaaaagggcaaacaaacccaaaaatgaaaaagatttagaccaaattttgaaaaagattgaaaacgacaggaaaatctgtgttttcaaaactgaaaatattttgagacaatgtactcggattaaagaagttgtcaaagaaaattgggacatgaatgtatttatccaagggagcatatacaatggccttggaagaaaagaaagtgatttggatttagttatgataaactcaaaaggaataccgaatgattggacaaaagacgacagttgccaattttttgacaaattgcgaaaaaggttaagagaatctggaatggcattaacccggactctgataatcccttcccgaaatgtctccattttggaaatcacaattaattctgatgaccaagaaataaatgctcaaattagttgcaataatttgattggattgattaattcgaaatggttggcatgttgtgtgcagttggatgtacgatttaaaactttatattttgccattttggaatgggctgacttttttgaaattcaccaaagtgctaatggaggcggcactttaaattcttatggttggacatcacttttaattttttatttgatgaaaattcctaaccccgttttaccaaatttgatcaaaattttaccagaaatttttgaaattcgaaatgttacatacacaaagaaacaaatttttgaagtactgaaacaaaaacttatttgggagacaaccaattcccagagcatttcttcactactcattggattttttgaattttatacaaaaatcaatttagaagagagccggttgaatatgaaagaaggaaaaatcgacttttgggagaaaagtgctcaagaaatgaaaatgcatttattcattttagagccgtttggggctttcaatgtcgcaaggagtgtgacataaaatggatttatcaaaattaaaaatgcatttcatgtaacatgggaaaaattaaaattcggtattcaaaatccaaaaaagctgttagaagcaataaaaggaaaggaaaatgacgaaattatcgaagaaaaattgaatttgaacagaattttaatatctgatcaggaattagtccaaggacaagaggcaaacacccgaatggacagtgcgagtaagtcaagaaaatgggttcttaattcacaaaaatatttctttaacgccttaatgattatcaatataataaatttttgtgtagccacccaaccaatgatttgccataatagagcccaaacaaaattggtccgattcaaaagggacacctcttcgtgcggaaaaatcagtagatttcttgaacaacctactcgagctttaatgttagatttatttcggccaaacccagataattttcaatttgaggcctggagatgcataaaaatcagacaaacaccaaaatacaggactgatttatttgggtacaaaattgaaaaaattcctggatcaatttttttacaaccacttttgaaaactggcatcaatgacaatttac

SEQ ID NO: 28427 - DNA, 1369 bp, Heterodera glycines
ttattgagatattctttttataatgcgcaaaaatataagctaaaaacaaaatatttgccttaagttttctcgaaccaaactacatttattttgcactcaaaaaaatattaaaatttcaaaaaaaagagcaaaaaatcccagtataaaaataaaaaataaagaagcgtttttcaaattaattaaaataatattttatacaaaaaatgtaatttatttattattccacaaaaataatttattcgtttttttccttttctttcggctgacattgggaaaagtcaaatcattttttcacaatttggatggtcatatttttttattcattccgatgctaataatattatttacataaaaatgaataacagaagggatagaaaaattatgtgtacagcgaatgaattttatttgtgtaatttatcattcataaggccaaacaaattattttattggaactaaaaaatttattatttcaacaaaacgaaatatttaattcattttagtcataattatttaaaaaactgaaactataaaaaatgaaaattattccggcattttttattgtgtttttctgtgctcttctgttgattgtcctttttgacggtctttaaaattaataattacactaatacaaaaattaaatgtttttgtttcctttagaaatggcttacgccgaagagctgccgaagatgggtttgtgaatttaaatttctcaaatatctgaggaacggcagcgatcataaactatttaaggaatctctgaaaggattttttgctcttaaacttaaaaaaatttcctgggtatttttaaaaattttgcaattttaaacccatttttaaaaatagattggaaccttaaatggacatttttggattgttttgatctcatttatttttttcaatgaattttaattcgttttaattatatttgaatttcattattaataacacttgttattaagcaaatgcaaacgatccatcagaaatctctcatttggatgatgatgatgatgatgatggcagtgattcggggagattggatgacccgaacagagagcatttgcgcgattacattcttctgtgaaattgaggaaatgccaattgaggagcaacggacgatgttttggcacaagataaacaaaaagaaaataagaaaaaatttaatttctaatattatttgtatttggaaattcgtttattcatataaagcaagtctctttataatatgttgtgctgtttgtgatgagaaacctaaagctgacaatgcttaaaatattattttatttatataaatacttacatttaatgattaacaaaagaaataaaatttaaaataatgaaactccacccggaatcataccgatggctaaaa

SEQ ID NO: 28428 - DNA, 1469 bp, Heterodera glycines
tttaagctctttggattgctgaaacttccgctgatttggtaatgataaaatcaataatctcattagggcagtaatagcagtaattaggtgttggcactgaatcgctgtctcgaactcggcttcgccaaactgtgccggattttgttcgccggccatcgcattttcgcctggttctttgcctgttccctgtacgccctcggctgggccgtgttcatcaaacccgccgtgtacagcagtgttttcttcggatggttcttcgacccgttcgttggttatcacaacgctgatgatcaacaacaaaaacagcacgaggaagtgggcatcaaagaaatttcaaaatattggataaaatataaaaagtctaaactaggtgtggtacttatgttcgtaaaaatgtccatatttaaaccttgctaattggtggtattattaaggttacatctcacagcccttatgcttaatcaaattcaattccaaaaagataatttatttgatattcggccatttgtagatgcaaataaattctattagggaatgggatgcgcaaaaatatctaaaattggcacagaaaattggacacggcaaaattggggcactattagaaagaaaataaataatcaaaaatataaataattctaccaacgatcaaataatggttaaaaattatcgatgccttgagtaaatttctaagcaagtttatttgtgctactcaaatgaatatttctatttgatagagatgattgttacttaccgaatttcacatttcgattctgatcccaatctcgatgattcaattacacatttgttttctgtctcaatgttctgtcggtattctcgaacatttactactgtaattatttccttcgtagaattattttatttacaccagcaatggtcttgtattaaataaatcctgtattcagaatagaatttgattttatttacttaaccttaagcaagttaatttcttatattttgcaaaagacaaaatttggtgtccaattttccgttttaaaaattatattttcaattgagtcccccattttttgttgatacttatccaaataggaagaagctatttatgaataatttaagtacgagcattggcttcaccccgtgcacaattttctggtggcaattctgagtccgctcatttatttggcatttgcccttaaacttttctacaatgttcggacgagtcgcagagagtttggcgttttggtttccgaattggattccgtccaaatacgagtcaatattcatttatctttttaatactaaaatttaaaatatctattaaataattttaaaattaattttttggattagaaatttaaattcttttcatttcaaattttaacttatttttttagatatttctccaagttctgctgatctccgcaatgaacacattgactggctctctttacgtatacgttcaaagccatgaagttgggcaatggatgatt

SEQ ID NO: 28429 - DNA, 2013 bp, Heterodera glycines
  unsure (1)..(2013): unsure at all n locations
gcaatttcggcatattttggtgccattctttttttgtatattttcttttttgcttatatttttttgtcattttaatgaattttaaaaatcttatttttggcgtcaaaattgaattaaataaaatcaaccctaatgattgaactcgtataaaaattttatcggatattttgactatttatctttaaatatcgataatcattctctttttttgtgctttttcattcataattttttttccattttaaaatgcaatttcgactgattttcaatgtttttgcaatattttcatcatcaatttgcggattatttctttttatttgccaataaattttcattttctccatttttatttatagatctcttattttaggacaaattaaaaatgcaggacagacagaaaattttaaatcaatttaaaacaacaaaataaatacaaatacaaaaatttctttttcttcccatttttctccaaatataattttatgaatgaatgggcatttatttattcgtgaaatgattttcatattaataaattggatttttttaaattaaaacaaactacaaatcacaaaatttttattttaatccttatttgagagtagtcataatcaatcggatgcaaattttaagcggcaaaaaatcccaaatttattaattaaaaagcggcaaaaaatgccgaaattatcgcaaatagtggcgaaaaattagtacattccaagcattcaagataataaattataacatttttacggtgccggcattttttctaagcaatataattttttttgtcactttttcaaaagagtattatcgaatttatgccaatgataccaatcgaaaattcatgtttcggattttaagaataaattttttccaaaaaatgactgaatgtcgttattttattccaaaaaaacaattcattccatacaaaaaaaacattttattcatttggatgtaggtagttagttatacaaaaaatgcccttaaaactgccaaaaaatgaatctaaaaaacctcataaaattgtgaaaatttaaaattgactaaataatatttaacgaggctaattgcatattttattaattactccatttttaagatttataaagatttttaaaatacttaataaatagaaataaatgcgcttttcgggtttttctttgattatttgcaacaacagtataaaacagacaaataattagaaatttatttaaataaatttaaataattcaattagccaagataataattttataaaataaaagaattggacaaggccattcgtgagtggacctatattagggaggcattaatagcacaacccgtggctggtcgattcctaaaaagtagggctggtcgggatccaggctatttaacgcgataaagaaataaaaattccgatcaaatttgttttcccatataaatccaacaagaaattgttttactaattttggtttttttgaggcaatatgtccggcggtgtatgttcggtatataattttatgagatttattataagattctttttttcatcattcgtttcattcttccgattctccaaattgtttcctccatcttgtaacggtacttggaccaattttcaatgtttttgcaatttccttttcactcatttttggattttctctttttattttccaataaattttcatttttcccattttttcttcatccgttattcttttacatctttttgtacaattgtgagtttttcttcatcagtttttgatttgtgacatttttgtttttgaagccccaattctttaatccatttataaatatataaacgatttgtccccaattttttcgctatttttctgtcaattttactccatttttttcttgaatattttcttcctttttgcttaattttctctttaattttataatattttcttattatttcccgtttcttctgtncatttcgttgtttttcttctttttcttcccatttttctccaaatatttcatcaaatgttttctggtgcaattttt

SEQ ID NO: 28430 - DNA, 880 bp, Heterodera glycines
caccttttacatggtttagaattttaaaatttagcctattaaatatttaaaaatttttaattatattttatattttttgaaaaattccggcttccgagttccgacatttttggggtcggacttccgacttctggaattttttggtgcctcggaattccatccctgctggtatataccgtatacatatagatgtaaaaatgcagaaactttaaatcaaaaacacgaatgtgtgagtttgattggacaaggtcaaaaaataaataaatgaaatgtgagaaaatgcaaaaaacgatggagagaatggattttaatacgcacaagtaatggaagatttgataaatgcagctcgctgttggtgagaaatgacatttttgttggcgattaaatcaatggcatcgtttcttaattttgaacgtgggagaggagtggcaaagcaaaggaaagcattcaaaaagttggtttacgagttcggtcattacagtacgggtgctatagtcatttttacatattagagaccggacgggatcgggacctcgcgggattttttcgggatcccgcgggattaaatccgggatcccgacctcgggatccgtccttgatcgtttttctaaaatattcgggattgaccggggattcgggtcgggatccctccctaccatttcgccaatcccgcgggatagggtcactataatttttcgaacaaattctattttcttattaagatcttacaattttttatacaaaaatttcatataaattccaaaattctttcccggttacccaaaatccaccaaaatttaaataaaaaaattcggttgaaatgtaagaaaatgtcgacgccaatttaattatattctcaattaagttgtctaattaaata

SEQ ID NO: 28431 - DNA, 1163 bp, Heterodera glycines
ttggacaatttccctttgagccagatttgttgctgtaggcgttgtgccactcgcagttggttaaggctaataataaaatttgatttttcatctaatttcacagatctctaggcattctccggtttttgtgctgatgctcctggtaatgaatttttgtacaatttcaattttttcttcatcagtttttgatttgtgacttttatgtatctttttttgaagaccaaattctttaatccattttggaatatatgttttatttgtccccaattttttcgcaattttcgaattaattttattccattcttttcttgaatattttctgcctttttgcttaattttttcttttgttctataatatttttcaattatttctcttttttcttccaatttttcttccctttttccaaatatttcgtcaaatgttttttgttgaagtttttattttccgatccgctttgatcaattttgttggtcaaaaatacaattaaaatgaataaataaatgttacaggaaattcaaattttgcgatccagctgcaggatttgagggatcccgcgggaaaacccctggatccagatcgggaatcatatcccactttattttgagaaaaaaaaaaatttttatttatttgtttaatcactgataaatttgaaaattttcaaaaatttatgacatttattattaaacattgtttcttttaaaataaaaaaacaaggaatttatcatttttgataaaaaatgattgacaaaattcattaaaatttctggctttttaaagctttgcatatttggacaagaatgttggatttttacggaaaattaattaaaaaattgagcctagtttttcaaaaattagctattagaaggcgaacaataaaattttctagttgaaaatttgtttccgatttttaaatttcttttttgttttgatttttgtgaaagaaaaatataaaaaaagttttttaatattttcacttgaatttttttaatttcccatttttcattctctttttatttaattagctattttaattttaattgattcattgttaaaaaaatcggataacaaaaatatttaataaaatttattttcttcaacaatttttctcaattttaatctttttcctaaactataaatcaataaaattattcaaaaatattta

SEQ ID NO: 28432 - DNA, 1990 bp, Heterodera glycines
cccccccccccccccccccccccgccacccattcgtcgtccgtcgtcgccctccctcttttcttctacgcgttgctgtgcttgtgctcttcggttttacacatttccgccgattgatccttcccatttttgctttataattttgctacaaaattttttttcttttttcttcaaggttaaattgctggccatgccttgagaggcacagcccctagggtttttgatgacaaaatgattgatttactgctgttttatgtttgtttaagaaagaaaagaaagaaatgtgccgacaaaaaatttttagaaatttttttttttgcctcgggcgattttattaaataaatgaaggcaaaggaggaggccaagccaacggaattttatttattttttacgaaattataattgacaaaggcttgtaaaaatattttttaatttaatccggctttcgtgaaatgaatcgaccgagactatgatttttaaagggatttttacacggacggccaatggcatggctatttttctgggattttctcggctttattccccctgaaaccgtatgattaagcctaatcttttcctatcttggccataaataattcaagactaaacatggaatcgcactgccttctgtcctcttaattgtgattaattgattcactgttatttttaaagtgaaaaattatgtgcgccatttttttgtttttactaaatttgccccgggctatttattttacatatgggcgaggggtcgtatcgacattgtaattttatgattttgcgcagtattttctttcttttttttttgtaaaattattatttttaataatactcttccactttggacatttttgtgtttttttttcttatctttaatcaaaatttatgaaattaattccagtttagggggagggcctggcccaattttgggctgtaaaattcaaaattttctatccaacttttttgaaataaaaaagaattactacatacctatctcatttaaggaaatgatttttaattcataaattgtagggctgctcgagattctctgtctttcgttctcctgttgtgaatttctcgggtttttttgggtcttcaatgcatggggttaattttcggtctagttttcgagtctcggaaaattaaaaatttggagaggcgggggaatttcgaaatttcaatgccgttaagaaaaagtagaacgtttatccgtttttcattgaaaacattttggagtcaaatcaacaaaaatatgtgataaactcgagggtccgacggtgccttagacaccgacagagaaaattttggaaattttaattgactttattagacaattgagtaaaatttttaaaaaacttaaccttacccccctggctacgggcctgactgatcccttcttggaaccgtaatttgtgcgttatccactcattcccatctggtatcaatcatgtttgcggaattttccccagttttgtcccctgctggggaacaacatgcttattaatgattatgtaatttatattatcctgatcattgccagagtttttgtcggttggccaattgcttagccattatcactgttaattgatgggctaatatattttccacaactttatccctccgtgttcccaaattcctcaaaaaaacaacattttttggctttatcccctcaaaggacaggcttttgttcgcggtgatggctttaccccttcactgccccagatgacactggacttttgcggctttatgctttatcccccatcggcttgcatctccgtcgtgtcccacaattttttttgtgttgttgcccgcttatcgactggtccatttctaatgatgatgatgatcatcctcatcatcattatgcatgcgtgagaagccggtcatcatcatctacaactgcttctgcttgcctctgctgcacaacacaacgccaaaaaactggaaaatcactgcgcgtgctttttgtcgtcgttcgcttggctttatccccc

SEQ ID NO: 28433 - DNA, 1664 bp, Heterodera glycines
  unsure (1)..(1664): unsure at all n locations
ttgtccccagaaatttcgttttaggattttcaccgtaacaaatcaagaatttcatccgttttatttcactaactaaccaaaaaattttagacaggtcatggttccggtgacgaaattgtcgacgaaagtgttgccgattcgtatgacgggaagagggaccttagtgaggacgaaatgccagtgttctgatgccgagtatgcgattatctgatgacgctttactactacacttattcaaatatactttgatttttattttgagttggttttgttgtcggataaagattttatcattccttttcctgtgtggtagggttcagtttattatttataaaagcagacatgggttcgtaattacagaataaatttggatgtcaaatatcaccaattttaggcttagatcgtttcaaccgctccgcaaaaaccgttggaatgcgttgtaagcagtttcaagttcaaaaatcatctgaaatggtagcggactaagtcagggaatcatcgtaactgtttttgttgccttccaaaattacctgtcgtgcaacttcgtctgtaatctcctcatgagcagccattccctgcagcttgtcatgcctgaaaaagtcgtcatgctcagacaataaaaacgtcaccaaatttaccacgatttcaccctgagtttggcgtcgaaatcgtccggcaaagtactctgaaaaatgtggaataggaataaaaaaagcatcctaccattgcgttgatggaggcgtaaaggtcgttcagattggggaaaagttcgtccaccgcgcgaatgttcagcttcaattggtccaggaatgtgatgaacagctccacaatgtccgcaatgcatttgagagcatttcctttgtcgtcgcgcaccgtaatgggtcggtcctaacgattaaattttatgcacaaatttgtgaatccgaaaattaaatttgctcttttttaattaaaaaaaacctcacgaatacgctccaacgcggccgggcattgaatgtaatatgagcggaaaaactcgtcaattgtcatgcggggaaccaatcgcaaagccaccttaacttntgtttttgaaagtactaattccgaatgcaattaaaatggccatttttgcgtgttatagcaaaaaattttatatctttcaaaaatcacatacctaaatagttttttttatgtaaaatgcaacaaaaaagatcgtcgctacccctgaaatgttgtgccaaaaacataagtgtcactccttttaatttttaaataaaatactttaaaaatgcctaaaaatgtaaaggtgtaaggatataaccaatgttttcgacgtcgatcaaacagtacaaccttgatttgaacaagcagttttgagcattccgccgtgtactccttggcgtggatataatcccggctgaacaccttctccaggcactccaacgcgttgaccatcgcgtacagttcagccatgttgtcaattcgatcgcgctccgcattgttgtcataaaggcgaacctgtgcgaaaatggaaaaatacgtgttcatttatatctactttaaagtgaaatttactaacttcttgtgacaagtcaattgaagccatggcaaaaaatgtggaaaaattaataggtaaactccctaaatcaacaattcatccaatcaatagataaaagcctaaatct

SEQ ID NO: 28434 - DNA, 1049 bp, Heterodera glycines
aacgcgggtagaaatatctggttttaatcgagaatatgcataataattccaggttcaatatttattgaaattcattgacttccgtgtccatactcatgcttaattttttaaattttatattttatttgaaacaattgtttccgcgcttctatttaacatcatatatatttttagaaaacacaaatttaacgtgtcaacgacaaataataccatataacattttaatagacatatgttcaaaaatccatcgtttgattacttataataaagtaatttttctttttaatgttttgtctcgtctttgtctaccgcttctaatatttactaccacttttatttggtgtctcaacaaatgttgattccgccatacaacacaatcagagaattattattgccttatcattatctaattagagcatataataattaattcatattttacaatattcaaatttttaattcattttaaattaatgataaatatttttatctcactaatttgcagatttattttccaaggctattgctttaaatttctcttttatttctgggaattccgtttttgtgagaaaaccttaaaaattcacataaataaaatattggtcattctgaaaattgaacgcagcaaaaacggagaaaacagcacaatagaaatgaaacccttatataatttggaaaaattaattacgccaaaatccgagcccgggttaagcattttgttacaaaattttgacagtaaacgggattgctcgggattggggtttcatcggggtcccactcgtccatttcgccaaaccacgggaacccatgggatttgagtcaatataatttttcgaacaattaccattttttaaattaaggtcttgcctcaaatataaaaaatcaaagaaaaatatattcatttaattttcttaaaaaaaatctttaaaaattccaaaaaattttcccaggccaaaaattctactgaaatttacaaaatttgatgagaaagtggaagaggaacagaaaatggaagagaaagtggaagaggaacagaaagtggaagagga

SEQ ID NO: 28435 - DNA, 1389 bp, Heterodera glycines
  unsure (1)..(1389): unsure at all n locations
ttatacacaaaggcatacgatagctctgtttttcctttcgctatgttctctttcattttgttaatgttttcttgcataattttatttcattttttaatatttctattttaccctttttagcaaaaatacaatcattttaataaccattccataaaataaaagtaaagttatactttttcatgttaaaacaaaattcaaattttctgagtgtgttgtgcttattatccctctcagtgccatcataaaatgtcaaaaaagatttctccacttttttaattgcttaaaaatggcatgccgcggcatttgtcgcatccccaaccttttcatcgtgccatcaaaatgtccgtttcgcggatttgtcatgccttcgttcgtccatcatttccatttctttcattcacttccccctccccatttcattgcgttaataatggtcagtcaactcgtcgtcgagtgaatgaatgaatgcgttggcttgaccattccattctctgtgacaaatgatgtgccaatgccgtcctccccctccatggtgccctaatttatttattttcgcaatgttgcctcgggcatgttccgttcccccacccccctttcttctcccttttttctgcgtccattggggactcggtttatccccaggccaaaaaggcccccttaatcttcaatttttatcctctcccctgaccacacatctgcatcatgccttcatcatcatcatccacttttccattttctctcatttttgcataaacacacatttaccacggcgaccacaccgttgttgcatgcacacacaacacattccctcaattccatgctcattnttgttgtgtttccaactgcttcccccttgtgctgatacctcctcccccccccctttctccatccctctaattttcttcaaatttttttccctttttgctttttttttcacaatgtgactatgtatanaacggaacaaaattccaaaattttagttggatatttcccatgaattttctcaatttcataaattggcaaatctaattttctttctcattttgaagttttgtggcaaatcatttttgaaaatgtatgaatgtatatattaggttttttgacaaaaaatgaattttaagcctcacctaatctccaaattataaattcggctttgaaaatttaaccttgtttaactatttaaaacaaaaaataaatttcccataatggtctttttccgtcccgtccacgcgttcgcctcgtctgttgtccccccccccaacccatcattctcaaaagcagctccttcctccgtgtttcccgttttcttcatcatcaccattttgttcatgcatgtgctctttgctcctgctgtgattagcaaaaaaaggcccttctcatcgcaattgt

SEQ ID NO: 28436 - DNA, 904 bp, Heterodera glycines
  unsure (1)..(904): unsure at all n locations
attcagatttcgaaacatgagcnntcataaagattccaaaaaattttgaggggattcggaatgccagccctggtgccgaggactgctgctgctgctgctgctggtgaccttgattaataattgaatggaattgtacaatgcccttgttgctggcaaaaaatcccaaaataattcaattaaatgacaattttgccatataattcttttgaaaattaaaaattcttttttattcttaagggtgtatttcttgtatttactgtgcatttttgttaagaatttataagaaaaaatccaataattcttgtatttactgtgcatttttgttaagaatttataagaaaaaatccaataattacaaaaaataatgacaccaaataatggcaattttgtcgctccattctagagtgcagcgggaccggacctgaacacggacaactgagtacaactgagtaccaaggtcccggttttgaccgggaccgggaaattcccggctttttcccggttttcccagccaaaaagtcccggtttttcaacccaaaaagtcccggtcttgcccaaatttcccggtcccgtggcactctactccattcctttcacatttttgtggctttgttgtctgtcgtcaattcaaactcggttttccgcttgttaagatcgcctcgctggaattctgttcagaggcattgtctggcaaattgtgcgatttatttgtttgattttgtttggttttttcaaataagtttcaattaagaattgtaagaaattttattacacataaaaatttattttcattaaaattatacaaaaaaattgcggtaattaatttggatatataatttattttcatcatttcaacttccttaatgatgcctaccaaaattggcaaaacaaacaattaaattgt

SEQ ID NO: 28437 - DNA, 812 bp, Heterodera glycines
  unsure (1)..(812): unsure at all n locations
ggaaaattnnttcagaatttttaatgaattttgttaagaaaatggatacatttttcagaaatttctctctttttctccttcgccggcgaccccccccccaccattttttatatgtgccaatttgttaaaaaaggcattcaattacaaatgtagatctccaatctttcaaaaatgccttcctttcattttccagtacagtccttgaatttctgtttaaaaaaaaaattttttttttttggttgattttcattggaaatgcagcacattgccccattaattttaaaagtttggaagttttcaaatggcactattaaaatatcaaaataattttcaggtgggcccatcggttggccaaattttgaggatggcacgtgacaagggccaaaacataacgccacagatgatccaagcgggtgtgtgtgtgtgtgtgtgtttgccaattctttgaatggaacagagccaaaaacaaacaaaacaaaaaattttagccatgcaaacgcaactgttgcaacagcaacaaaagctgaaatcgcatcaaattttggctgctgcggccgcaaaattgccaccggcggcgacaatggccaaccaacagagggcactgatcaacaacggggccaggcagcagcaccagcaacaacaacagcaaatggtaaaatatagtatatgctatatgacaacgacaacaaaaaaaatttacattttacgaaaagcctggcaatttttttaatcaaaaagagagaaatctcagcattttacagaaaccacaaacaaaccaaaccaaaaatcgatagtaacttggccatcaaatt

SEQ ID NO: 28438 - DNA, 1669 bp, Heterodera glycines
tgttcgtcgccgggcactccattctgcgcacgttcttcagtggaattgtccgagtccgagtgttcgtcgccgggcactccattctgcgcacgttcttcagtggaattgtccgagtccgcgtgttcgtcgccgggcactccattctgcgcacgttcttcagtggcattgtccgagtgttcgtcgccggggactccattctgcgcacgttcttcagtggaattgtccgagtccgagtgttcgtcgccggggactccattctgcgcacgttcttcagtggcattgtccgagtgttcgtcgccgggcactccattctgcgcacgttcttcagtggcattgtccgagtgttcgtcgccgggcactccattctgcgcacgttcttcagtggaattgtccgagtccgagtgttcgtcgccggggactccgtcctgctgctgttcgctcactacattgttcgtcccagcagcaataatttcctgaaatttgaaaatttttttgttaaactgtggtaaataatgcattattacttccttcttcttcttcttatccgtgtcgcgcatttggacgaatatcggcagagggaggcaagtgctgatattggagaataaggcaatggaagagccaaatagggaggcaaattctgatattggagaataaggcaaatggaagaaaccctaacaatttcttacttatatactcttcccacgctagtgagggaagaactgctgggttgccgattaatgactaaattttatttatggcaaatacataggtattcaaaaaataggtacttggcttaatgttctttgaataaaaaaatacaatgggcggctcctgcgggatcccgcacaaaaaaccatatttggggatttcgctacgggtttaggattaaacatttcaaacaaaaaaattatcggcatttgaaataaagctaacaaataagttcaaggagtgtaaatttgttattgcttagactattggcaatgttttaatcctgaacaaaaactgaaccacttaaaattatgcaacaacaaaagtacggcaaaactgttggtcaaacagctcgaatttgacggaggaggctgccatttgcagcaaattgcaaaagtggagggcggaagagacttaagtgagtggaaagggaaaaagtcaaattacaaatggaagaagtgcccacaaaaataagtagctagacaatttatataagattgttgcatttttgctaaaatttcagcacttttgctgtttaatgcccccaaaaaaatccaaaaagtgggtccttgtgttttgttaaaaaatttttttgtcattagtcgagaaaattttcacggggatttcggagcgctaaaacgaacctgacagctcttttgcaattccaaatctcttcaaaaaggtcctcattatagatttttctggtgccctaaacagcaaaaatgccaaaaaaaaaattctcggctcggaatctttgtttcaaaagtctggcaattttttaacgctctgtttaatagaaaaaataatagtgtccaacttcaactcctaaatgttcaactccggctaacaccgatgcgaatttgacgacgagatcaacgccgacggcaccaacaaattattcgccgttgacacaattggacgagcgacaagcacgtggaagcaatgacgacaaatggtgaca

SEQ ID NO: 28439 - DNA, 1306 bp, Heterodera glycines
aacgaacacatttccaaaccgcagaaccccgttgaagaagaaatcctcttagacaaagcaatcagccaaatgcaatccttccgaaaacaattccctcaattatttaattaatagttctgctatgacctccaacaatttctctaaaaacttcaaatcttctcaataaaactctccacaaaaatttttttctctccaattccaaaaaaaacttgatttacctttattggaggtctgacttctccacttcaactcaaattcaattatcgtttgttacaactattcattttatcccatttcttatttccaaatgacatttaacttcttcactattaacttgcccttatttccaccaaaagtataagcggcagcaatgcccttcttttggttctttttattttaaataaataaatgcctacctcacccaaatttctcaaaaaaattgactattttttccaaaaatccataaaaattgactcaaaaccgcaattgtcatttttaggtgaaaatctgaaacgaatcacacaaaaaagtagtatgaaaaaaaggtgccgtcaaaatgattttgtatgaccggatatgaattttaataccctctcatttttgcgttgtccctctctctacccaatatgtttttatcaaaaccaaattcttcaatataaatggatatttttatttttatgccaaattggtttaggctgaattgctggcatttaatttttgcttctgcgtattttcttcttaagtaataagtcctgtcgaaccaatataatgaaataggggttctaatttcggaaaccgggaattattgtttcgtttattacagattctatctgccggtatgaaattagtcctaattttttaattcatgaaaataaaagtctcaaaacgagatgaaaatgattaattaactaaggtaaataaatacataaaatagaaaaaaactagaaccaatttagaaccgttttttaacattaaattttaaaaaattcctaaacccttattatacatttaaacgccgttgaaaactattcatttgtttatttgaaaaaacaatttttttttttaatttttattctataatttttttattcatttatctgattttcttgggtctcagcttcattgaatcccattaaatttgttttgacggtgaagctttgccacgtttgctctccataaaaatgtccattatattgaattggcaatatttatgaaaatggaggggagaatatatttgttaatatttttattgtaaaggagataggaggaatagtagtaatttgaatttacatttttatacattaat

SEQ ID NO: 28440 - DNA, 911 bp, Heterodera glycines
  unsure (1)..(911): unsure at all n locations
ttantgtattacacgctactcgcttaataaaacaagactcatcttctaatgaattgcagtctaaatgattctgacccaattttcatgtattttaataacaatgtaaaatttaagcatcttcaaatataaaagttaaataaaaattcatatgaattaattcatgatatccacccacttctccatcctctgaattaacatcaggcgagttttcatcttgcacttcattcaaacccatttcttcaaagtattgatcaacaagcagcccattttcatccaaactttgttcaagcaaaagccttgcatcttcttcaattatcatttcttcagcttcattacggtttgacggcggattgaagccaaccaaatgtccaattcttccataataattagacatggcttcaacaaattcatcattgcagtaatccgtattcaaaaaagccaaaatatccgccttcgctgaggcaattcctctgtccaattcaagagttaattcaagcgggcgagctggcaattgtcttccttcatcaacggccactgcggtttcttcttcagcatgacttagttcctatcatttacgatacaaaagttagagacaaacaagtacctgaaaactcgctatccatctgccgagcaagaaaccaggctggtacaagcgttgctgtcgtccgtggtaagactcagcatggttgatggttcgatgccgaacaacgtcaaaaagtgcaaaaaagtgcagccctattctgttgttgatccatgtgttgttctgtatatttggtgttgtctaagtagttttacatttatttacgcagtaatcgagaacttcactcaatgcgccctgttgtaaagttttccatggggagtgtgtgatgagatggcgcgtgagttgaagcgaacgggctaaatagttggga

SEQ ID NO: 28441 - DNA, 949 bp, Heterodera glycines
cccctctgccatgctgggaacatttgtatggtacaaaattcctcacaaaaaaagagatagccatttttctggcatagagaataaatttaaaaattccctgtagaatagaatggccattgctctccgcgcccctctgcccatgctgggaacatttgtatggtacaaaatttctcgcaaaaaagagatagccatttttctggcatagagaataaatttaaaaattccctgtagaatagaatggccattgctctccgcgcccctctgcccatgctgggaacatttgtatggtacaaaatttctcgcaaaaaagagatagccatttttctggcatagagaataaatttaaaaattccctgtagaatagaatggccattgctctccgcgcccctctgcccatgctgggaacatttgtatggtacaaaatttctcgcaaaaaagagatagccatttttctggcatagagaataaatttaaaaattccctgtagaatagaatggccattgctctccgcgcccctctgcccatgctgggaacatttgtatggtacaaaatttctcgcaaaaaagagatagccatttttctggcatagagaataaatttaaaaattccctgtagaatagaatggccattgctctccgcgcccctctgcccatgctgggaacatttgtatggtacaaaatttctcgcaaaaaagagatagccatttttctggcatagagaataaatttaaaaattccctgtagaatagaatggccattgctctccgcgcccctctgcccatgctgggaacatttgtatggtacaaaatttctcgcaaaaaagagatagccatttttctggcatagagaataaatttaaaaattccctgtagaatagaatggccattgctctccgcgcccctctgcccatgctgggaacatttgtatggtacaaaatttctcgcaaaaaa

SEQ ID NO: 28442 - DNA, 1169 bp, Heterodera glycines
  unsure (1)..(1169): unsure at all n locations
gtccgagtatcggctcccaaaagggaggccgatgaccaaggtaaaccaaagtgctgaacatgtggccaaaaacatgctcaaattgcaataaagcaaacgagttatagtccagcgtgtgtggcactttacagatgtcgccccgttcccatctgcactttaaaaggaatgcacaaacacaaaagtgctgccacctggactaaagggagggaggagggatgacgtgcgagttagggcacttccggtttccattgcattgaaatatgcaatgtgtctgctcatttcacgagcgaaaccaagtgcatgtcggctgacgcaaagaccctaacacaatttcaagcttaacacgaaacacattacatataagataaaacttataagaaaaatcggtgaaattccgatcaattaattatttccgatcttatgttaattccgattaacttttatttttgttcattaagccaattttttacatgttacatgtaaacggagggagttcattgtatatgttacatgttactacacttattagcccatctttattattcgatccaacaattattccaaattccatgtaatcaaaaagtccgcgctttattgctcttaaaaatttttcagactattacaagtcatatgtaaatcaaactccatataatttttttgttcattaatgtaaacggagggagttcatgtatatgttacatgttactacacttattagaccatctctattattcgatccaataattattccgaattccatgtaatcaagcgctttattgctctataaaaaatttaatttcatacttttacaagtcatatgtaaatgaaaattccatataatttatttttgttcattaagccaattttttacatgttacatgtaaacggagggagttcattgtatatgttacatgttactacacttattttttaatttctcttttgttcattaatgacaaaattagttatttgttacatgttacatggaaacataacttcctttggtccaccccaagttacatataagataaaacttataagaaaaatcggtgaaattccgatcaataattatttcggatcttatgttaattccgattaacttttatgctttctattcaccaaggtatatccaaatcaaggttaattccgattcgctcttatgctntcag

SEQ ID NO: 28443 - DNA, 1699 bp, Heterodera glycines
  unsure (1)..(1699): unsure at all n locations
agaccaaatttacttttcatagactttgtcttttgaaattttatttcgtttcggtcgttagcttttttttttgtattttttgcattaattaaataatttttacaaattaatttttgtgtcaaaaggcgtccgtccgttatgaaaatgcttttgggcgctgctgccattttggcatttgcttctgctgactttgtattcgtgggtggcaatcaaatggaatttgatccgacggcggtgaattctntatttcctttcaattctttgcctttttgttgccatttgtccgttttcatttgtccgttttcatttgtccgtttttatttgtccgtccgtccctttcagccgatgttccccgattctcagttcatcgatttgatttcgcgtgacatcgaatcattctccggcccaatggcttttggccacaaatttatgagcggtgtggcccattaattgattaattatctttttaattaaatattgtccccttaattcattattaatttgtttcgttttgggcggtgccggcgaaggcgaccaacagctcggccccgacggacccttcgagcatcggcagcaagtgaaaagtgacagcgtactgcccgcttattgtgagccgccgaatccgtgtcccgttgggtacagtgaaaaggacggatgcatggaacagtttgataatacggtagggaaatggaggagtggggggagtacggtaagaaaaaggaaagagcgagatgaaggagagggaggagtgagaggaaagagacgggatagaagaaagagaaaggattaagagagagagaggtgaaagaggagggatagaaagaaagaggattgagagagagacggagatacagtaatggaaaagggcagtcatcaaaaacgattaacgctttaattgagcagtatttaaggccgaattctcgcgcagttaccaaggccagcagcagtgcctatgtgaccaggaacacatgttcaagtgagaaatgggttaaccaattagagaggcaaagcagctccaaattattgtgcactgtccctttgattacggcacttaaacggtccctttgaagttgcccgtcaaaggaaaacgccgaagagtacgcgcagggcctggagcaactgcttgcggacaacggactgcacaaatcgtacgggcctaagcacaaagcacgaattaacactaattgtcccctttgttttgcagaatgatcgccaaaaagttccatctgacgcgagcggaggtgcgcaattaaatacgctaatgactacagcaaattaccgccactttcccgcaaggaaccgcgccgtcggaaacgctccgtcgcttttgttggcccggcacacgcgacgcacagccgctacaacccgtacttggagggcattccgctgaagtcggttgccaaaaaggacggacgaaacttgaaaatgtgaaacaaacggggcagacggaaagcgcacgcgaccactggcgatcggatttcgtcggatcgaatttttttttgtttttacccctccccctaaaaaatgagccccttcccctcccgccccccactctccgctgtagtctctctcttccttcgaatgagttaatgacgaatggattggctaatcggtgataaattacgagtttaattggccctaattggcccatccattacaaaaagaaacaatggacaaattttaaaattaatgttcataa

SEQ ID NO: 28444 - DNA, 831 bp, Heterodera glycines
ttgcactttaggcacccaatcgaattagttggtaatttcttttttaatcttattctttaatcgtttgttaattcagtgattaattaatatagtgcaaattagttaaatatcgaatgggttttcaattcacatcaatttggcaacgtgcaatgaaaaatggattacgtcaccttcatactaataacccctaactcttgcagtatcaaatacatgttccgtctctatcacaataaaaaaatactatcatattcttgatgaaatgcggtcatataatgctgtgaatcaaaaatttttaaactaaattttttaaaattattttcatcaaaaattactcgtaaaaaaagctttatcggacgcctgagtgcagtagagtcagaatacaacctggttgttgaattggttgcacgggaaggccgcgatttcgagtcccttcgacttgtatttgtccagcaactgcttcagctgactgtagttggagtcggtgaagccgcagttcgacgctacgttgaccaccaacagcactttgccacggtatttgccaaagctggtctcattgccgtcaatgtctttggccgaaaattcataaatgcttttttgctgcgggtccgatggggcggcagaagacgaagaactcattgcacccataaacttgatgttgagtggtgacaagaattttaaaggcaatacgaatcgctttaacatttttcgcattaaatcaaatgataaaactgttatcaaataaatggagattatagaaaagcgaaatattcccaatagcaaggaatagttttattatgggattcaccgcccaccggtaggggtcaactccgt

SEQ ID NO: 28445 - DNA, 1526 bp, Heterodera glycines
ctaaaagtacgattaattaattactaattacgtgttcgaacttacgccctttggggtggggggggggtgggagtcagcggccaattttgcgattttctcaaaaagtgaacaaattttgtttttaagccagttttaagaaaattcacaggcggcgccgacaggcgccagcggtaaaaattgggtttttttgtgcgtaataactgattttagacaaaaagacttttttatagaaaatatagttgaatgatacggtgctaagtcgaacctaaaaaagtttaaaatacgtttattggctttttattggagcaaattggcatgatatttgcgcattcctgtttctcataatttaattatttgttcttcaattaaataattaaatcttttgtcctgcttgtgttttttttgtcggtttttaatgcattttttaagtctgtttaagcaaaacatattaatgaaaatatttgcttcaaaggattatattttttcattgaattatatttaattgtacaataaaaacaacggtattaaattatttaaaaaaagcaattaagatcttacattattttgcatattttattttgatttaaagaaataataatagttaaaaacttttaagtttttatatcaaaagtaaagacttattatgtgctatattacttttgttttaattttatatttgattatgtcattaaaaatttattaaataaattaacggaacggaacgtaagagaaaaatttctgaataagtcgttaattttaaaattatttttaataacaaatagaaagaaatattatttattttataatcttaataattattaaataactgttaaaaagaatatcaatttttttgtttatttaataataagcttgtatataaaacataattgcatttatttaaattttgggttaattttttttaataaaattgtttaaaatcataataattgcatccggtgttagtcaaataactgaaaatgctttttttaaatttttacaaaaaaactaagaatgaattgaatggattaattaatttcttacttggattaaaaaaatttaaataaaaatgtaaaaaaaaatccaaaaaaatctttctaaatgcatatattattgagcaaaacaaaaaataacataactaaattgactaataaaaattaactcatttttgcaaatgactaaattaattattaacacaaaataaattaattggtttttaaacctttaattcactaaagaacttattaaaaaatgaatacaaaaatagcaaatattcgagtaaaaccgtatatatttttcaattatgataaatcgagtaaacctcttatgatttataatattgtttttaaaatagttttacaaaataaaatgattgaacgaaatggcgataatgatataatattaattatttaaacttcaaaaaaaattggtaaaatatacattttagtaagcgaggatattgattgttttagtaaattaaaaaactaataattatttaaataaaaggttaaaaattattttagtcaaat

SEQ ID NO: 28446 - DNA, 865 bp, Heterodera glycines
aaattaatgaaaaaaatttttaaatttcgtccacagctctgaatctgccatttttgccctattttttctatttttctcgcgatttctgcttatattttaggatttttcgacccaaaaaatcattcaaagctttattctgatcataaattactattaacaattttttgataagtttttttaataaaaattttaaaaattaaagaaaaaaaattaatttttgaaaattacggattgcggattacgggaaataaaataattctcggtaaattcaattcgagaacttgctaagcctagacagatagatattaactcaaacatctaaaaaaaattttaatttaaagttggtgtcggattttccggctcccgacggcgggaggcgtcaatggcaactcgtacaaagtcaactcgtataatttttaatgggtgtggccatatcttttttttaagtcaaccaaattcttcaaatttgatatcattcgaatgctctccatgtttagaagcaatgattaagcagaagctaagagattaagcatctcacaaaaaagttatctttactggtctatttaggacgctgatcacgaatacgtaatcagattttacttagacttcgtcaagacctcagaatccctgtgtgattgggattctggggcatcattttgaggggggggggggcaagttcggatccggacggagtacattaattttctaccatttattttggggttttcaatttttattcatttaaaaaattttttattttattaataataaagaaaaaattttcatttgaattaaattattttttgggtgaaaaattttatttaaaaaaaattttttaaatttttgaatttaaaaaattaaagaa

SEQ ID NO: 28447 - DNA, 1702 bp, Heterodera glycines
acgcgcattagccatggtcccatttgtttgagcaaatggtggtcaaatgccatgttcactcggcaacgagcccatcgccgacttcgaccaagaaaatggagcaaatcgtaaagcaattcttgtgggagacgtatgccggtggccattttgaagagtggagaattttgtattatggtgagcaatgggcgtaggagggggcaatttggggcttataaatgagtgggcaaatgcttaaaaggtgctaaatcatttccaaaattcgctaacatggcataatttatttaaaataacaaaattttacattattgatgatatcatctaataacttctttatctagtgaaattttaggatagaaagagcaaaaatttactaccgaatcaaagtaaaaatataaaattttgttacttttaagcaaatttatgccatatttttccgatagttaagatggcatttttacgaaatgacttagaagtgtggctgaaatgatgctgtccgcctcccagaaggcaaatcaatgaatggaatcaatgaatgccgtaattggatatagaaaaaatgcccgacacgaccgacgatggcatttattataaaaattaaaaacataaaaatgaaaacccatcgcaaataaatgaattaaaatttatacgatttatccggtataatatgtgtatatgcgtatgaaataaaagagtgaatacattattagggatgcaaaaaatatgcacataaaacatgtaccaaaaattgcaaaatatgcactaaaaaattaaaaaatgcatataaatttttcaaattgggggaaatgttcgaaaattctccaaattcgttaaacataagctaaaaatctcgaaaagactaaatatggtatgaaaaatccttttataagataaattataaaatcaacctaaaatttataaattttaaagaaaattgagtaaaaaaccgaaaattttccattattttagcataaatttccaaaattaagtaaaaaccgaaacttttccatttttggacttattttggcataaatttccaattttttcaagttgtattttaaatacaaaaatgaaaatttttgaaaaattcaaaatatgcatatggaaatatgtcctataattcatggctcccacagtccacaaaaattatatgcatttgcatttaatttgcatccctatgaattaggttcttagaagtctttatagtacgaccgtgtcttttcgtcatatctgactacattttgtgcgctgtattcctctcggaactgctgcatgcctgtttaaaaattttatggcattaatacttcataatggaaataatggaaattgatcagtaccattaattaattaattaatcaattaattaattggctgggaattacatttaatattttggcaaaaatatatttatttctatattttgcacttttattttatgagtttctgtacaatatttcgtcattttttcgtatatatttatttaaatatttctgggattcttaataaatgtaattccgagccctattaataaattataagcgcaaaattttcttccaatgacttacggcctaagatcaactgtaattcagtttcattggcggctgatttagtccaaattcgaatggaatttttcgcactggcaaaaaggtccgttcctcatcttccatatccttctttactttcttctttggctttcttttctgtg

SEQ ID NO: 28448 - DNA, 1080 bp, Heterodera glycines
gtaaagcatgctttgactatgtggccaagatatcgcagaaggacaacaacagttcgatgaagaacaaagtgaacgcttttctgactgaagtggccgaacgaatccatcggttgaaacacgtacagaggacgacgacgcaccggtaaaagcaagggaatgccaaatgggaaaggaaaagccaaaggaatgccaaatgggaaaggaaaagccaaaggaatgccaaatgggaaaggaaaagccaaaggaatgccaaatgggaaaggaaaagccaaaggaatgccaaatgggaaaggaaaagccaaaggaatgccaaatgggaaaggaaaagccaaaggaatgccaaatgggaaaggaaaagccaaaggaatgccaaatgggaaaggaaaagccaaaggaaagccactaatccgaataattggtagcaccgctgctgttcagatggagcgcctttctgctctattttggctatgcccccggcgatgtgaaggaccaaaagccgttgaacgtgttcaaaatggtcattgaatttgcgttggagtaccggacgagcaggtcgaaaaccaaaaactaatggcaaaactcaaatcgttttaatcgcaccatttccagggacaaaattctgcaaacgcggaaacgcctgcaggagaagcgagagcggaacaaaacgcgcgggatgatgatcggcgcggcacagaacgcggcggtgcagcggaaacggtccggcggtgtcggacgcggcggcggcggtggcgaagtgccattgacagacaaagaggcaaatcggggcatgaagctatgacaattgggtgttatgccattatagcgtcatcaagaaatgtcgcgcattttggccggagggggcgctgccaacggagacgaaacgctgctacgaaaacggatcggaccgggcacagcggtggcggtggacaagtcgagaatcgcggcacaaacggaaggtaatacggcacggacaaacggaaatggcaccttccaattttttggcattttagcaatgaaaaacggtgccggaattacgactggcgtcgccgctgatgacgacgaactgcttgacggcgttgt

SEQ ID NO: 28449 - DNA, 2001 bp, Heterodera glycines
caccaattggggccctgaacaaaagtgccacctacagattgtttcaaatttgcattaatctcagccgacggatcagcagcgatcaaatggcactcagggtaaattttgatcagttcccgttcagctctaaccgtatgtccaacacctgcaaaaatttcaaaatttagactaatttttattttcttttttaggtttgtaccgaatgtgacaactgtgcaagttcgcttttgaagattgacattgggacaaaagcgcataaaatatttaaactcatcacttgaattcaattttagaatgttcgctttgttcatttgctctttccaaatttgctaaaaagcaaaaaattaaatcaaaaatattattaaatatatttaacatgagtaagtataataggtaattaattagttaattatcccgaacattgaaatgcggttgaatttgtgtccacgtgccgttcacatctatggaaccgtccttaagccgaacatcgactaaaccacgctgctgtttggcaagtgccgcaagaaaatttgtatcattaacctttggacattctaactaaaaaagtgacaaaaaataaaataatttaatttctctataaaattaaaaaactaagctgaaaaaacttatattttaatttttctaataaatttttacatttttacattaatttttgacataatcaaattataattatgtacaaaatgaattcaaaaaaactgctaaatttcattgctattctcttcttacttttggaaaaaaatagtaatgggtccataaaatattaaattaaattaattttgaccttttttgaaatatttttcgatgagtcaaccgttcggatcaaagcatatacaaaagcagcaattaacatcattaaaatgcatttcatgaacagtccaagccatttgctgcttttgctttggaaaattattcggtgttcgaatcggtcgtcgtttaattgcgccatcggagtgtattcagtgtttgaattggtcatttggagactgtcgatttgatttcaacgaattaaattttaattatcctttatgattttggcggtttttgtattttaaaatattatttccaaaatttttgcagaattttgctaattttaaaaatttaattaaataaaatgattaaatgtatattttttttcaatcaaaaacatacatgaaaaaagggatgggtcaaccaacggccggtggtgccgaaaacgccgccgggattgaatttaagccaatctatgaatttatatattttacccacatttttgttttcaaacccactggcggatttaggaaacgcaccagcaccactcaaaatcggatagatttttgtgcgaaaattgtttgattttcattaatagtgaatgatttgcgaaatgataaaaacatacgaaactcaaaagattttaatcttgaacaaaaaatcgcaacagaagtgtttaatgacctaattaattttttatagtatgaacaacggcgcgagtgtattattttttgaaaaatgcatatttgctggaccgtttcttgaactcttttgaaaaaaattatataacctttaaaaccaaatttgaaaataaaataaaaatgaaaacaaatttagatgtatttaagcttttcacgatgttatcgctcaagaagttttgttgccatttcattgccagcaatcatttttcttatagcgattgcaaaatcaaaattatttgcaaaatttgaccattacggtaaagtttgttttttccttttttgagttcttttttggttctagtcggttttacgcgtcccatgaatgaccacactcagtttcttaggcattacttttttcatagttcgtcaatgcctttttcttggtatcaatcgaaagcttgaagactcgggatcttaaaatgcaagaaaaggacaaatattggcattaagagaaagattacaatgggaacacttgaaattcagcttttttgaagtatattcgagaacttcattttgtctattttctttt

SEQ ID NO: 28450 - DNA, 601 bp, Heterodera glycines
aatgtcctttttatgccaattgcctttttcactgttgccatccgttttggggatgttgtcactaacggccccaggttttgggtggatttttggactgtgggagtatccgcgggaggacaaaaagtctatgtttggagcccaatgtcctgacaacatcctgaaaactgttttaaacacttggtattttattacaatgtcagacaatcataaaattagagttccttttttccttttcgattaaaagaaaaaaaaagcacaaaaaaattgctttctctcccaattaattaattacaattgtacgaattatttcttcccatttgtattttttgtacgctttaatcgttttctgttttttttgtgccgtaactttcgatttttagtgatcatttattgtatttcacccattgtgatccaatgatgaatgttacggcacaagcatttgttttaatatgaacttttcaatgcaaattcccccccccccctccaattgataccttttcacttattcgtttgtgccgccccccgtcttttgatgttgccttccccccccccccgcttttccctccctccctcttgcccttcacgccgcttttcctctttt

SEQ ID NO: 28451 - DNA, 1539 bp, Heterodera glycines
ctgacgagttatgggcccaggactcaaatgtcccgctgaggtcaaaaattttttctatttctggaaaaaaatcgaaaattttccaaaaaaattaccaatcgatagagctcgaaaaactatgttttggaagtggtctccgtttttctgggaaaattcgttaaaaaatcataaaattaaaaaacccgaaaaccgttttttaggcctaactcgaaaaattttgaaaattttcgaaattttaaaatctggaaaaatcgagcttattgaactctacaataagtctgctggccaccctgcgctcaggtcaaaccctaatgagttattcggctggtactgaagtgggaaaaaaaaaaaataactgagtctccgtgtctgtacaggtccgggatttggtctgatcaaaaaataaaaaatactggattatagaggacacttctgcggagtgccctcacagcgggaattttttgatccgagtttcagaaaaaaagttatgggccgtcaaacgcacgaaaaaatgagaaatccgtccctgggactcagtcgtccacgctgattttttctctatagttttcccagatgcgcctcaaaaagttgtaagacccttccaccactttcagggcgctcccggccttcggccgggagaaaatggttttagcaacgaaactccttgtcaatataacgtatatattaactagcgggtgcgtgaaccgtcggatctggcacagggataaagcgcttcgcgcttcttgagcttcgctacctaggctgtgaagcgattcaaattgatcgaattggttggagagatttttttgaatttttaaaaaattataaggggtttttagtccacatcgaggctcaagacgggcgcttcgcgcccttcgcgtcctcgaacgggcgcttcacgcccgtttctaatttttgttgtgcttttcggccgcttcgcggccgttttttaaattgtgttgagtcggacgggcgcttcgcgcccgttatttatgggttgtggagtaattgttggatccgaagcaatttgggattgatcaaatagaggtaaagggtgcttcgtttccctttttaaattttgttgggctcagacgggcgcttcgcgcccgttttttaaatttgttttggccatacgggcgcttcgcgccgttttttaaattttgttggactcagacgggcgcttcgcgcccgttttcaaattttattgggcttgggcgggcgcttcgcgccctagaagaggtacaacagcgattagaagagtgattagaagaggtacaacagtgattagaagaggtacaacagtgattagaagagtgattaaaagaggttcaacagtgattagaagaggtacaacagtgattagaagaggtacaacagcgattagaagagtgattagaagaggtacaacagtgattagaagaggtacaacagtgattagaagaggtacaacagcgattagaagagtgattagaagaagtacaacagtgattagaagaggtacaacagtgattagaagaggtacaacagcgattagaagag

SEQ ID NO: 28452 - DNA, 1821 bp, Heterodera glycines
  unsure (1)..(1821): unsure at all n locations
tcaaatcatcatcgccaaagaaaaactcttcaattgcgncgtcagtattttgcaaatgnagtttggcgggtctggcaggccaaaatgcacacagcttaagttaaagcagctgtgcagccgccaatcaaggtcggctagggcttcaagctctgctgctttatgctgtgccggagtaataatgccttgcggattgtacatttggtctttgtacttgttccacaattctatggcattactcggctggccatagaccatgatgctcacaaaaagccatctcatctgatctggccagcgcgacagagctgcctccgccagagttttgtcccaaattttgccgtcttcaagaagaccatgcattattgcagcatcagtgaatgaggtacaaagcaacccattaaccatcttaagatgatctggatctccaggaaagtgacgcataagtgaatagagcgcgaacctttccgggtccgatgggggtacaggaacaattcggccgataggtggcctttttatttgctgccttttgtacaggacccatttgtcctttgcccatcggaactgctctgggactttttcaaaaagaatgtccttaaactttgggtcattcttccactcattttgccattgtttccaatatgctgaacaatgcgtttctggcagttcgccttgctggatttgttgagctttgctcaccagctggaatgccctatatacaatgggctgttggtttggcaaatgaattgccaatttgacaacatgatgtgaaagacgggcaaatggcattgaatgaacaatggcatatgcttccgttgcaccacggaagttcatcttggcatattgagccggctcatcaattccgattttattgccggactcttctttgcactcgacataacaatgtcctggccctttaaacgggtacttgagtgcgtacttaatattcgctttgttaccatatgcaaacagtacattatggtgtactcggtaacgcagcagaacataaggattatacggcacgacatgtgagttgtcgtatattaggccgtttacctctaattgggcaccaccatcagatggtgaaggccggaaatacatcgcgggcctatccgggcgtaaaacagtacattttgagtaaggggctgggaaccccttcttgcaccgcccgtaaattgggtcgctaggaccacaccaactgtcactgcatctgtgcagttgcatatgcattgtttcgcggatttcgcgatgcattttcgcaatgggcgtgtcgtcatctttatcgggcaaagatggaatgtgcgcccatatgtattcctgaatgacatgtggtactgcgtccaggtcagtttgggcaacaatgtgagcgtgtgggcctcctcgaccttggaactccatggattcaccatatccaaggattgttccaaagaactttttctcataaagttcttctcggaactcggcgatgttgctggtccagacacgcatccacatgtcaaaacggtcagtaaatacttgaccatttttatatatattctctttgaactcaggccattccctgttgttcgtgaatgtgatgaagagacgcgcctttttcgcgtcatggcaccgtgcaaaaacggtgttgcaatcctcatacattttcttccaatattggagagaatttacgttgtgctcggacagccgaacaacactgccaatgtcatcaacagttttctgttgggcattggggttttgccgtgcttgctgcctgttgtattggttgaccaaatactgcagcaaattttttggagtgctgatccgcaggtccatgtctggtctgcgcaa

SEQ ID NO: 28453 - DNA, 1294 bp, Heterodera glycines
ttgaaatttgtgactaaatttgaagaagcaaattttatagtaataatcagtttttgcaaaattgtgaatgcgaaattatgaaaataaattaattaattcattgaatgatttcccacacattctgtgctatccatttctgattcatcacatttattatcatttgatttaatagctaaatgatttgttatcaaatttattatttattgactttcccataaaaggcgaaaaaaaagttaaaaaatgaagaataaattaattctttttttttgttgtggaaatatgacgaaaaagtaaataaaattgtttgaaattggcaagtgaaaaataacaaaatttaggaaaaaaaattaaacacaataaaatagtttgtctttaatttgttaaaaataaaaatgtcgcgtatcggaaacgaaagtgaattctttcaaattttcaaaatatttcactaagaaaataaaaactattagagaccggacgggacttctggtactgagtcgcctaataaaaattttaaaaaattctcaaaatatctctcctgttaatattaatgcgcgctaaatttgttttatacccgattcttttaaagaaaagttattacgaaaaccctgtttttaaaaatccggaaaaatctcggttagcgctcagtttatgggtctttattctcctggtttaaagcgttttaaccatccgctggctaatctttacagttagaagactcatgaaaattacgtgattttagaaaatttcaaaatttaaaggataatttttaaaataataaaatacattaatttaaatatttattgtcaatcttttttcaaaaaaaaagtcatataaaattagcagatgctaattgaaattcatgtgttacttagaatacattgaaggctgacttctaaaataatttattggttgggaaaagccttaaaaacaaaatgtagaaaattttcttaaaaaacatataataacaaattagaaaattctggcaaattgatcaaaaatttaagtgaaatttttaaataatatattaatgagcaaattaaagttgcaaatttacttaaaaaattattaccaatttttcgttagacgacaatgcctagaaccaaagccttttggcacttcgcttcttcaagtggtttgcagaggaacacggtgtggtggttcaaacggctcactcaccggaaggagaaaagaggattggccattacagcctttatggatggatccaggccgagcggagggccatcgaagtgaatggtaattgattttttttttggattatgcgtttcatttgaaa

SEQ ID NO: 28454 - DNA, 1566 bp, Heterodera glycines
ttctccctcattcatttgttgtgttccaatttattgtgccctgctcccttccctcgctatttattatatttatttgtgtgaaataaatcatatttatttccttgactgttgaacggacacaacaatccgtttgattatattttgattgaatttatttaataaaatatattattaataataaataaaaaaatttctgctaaaatccttgttttcttgtacaatttttttgacattcttagaaaagctgtcaaaaattaatttgggtgtcaaaaagccagtcactaataaggaaattgtatgattaattgttctctattttaaatttatgccattgcttttgttcatgaccaaagtcatcgtctcaactcggtgggtggcgtctgagttcttcgccactcctcctatgaaaataagtcaaatttctggggctttactcaaacgaaagtttgagcttttttgttagggatccagcaggacccgcattgctttttggaatgccaaataagttcgattaaataaagccatttttttaaatccttaaatttttttcaaaagttgttaggtaaattttagttttttgggatatttttttaatttaattctaatttttttcgaaattttcaaaattccatgctggatcctgtaagttttaaatgcaggatttgcggaataatcacgcggaatacgtatcttgtttgtaaaaattttgacttaaccaatcccttgctgaatgcgaaaattttagttatgacttactaatattattgttcgatgttcgggaaaattatcatcaataaaaattttaaattaaaaaaacttttaaattgcatattcctaatgtatttggttgtctatttattgttcccattcactctccaatcacattttgtaagataaccatttttctcagttttatttaaggcatgagtcttttgaaaattcatgaaaataaattggaaaatataaccattagggctgccaaaaatatgtacaaaaagtggtcaaaatatgtgggtcctacccaaatcgtcccttccataacgtcaccacccaatacggcaccacccaaaatgacaccaacccaaaacggcaccattccaaaaggtcagcaacccaaaacgtcacaaatctagaccaatgattaaatttaagcaaaaaggatcagtcaaactaacattattttaaatcaaaaaattattacaatataaaattgacaataaattactagggcttgtaattatatggaaatccatattttttttcctggactgtgggaggcctgaaacgcacgaaaaacatgtttttagcttagtttgaagcctataggacgtatttctaggttcacaaggcaggttcgtacaatgtcgtttcgtacaatttcaaatgggaatggccataacttttttgttggtcagttaatttcttcaagattggtatcattctaatctcatgtgtttaaaagctatcattaagcagaagctaagcgattaatcatctcaccaaaaagttatgatttattgtttacaaaaattaggattttccttgaaatttttaaatcttaaaaat

SEQ ID NO: 28455 - DNA, 1162 bp, Heterodera glycines
  unsure (1)..(1162): unsure at all n locations
taagtaattttctgaaagagctcaaaagcagctttcgaatggtgtattcaattaattgtttacttgaaaattcacagagatatgtccaaccgaatctgnaaatgaataatggcgtagtattctataaaaaaattttttcttaggaattttacagtgcgcagggatttgaattatccataaacacatcatagggtaaatatctagcaaaaagaaatttttttacacaaaatcctagtccagcagacagatgaagcgacttaataaatcgattatggatttgcaagagttaatttctcaactcacactagctaacacggaatttgccgcgtgtaggcgtaaaatgagccattatgaattacaagcgtatatcttggtccacattgagtgtgtgggcgagattaagtaattttctgaaagagctcaaaagcagctttcgaatggtgtattcaattaattgtttacttgaaaattcacagagatatgtccaaccgaatcttgaaatgaataatggcgtagtattctataaaaaaattttttcttaggaattttacagtgcccagggatttgaattatccataaacacatcatagggtaaatatctagcaaaaagaaatttttttacacaaaatcctagtccagcagacagatgaagcgacttaataaatcgattatggatttgcaagagttaatttctcaactcacactagctaacacggaatttgccgcgtgtaggcgtaaaatgagccattatgaattacaatgaattacaagcgtatatcttggtccacattgagtgtgtgggcgagattaagtaattttctgaaagagctcaaaagcagctttcgaatggtgtattcaattaattgtttacttgaaaattcacagagatatgtccaaccgaatcttgaaatgaataatggcgtagtattctataaaaaaattttttcttaggaattttacagtgcccagggatttgaattatccataaacacatcatagggtaaatatctagcaaaaagaaatttttttacacaaaatcctagtccagcagacagatgaagcgacttaataaatcgattatggatttgcaaagagtaatttctncactcacactagctaacacgnaatttgccgcgtgtangcgtaaaatgagccattatga

SEQ ID NO: 28456 - DNA, 1146 bp, Heterodera glycines
  unsure (1)..(1146): unsure at all n locations
aaaaantccggatccaattttaaaaacgaaaatagttcaccaaaaggagccgcctcacggcggggcttaaaagcattgtacatcataattaaaagcgaaaataattttcgtatattttttcacaatttatttcaaaagacaacaaaaaattgataaaatgttgaaacgaaatagtgcacaaaaagggagggatgcttagacgaaaagaggaatttttagaaaagaacgcaccccatctgatattcccatttttctgtttcacaactggccaacggcgactgtgctcattgacacgtagttgtccaattaaggtacttggactttccacagtaaaatgtggtgcaaattttggaactgtcccgcctcacggcggggcttaaaagcatttgtagcgcaataaaagttttttgttttgaatttttcacaatttatttaaaaaagccaaaaaatccggatccaattttaaaaacgaaaatagtgcacaaaaagaagccgcctcacggcggggcttaaaagcattgtacatcataattaaaagcgaaaataattttcgtatattttttcacaatttatttcaaaagacaacaaaaaattgataaaatgttgaaacgaaatagtgcacaaaaagggagggatggttagacgaaaagaggaatttttaggatgggacgcaccccatctgatattcacccttttctgctccataagaggtcagaggcgactgtgctcattgacgcgtagttgtccaattaaggtacttggactttccacagtaaaatgtggtgcaaattttggaactgtcccgcctcacggcggggcttaaaagcatttgtagcgcaataaaagttttttgttttgaatttttcacaatttatttaaaaaagccaaaaaatccggatccaattttaaaaacgaaaatagtgcacaaaaaggagccgcctcacggcggggcttaaaagcattgtacatcataattaaaagcgaaaataattttcgtatattttttcccaatttatttcaaaaaacaacaaaaaattgataaaatggttgaaacgaaaataatgcacaaaaaggggagggatggttaaaacaaaaaaaggaatttttaagaatgggacgcacccccatttgatatttccccttttt

SEQ ID NO: 28457 - DNA, 1487 bp, Heterodera glycines
attaaatttcgtttccactgactgcgaagaagcgcttctcatccaccgctttgtcattggagtacatcaacgtgtcgtgctctgatgcgccgttaattgccgggatttgctggcttttcggctttacggccactgcctccaaattggccaccaccaccgtttgcatgacggcgccgttcgttccggcctctgcgctcttccagctgcggtagatgtactgcgagcgcaactcgcacccgcgcaacgcgtattggtcggccggatcgccagcgatgcggcaacggatgaccgtggaacgatccatctgtatttgaaagcatttcatgctgctgatcagctatcgactcccgccattaaccatccgcatcgctccccactgaatctgatcgattgatcacctcattttctttcacttccttcgggtcgcatttggcacacgggtgctgatcactttctcccatttgccacgcattggtcttctgctgatcagttgggctgttctgctgatcactttgctgctgggcccaataccttaatttgattggttatgccaaagcattgtcaacaacaacaaaagagagcatactgttggcattgtgcgcattgcgcttgcggctgatcagcctggaaaccgttggccacgtcggcaatcttttggcactttttgaagttgatcgtcttggtcacattgaactggtgctgctgctgctgtccaatgcgttgcgctttgttgatggtgtacattgtttggcacgcgccttccaaggtgatctgagcaaaggttgggggactgattagcaaaccacgactaaagtgacaatcacctcttggattttgaacgatttgctctggcccgtcgcctcctgttgaaactgttcgacacgcgaagcgccgctttgatgcaagccctgtgcattgttttgcttcaggttcaactaaaaggaggaaattttggcaaacgaacttcaagcagttcggcatcagatgcccagtcacctggatgatcttcaacaccgcttttttgacatttttcgaccactcctccgcgtcctgggggcacggcacgcgttcgatcactccgtccgcgtagctgaattggcacggggtcagcagctgctgctttgtctgctccgcaatgttcgtatgctttacattttaaattatctaagtcatgccattgttgcgtgttcacctcatcaaatgcttccattatctgtacttcttgaggctgcgacattttgctgttctgttggcccacccggcactgctccagtcgcagctgtgcatgccgttcggatgcgaagtgaatgttggccaagcattggatgcgcgtcaccgccttttgctgcgagctggccgcgctttgttccgccgattggagaccggaggcaatttgggcgttgtagatgaagctgtactcagtgtccttctgctggaacggctccagcaaccgggcggcgcttttgtcgcccgactttgggccaaac

SEQ ID NO: 28458 - DNA, 2199 bp, Heterodera glycines
tttttaaaattaccaattttttccggcggcgcttttcgccatcgtccgactccaattctttcataattatttattctcccacaaaagtccttttgacaaccattataagctgtggcaatttctaattttaactttgacctctcttttcttacatttttttgggttttttcggtgccatccgtcgctttttttttttggtaaattccaacgctttgtaattacttaatttaaataattaaaaatccgccagtgttcgtcgtattattattattattaacattttttctcaaaatgaaatgtttgcgtcggtcgtcgcaattattttcgcattgtctacagaaatttgacactttgtccccttttggcaaatgaattggcaaaatgtgttgacaaatgtccgtccgtttgatgggaaaatgcggtgcccttttcattttctgctttttctgtgtgaactttttcccttaaattttgttttttcatcatttttatgtttattttcccttttaaatacgatttgctcccttttaaatttcattttttaaattttgacattggcattttaccctccccctttttctctgatggcactatcctcccctatttctcaatgttcttctgctgctgctgtttttgtcgaccaacacaaactccaactgctccggcaaccacggcactcttccctttcttcttctccctcttcctacagtaacccttccccgtacagtacgccttcttctgatgacagtataacatcatcgttgaaaatgcaatacaacggaagagatgagaataacgacgagggcgggcgatgggttgcgatggcacgggcagcggcggacgacgggggcggcacgggcggaggcgttttgtcaatgctgcaaaaaggtggggaaggggggaagacaggtcgagactctcgactgaattaattggaaacaaaggaatggccgaaactgatcagtcagtcagtgattggctgatcggggagcttttggttaagaaaacaatacaaatcattggccgatcaaattatcggcctaattatttaattgatcaatcattaaatggatactcccaattggtaagcttttgtttgttaagcattctgctccaatttgttcgcttcttcgtcgtccgccacctatcggtcggtgctgacgcgcgcttcgatggactcgggattggaactggacgaaatggaaaagaacagaagagacgagaggagaaagcgggacaaacggagagagcggacgagagaggaagaggaggaaaagataatggaagaaggagagagtggcagagagcgagagaatgaatcggagaaggcgaaaagtggagagacaacggcggacgcagagagcgaagagacggagagagcggaagagaacaaaaaagtgagaaatttaaacgctatttgaaataaattttatagcattcaaaaaaaaattggccaattttatgatcgaaatgaacagaaaccttttttataatatcgcagaaaaaattattaagatccggcggaagtttttgtcccgaaatttttcggatgaatgaaaggcgggaacgaacgggccaaccattcccaaaatcaaaattggcccctttggcgtcacttatgccgaaatgagtcctaaaatgggcataatttgtgtcttatgttcgtcggtgttggatttgaaagtacaaaagccccccgagggccatttttaggggtaattttgaataatttagtgggagcattcattgtgctttttttattcaacaaatggaaatgctttttttaaattgggctataactgtttgggaacttaaatttctttgaaaaagacattttcaatttcaaaaaattaaaacaattattcaaataatcggccgtttccctcaacttaactgtttccttaacaaccttttcaaatgcgtttttacattttctgagtgtttgccgctttaaacatttaaaaattcattaggcacagtcacgtgaggtgagcacaccttttgttctttgttttcgacgttttgtcacctccgaaaaaggctttgctttttcaaacgaacgaacgcaaaaccatcgtcattttgagacaattttttgaaattcctttttaaattttgtgttttttgcttttttgaaacgttcattttagtttttctaattttgtttttgcttttattgtaattgttgcgtcaaatcca

SEQ ID NO: 28459 - DNA, 1111 bp, Heterodera glycines
tccagattgtgtggtggttggggttggtctgtgtagaattggtgacaatttcgtccaaattggcatcggaatcgtccgcatttggcacattcattgaggaaacgacaaccctgggccatctatgggacgaattgctccaatttctgaaccatattctggtgcatgaggaaaaaatgttcatactgtatcaatttgtgcggttgttgtactgtaacgaaacgatgcgaagagacaataaaaaatggacggcacagtttacgaatgccccatttatcaactttcttgtagaggtaaatataatgagttttcggcactattcctggtggtcctgactttttaaatacgtgtccttgtccttaattttgggataccaatattttttttttattttccattttcgagacaaattctaaatattttctcttttttttgaaattttgatttataatttttttttgatagttataatcaagcagggcagtcagatgtgatgatttattcatcattttgattatttaatgagtcaatgatgattttttaattatcaaagcgcaaattaacctaaattgccaattttcagtgaaaatttgttaaaaaatggtcaaacttttcaattttccccggcggtgccactaaaacattcatattattattattatcgctacaaattttcgttgaccgataaacggtaatttactgtattaaattaccatattgcaaaaaagtttgaaaaaaaattgattttcatatgtgcaattaaggaatttgagaagggcatttgcgatgatcatcagcagctcgggcattgggacattccaaaatttaacaaaaaggaggcaatgcaaatttatgagtcacttatggcacagagagaaagggccaaaacaattaatttatattgtattggcatgttaattgaaaggttcattaaaatgcgaatatttttttgcaaaatgaatgctgatcggttgctacaaagcaaaaagaagctaattacgttaattggggagacaggactggttcagttggagctaatgtatccggaagtgatgaaattctgtgggttcaatggttaaaacagcagatttacaaatttgagaggcataggaat

SEQ ID NO: 28460 - DNA, 1792 bp, Heterodera glycines
ttggtcaaatgtttcctaacgtttttgtcaccaacttttggatatttaaaattttttattcttcgaaattggaattgagttcgatgattcggggatataaaatttttgttttatctttcaactcaacaatttttgccaattttccacagaattttcgccatgaaaatgaccgcttctgggtgttggcttcgcatccgtcgttgaatttgttcgccgccgggcacgacaatggcatgatggtgttcaaaacggagcgcgaacggcccccgcactgtgtgcatgacaatttggcattttatgtgaaggagcgacagctgcgccgattggacatgaacacgaggtgagattggatgggtatattgcatcaatgttttcaaagcctttacaattagttaacgaaaatctatccaatttagttttccattgcatttttgttcctaaattttgattggatgacacttattgttattaggtaattgcgatagttattcaaaaatgggttaatatcaaattttagcccattttcgaattgaaaactttttacaatagccgtagtcagatgtcgtgtttatccaataattaaatttactatgaaaatagtcctcctttaggggaaaaactaatttttaatttccagcaaagacgtggcgttggctcaggtgaagctgaacaagttgactcagccgtactattcgctgcattacaatccggcggagaattgctttttgctcgtcacgcgtcccgccgcaaacattgagaacagcacatacgacttgtacaaggtttctcaaaatttaaacgcatgatgaaatgaatttttggaatatttaacattttttatgttcccatatatttcctcctaaactttgcacatttttcgcacagatttcggccaaggaaggcgagttggacccgctggacgcgaaacggtcgccgggccttgccgctgtttgggtggcgcgcaatcgattcgccgtgttggacaaaacgcatcagctgaccattcgggacttgcagaaccaggaaagtcggaaggtgagtcgtcaattaacttgtttatttatttcagacatttctgccaatttgaattttaaaaatgtttgtcttcctaaaattacctagaaattttcgaaattatgtttttaagaaaaatgctttaatgctatgctattttttcacttaaatcttatattttatcaccaattggtcaaggttgaatacacgggtgccgtcgacgacattttctatgctggcacggggctgttgctgttgaagaacgcggactctgtgcaaatgtacgacttgcagcagaagcgtgtgctggccagtgtcaaggcaacaaaggtgttgtaacacaaaactgggtgttcaaaattactgaaaatttgaaaaaaagtgtttgaaattgaagttttatccaacgataaacctaaatcgtcactctgtttccgcaatgtttttgctttcaggtaaagtacgtcatctggtccaagaacatggaatgcgccgctttgctcagcaaacacaccgttaccctcgtcaccaagagattggaggtggcgttgtactctttggtctcgtctttcaatcttttttctccaggtgctcggcactgtgcaggagtcgactcgggtgaaaagcggcgcttgggacgcgggcaatgaggcctttctgtacaccacctccaaccacatcaagtacgcgttgaccaccggaggtgaccatggcatcatccgcaccatggatattccgcggtacattttggcggtgcgcggcagccgactgtactgct

SEQ ID NO: 28461 - DNA, 1562 bp, Heterodera glycines
  unsure (1)..(1562): unsure at all n locations
tgttttaatgagacgatgcctaatcatacccgattttatagaacacaacgctacacatcttggctatgacaaaaggcaggaaatacttaaacgccacgctgggtaaaaaattatntaaaatttaatgctaaaaataatttaattaaattgttttccattntagtcgttcgttttggattcaatgtcaccgactttgccgataaagaacaacttggacaaccttttgctggcaatttctttaccgcaacacaccaagacacggacctcggatattgatgagggacattgagtgaatttgtaaaagtagtagttttaaaaaatttaaagttgaactaacaaatagaaaatgttaatgaaaatagacttttcattttgacgtactatttctttgtctctgttcatagaaaaagaaaggtttcacttcagctttataggcttagcatctgtttatgagtcgcacatgtaaatctttttaactgggaggccaaaattgcaaagctgcgcagtagggataataatttaatgttcgacttgacttttcctccgatgtaatttgaataagtatttaaaagaaaggcaagcacaaatttgaaaaaggacaaattcacaaagaaaagatacgtttatcaattaggtcggagtatgtaaattggaaatacaaaaataatgaatgatccactttatgcgcgaaggaaggagcgagttgacacaaaataagaaataaaaaaacgaatatctggcataagtcaaatttaatccctattcaacacctccctccttaattcgagaagcccagaaaaatattcatttttaatatttcgattatggcatcgaaaaaatacatttttcttcggtatggagttgggtgattttagtgttgtgatctccccatcctccgccgtcgttatgttctgctccgccgttgatccccacatcctccgccgttgtgatctccccatcctccgaatgccagtaaccggcaatttggcttattttttgtaattatcataattaatataacatttattaacaaaattcgcaggaaaaatggaaaatatgtcaatttccgtcttgatggcagcaacgcgtcatttccaatcattcggttgcatgtgaaatctgcatataaaaaggtcaatttcaatcaattaagtcatttttgtattcaccccccccccccccctcccgtcctcccattcatccggtgacaggtgcacgtgcccggcaaaatgacattgtcacaaaaccaaaaaacggaaaggcggggggggggggggggaaacgaagaaaagatcgggccgtaagataagcgcatcaacggcaatgcaggggaaaaagcagtcgccattccctgttcgttcacctgcgtttgggtcagtccgagacgggcggctaattcggcacgttccggcaaagccaaatattgtgattcattgaatctgaacaaagaatggatggatattttcaagcagcattgggaactatgtagcgaaacgaaagtagtcaagaaaggcaatttgaatttttgcgcactttggcacattctacgaaagtgcccactc

SEQ ID NO: 28462 - DNA, 1526 bp, Heterodera glycines
  unsure (1)..(1526): unsure at all n locations
taaaactccgaaactcatttgtcacccnataaaagggtaggattattntcgcagagataatcgagattttttaaaatgtacaaatttgtaaatttggttgggaaattagttgtgcgtccttgggtggaaagttttcacataggatatataccatatgaagaatataaatcggaatttaacaatttttcgggaatcccgcaaatccggtaaaattgaatgaatttgatatcgttgaattgagcaaaaaccttaaaaatttcatcaaattatctcatctttcaatttggaactttaaaaaacgtgtttgaacaaaaaaaaccaattgaagcagaaatttaaaagatttgaagaaataaaactgttgagtccaaatgaaattttacaccgacgattttttaattagtaattttttaaattttcaaccaaatcaaaaacaatctttgtatcattctaaagccccgcacatgctcgcttcataaaaggcacaaaaatttgctagcaaatagaaaatttatgaagaaaaaaaaattcaaaatttcgactttttcataattttcatactgtaacttttttggtaattatcagttttttctctattcacagagacaaagaaatagtacgccaaaatgagagatgtttttttctctgcactctcttatttatatgctgtacgcgtgctggcgcgtttgttaaaaactgccacccatgcgcgtttgttaaaactgccagcgcgtttgttaaaactgccaatgggtttgaaaacaaaaaatgggcaaaataattaaattaatagcttggctcaaattcaaccaaattaatatttcgtggtatcattcaatagctttaattgttctctttcagaatataattttcctaaatttttaacttaagtataaaaaaagttatggtcacaaaattgcaaaaaatcttatgtcagcattttttgatcagaacttttttgaaactcactgaaattttctagaaatgtaaatatagacagagaattctaacggctatgaatgtatattgtaactttgtctaaattgcattataaagactaaaggaatttaaaagtatctatgaataaatttattgatttcgaaaaccgagttagcattgtggtcatttttgtttgttaaatgaggctcattctcccacagttatttttttaattgcctacagaggttcacgaagatcagccgacaatcgaccaaatttctcggtattattatctctgtctcgtctctcggacatttatctcgaattaggtggagactatgttagctttgtggagccaaattaccgaaaaatggaaagctctataaaacccactaaaagacaggaataagtttcaacaaagttatggccaaaaatgtctaaaaaactgctttcttgagtacttttgtaaaaactttgtaacacaaatatttacctaatcagatttttatgagcaagggaatgagataataattaaaaaggaaaaatggctcgaaaaataatatcaaatttattctctgccggaaagg

SEQ ID NO: 28463 - DNA, 1798 bp, Heterodera glycines
  unsure (1)..(1798): unsure at all n locations
gatcaggttgtactctcgtttatccaacattgcggacaaagattttgtccatccgattgtgtcccccgcaaattgtcctgtactcagcgtgtgatggcgccattctcatattatgttaaatcatactgggggtagatgctgctgtagcagatttcctttgagaattttcgtgcaaaaaagcaagccgaactgtaagtaaaaatattactgagtacaatcgcttgtaagaaggatcgggcagtaacactcggtcttcctccgatgccaccccttgcaaaatcacgcactcatccctttataacttttggatatgtgggtacgatccacttaggccctttgctacttataccgatctatttaggtccgatcatagcaggggttaataaatctctatcttgaccaaattgcaacaccatttaatgtagacatataaatccccccctcatcacgaaaaattggcaataaaactaattggtattgatcatcatattcttttatttacttcatcccgtaatgtgtattcatcctcacattgcgacaatacctgcgacgctgcactaaagtccagactatagggaagctatttccgaaggattcggtctccccataaatctgggcgcatcggttcatggggactgccccgaaaacccaaaaaaaaattttttggataaaaattatttaaataaactgactagataatatttaaaataggttatttctcttcctttcagtatccctgcaaagtttggtgcgcttctgatcagaacgcgaaaaactatgagtgattgaattttcactaaaaaagctaagcctaaagtttttcgctcgtttaaaaagcaattaaaaatttgtagaatttttattcatcgccctttttgatagaaaaagcatcagagggcttaattaacttgaaaataaaatttggtgcgtttcagagcactctctgaaaaaatattaatgaatttattttttcgaaaattcgaaatgtacgcaaaataagaataccgaaaaaatttcaaatgcaacaaaatggaaaggaaatttaaacctaattaccgcttcttctcagctgtttctttgcaaaatctgggatttttctgatcacaactcgtaaaactatgagtgcttgaattttcactaaaaagttaagcctcaactttttggcatatttaaaaaggaattaaaactttaaattggaacgaaaaataggaatattgaaaaatttcaaatgcaacaaaatgggaaggaaatttaaagataattgcagtttcttctcagctgttaccatgaaaaatctgggatttttctgatcacaactatacatctaaaagcaaatgtttttaaaagaaagtttgtcaaatcgtgctaagctcatttttccgttaaggatgtcttccgtccaaattgctgaaagcatgggatgactttaagaaggcaaagcctgaattggtggagaacgaccggccagacatttacgcccatgaagatctccatttcgcaatcatcggcctttcctatgggggaaaagatctggagaagtatacggttaggtttcaagaaaagaaaagaaaaaaactaaaatgaagttcttcatggataaaaaatggccgcgaatgttactccattttccatcaagtcgccttgtccctagcgatcgcagaagacgttctcgaattcgagcaccgggatctgcacgccgggaacattctcgtggagcagtgcccggtcgatgaaaaaattcngtaagcagcaaaagcaaacagtgnaaaaataatgtttttttgtaaggtacctttat

SEQ ID NO: 28464 - DNA, 1426 bp, Heterodera glycines
aaattgaaatttaaaatgccatggcatttgcctggattttacagtaccaccaaaactgtgccgttcaacacaatgccaaccaacgcaaccaaatatatcgcaacggccggcacaatcaaatcggcagacggaccgacagaacggtaggccaaataaagctgaaaatattaattttatgatgaaaatttaataaaattataataaattaaatatttctgttttattttatatttttattatttttatttctattttttaccgcattgtctaactgatgttattgagaatatttttgtgctgattgggagaaactttatatatttttttaattacatgtccttttatatttgtttattaattttaggaaattgttaatttttttcatttttgtaataataatttgcgtaatttttctttttttgtcagtattcgacactttttaaacattaaatattaatatgccaattaattaattcaaaatgcttgaggcaatataaatatttaattaaaaaaaataataatatggaatgaattcccataaatatttttaaaacttttttaaaataaattaatattgaaatattatctttctataagaatttaaaataaaatttttaaaatatgaatacaaaatttattaattcaaattcatgatttgccagctattcttaacatttttcctatatgaacttgattccatgaagaaacatttaggaaaaagttaagaactgatggcgcatcagacaaatattattcatattaaaattcaaatttcctgttcaaaaattttaaagggatatcaaatgttaaatccgggaattgcgctggagaaaattataagtgctttttttgtcggttttaaattttacttgtcaaaattaaaaaaattattccaatttatacattgcaacatatgcatgaattgaattaaggattaaaaaattcaaacaaaaattccgaataccgaattttaatgggattttcttagttttcttgcccaattttttgtttttataaaatccgcagagtttaaaattggatgcaaaatctcaatctgtacataccggagaagtatggtaagatttgaacaggacctatccgtgccgcccccccccccctcccccgaaatggaaaatgaaagatttttccagaaaaaagggcgaattttggaaaattttgcacaaaccattgttttttgaaaattagaccccaaatgggcaaatttatcttcaatttttgccaaaccactacaaattcctgccttttcgccccagcgctgaaaatttagaaaataaatcattaaagaaaaaattttttggccggaagagcaaaaaaaaaaaaaataaataaataaataaaagctcttcgggtgccctccccgaaatttttttctggacacgtgcctggatttgaaggcctaaattta

SEQ ID NO: 28465 - DNA, 1380 bp, Heterodera glycines
ccaacacaatttgcattgttagcagtcccattggggatttcattctgtggtcttttcggctgttcttcggcactttggccactgagaaggcgtccttccccctccgcttttgcaatgggtcgtccattttcggcacttttgtgccacccaaatgccccctcctccataaatgggcacatttggaggggaagggtcaaataatccgttatttattcccaatccccaaattcatgggataatggagagcacccatccactacccgtctctgtctcaatttacatttcaaccgcaaaatcccataaaaatttgaaaaattttattcgattactgtgcttgccgaatttgagtccctctaataaagcctcccccctccttcgagagttcttgaaaaatagggccacgagagcttatgtatttccggcaaatacaatatgacacaaatttttgtgattttaattcaaatttaattgaattgaattccagcaaatttcagtctgacgaataaaactgtgttttccaaagcttttagcaatgaatgaagaaggctcattagaatttggtcttcgaacacggccaaaaatatgtgattttttgaaattaaacaacaaaaattttgtgaaaaattaaaattatttggcacagacacaacacggcccctggggaagcaaattttgacaattgcaccatatcatcaacagttggcacatgttacagccggcacttttctgcaaatgttcggccaaggccaactcgtccaatgctccgaattcaaaggcgaaacaaaattttaaaaattttgtcagattttataaatccaaatgcattgcaaaaaattcctcggatttaactaattcaacggctttaaaattttaaaaataaattcaatttcaattgcccgacaacttttaaattgttaattccgccgcttttccattcgctttaattttaaattgtttttccccccttttttggcactttcccccctaaattgccaatttgttctctgaaatccatcactgaacacagaaatgtccaatttgtttggattaagccggcgccaaatgcttttttcacaaagtgcactttatttatttatttacttccattttctttcctcggccatttccgtccgtctcttttggccatggacttttaaaattggattttttccgttttacggcaaatatttttattttggtaagtaaattttaatttaaactttaatttttaaattgagattgatatttgatattaagtaaaatagtgattctcgagaccgaaaattttccgaaactcgaaaccgcgacttagaaaagtaaccgcaaatattcattattaaataaaataaatgataattattttgtttatcaaaggctaat

SEQ ID NO: 28466 - DNA, 1833 bp, Heterodera glycines
tttaaagaaagtgcgtcttcttttttgttatggtgttcttccatccttaaggctttgttaagattgtgcttcccccttcgcttctttctcttggccattcttccacaaatttatccgattctgatggatctgctgaagaaataacacttttcgattggatttcgtcaaaggacccggcctactcgctcagctctttttcgcaacatgtgctcgatcacttgggaaaaacgacggacgaagagctaagagaggcgcaacatttgttggctatggtccaagatgtgtcgcaaaaacctcagtaaaataaattatttataatttcaatacttacctaaattattggtttttgcttataaacaaatccaaaaaatttttatttttgaaatattattttgtttccatttaccgaggtgttttcggttgacacacgtttggccaatcccgaattctgaacccataatatttttaatcacttatactatgaagcaggactgtatccagtaaaaagtttcgggggagtgcaccaccgaagagcttttctttttttttttgttctccagaccaaaaaaaaaagattttccggtgtcatttttcaagtttttagcaaaaatacccataattaaaggtaccgtgacataagagggattgacaaacgcttgggcacattaaatgcacatcttcaaaaacttgaaggtgtgttctaatatttttgttcaattctatgccatcatttttgaaatgagtttttagcgaatctttctgaagttcgagaaacatctgtggcaattatacagccaattatccaagatggcacccaaagtgttgttgtcggacaaaggaacaaattgaaagaactgaggggaaagctgagtgagcagcggaattgtgccctctctttcatcagttctaaagaagaagtcattcaaaacagtgggtcattcattcatcgtttattctaaaaatgaatttatcttttctctccatcgttaagtttgtcagcgccttgcgacttggattaaacaagttattctattttttccaatttcttttctgttcattttcatcttttaggcgtaccaacgtctccaagatgttgacaaacgcgtgatgtgttttgaccagaaattcaatggtcttcgacagagaatggatttggcacgacaaataacggaaactccaagcatttatatgaccgctgtgccggaagtgatcagaagagaggcgctcaaaagggaattttcgtcgtggattaatttgcatattggcaaaacaatggaatttatcacagaagaaaacaaaattcgacagcaattctttgggaagttggagaagcactttctccgccaacttttccccgggatggatgaaatgatgccgcaattttcacctcaaattgctcctaaaattgaccaattgcttccgaaagtgcctttctcgcatttgcatgagctgagaagtgtaagtgtctcctttgtttaattttccttcatttgtttattttcagagattcccggagatgaaagagctgctttttgtgggtacgccgcggcttttctcccgattggcaatatccgacccaacttctccgattgcatccgcaccaattcggtccattcgtcgtgatgaaagtttctatgagcgagacaaaacttcgaatattgatgtgatgaatcggaaccttccgtccaccaattggctaaggcattattttgattaattacttttttttgtacattggtcacctccctccctatagtaaaaatatttttagaattatttaatggaaaaaaattctattaaattgtttaattttgtgtttgaggaatggaagac

SEQ ID NO: 28467 - DNA, 1553 bp, Heterodera glycines
aaaaactatttgtattatatttcgggttcaaaaaacccaacagaaacatataaatttgatggaaatacaataaatgctgtggatacaattagggatttaggagtaaacattgataataaattacaattttccgatcatattaaccaaataacaaggaatgcgtatttacgtatgcgttccttgtttcgaataattaaatccaaatcgtctaagatttggattacgttatataaaacttatattaggcctttattggaatacgctccggaggtttggaatccgtctcttcaaaaaaatattaaaaaaatcgaaaagtgtcaaaaatatttcaccaaaagggtattttttaaatgcagccttccaccaattccataccaaaatcgattagaatacctgcaactgccgacacttgagaataggcgaaagctatttgatctgttcatggcgcataaaattgtttatggccgaacagatctgaaactattttctatttttaatccatcagcacgctttaacatccccttttatagatttaacacaaaatacaaactgggcaaaaaattcattccctttgctgggagggtaacaaaattgtggaatcaactagataaagaactaataaaaacaaattctttaaatcaatttaaaacaaaacttaaaagttcattaagacaataagaccggaaaaacttaaaaaatggctacagaatatttaaaaaaaaaattttttttttttataagtgatttggttattgtgatctctttgactttgacctcattttatatttttcttggcgattttattttatttgtgcttgtataatccgatacttttggacgattaatgtatgtatatgtccacaaagtaagtggatttatcccttttgtggactttttcttttctttataaataaataaataaatgtacttcatttcggaagcccaatttccgaaagaaagccggccaaaaatcagaattcttaaatttaaaaaatatgtgaaaagctccccttaaaacacaccgctgtctcgcttcaccagcttaaaaacaaaaatgtgaaaaagtaaaaaaaaaaaaattcgatttttcactttttttgtggcattctttgtcggaattttcgccattactggcgtggcaatttgctgaagagtgtgcgccctgattgccgctggtggttccatcgtctcaacggcacgccgctttatgccagaaacgattttttgtgtgaccacatttgccgcgctgtggttgcacgtgtgttctccaacggtcttcagcacgacgtcatttagcgttgtgtggattcgtcctcggcatttgaattcatcgcgctgatgttcacagcgcccccaatcgggctatattaaaagatttaaaaccaaatgaaatgtttaaaaatgcaaaaacaattttctgatatgggagcacctatgtttccacccctgcacatattccctccgaaattaattaacccccctatttttttttattttctccaaaaaatgctttgtaacttttttccatacggtatggagttttaaaaaaaaaa

SEQ ID NO: 28468 - DNA, 1359 bp, Heterodera glycines
tttaccctgaatattctatttctttacaaaaacttaattgtaagttgctgaaaaaatggctggacccaggaaaaaccccaggtcaaagcttcctttgatgcgcttgcgatagacggacccgaaatcaccataaattaaaaataagggtaattattggaaaattagtgactgaaaatttaaaaaaatccgagtgcacccaccatctgtaataaattttctaaaaaattttcgcaaatttttcttaaattaattggcctttttggataagacgataaacaattacaatcatgattttcctatgtcattcctaaaatcctaattgtaagtaatacatttcatttccattcttagaattgtcaccgctttgcccgtcccttcccaacatttgttggcccttttgtttggcacttttcgcgtcatcaccgactcggcacaaacattcggcactcgaatgacgccggacgccatcggcatttcggttgcgccttcgctgttccacacgtgcattcatgatggacaacgggtaaaacttgtggaaaaatgaattaatttcaacccatgagtttctgaaaattcaaataattttcgataaaaataaattttggttaaaaatgatcgattgagtccctcattttttggttccctggcatctttaactcatcatcatatttttatttacaaatatctgcccaaatctgtaatctcgttagaatgctttttccaagcaatatattagtcttctaaaagcatgatcattttttagcatggaatttttggcgaatcgtctcatagacaaaaattgagccgaaatgttttcttaatttttttaaattatgctttttctgctacgtatgcttcaattccttctgtaaaaaatcatcctctcttttacgaaagttttccaaaaacaaatttttgtttcggctttaattgattttgtattcaggccaagcttgaggacataatgcgcttcaaattggcctcccaagtgatctccaaaatcatccaatcgttcggtgctgtgcgactgtttccctttgaatgttacgaattctatgcccggatcaccggcaaaacgttgcggagggacgaaaaccattggcacatttccttccatttgccgtcgagtgagttttattttttaaatttaccattccattatgaaatggtacagtgtctaatggtagcccatggtttaagcctcgggattctcttgaaatgataccattcattaatttaggttaaatgccaataaatttttaaaaaaatcgtggttttccatttttgtccattccattgtgcctccttttttgtttgaaaggtttgctgtgtgctttttttacgttttatttgctttgc

SEQ ID NO: 28469 - DNA, 1079 bp, Heterodera glycines
  unsure (1)..(1079): unsure at all n locations
ccccccccccccnccccatcagtcccattgcaaattttgtatatgcgggattttaactaatttaaccaaaattgagtgttgaaatgcttagaggcatttatagcaattaccaaatgaattgatactttgttgtattgttatttttattttttttttaaattttctgtaaaaaatgttgatatttaatcaactgagacgcagttggcccttttactactaagacgcagttggcgagacgcagttggcccgtttcgtcaattctctgacattccaatcaccgggactcatttttccgatatcccaatcactgggattcatttttccggtagcccaataattatcagcttcttcgagcgttaaaaactctaaagctttatattttagcatataaaagctgtatcagagcacagtaagaatacgccatagaaatttggaatccaatattacaaaaacaaaaacaaaataatttttaagagggttattaattcatggaattattaccgaaaaatattatggaaataaataatttgatatattttgtgattttttactgtatatgcttaattttagttttaattttgttttttacaccactgttagagtgcattagcaccttgtggtttgttcgataaataaataataaaaatgtaacaaaatttccgagatttcccgaagcagcctgccggcaccgttggagccaaaattcctgccaaaatcccctaaaatttaggaattttggttaactttcaaaaaaaaaaaataattaattttataaatttaagaatttgattaaaaaagtgtgaaaataatacatttctagtattttttgactgattaaattttgataaaaaagatcattggctacattcaacaatattgcttatcaaattttccattattaacagcgaatgagtgaatcaaatagatttggtcgtaaaccagggatgttgctcgtctcgtttttttaggccgtctcgttctcgtgtctcgtctttgatccctgccttggttcgataccacacacaanaaattttattattcattttaatttgtatttttttgatttaattatgaaaatc

SEQ ID NO: 28470 - DNA, 2212 bp, Heterodera glycines
  unsure (1)..(2212): unsure at all n locations
cccgtttttttggcaaaaacattcatntactacgagttatataaaagatgttatcccacncaaacatttttcgtggcattgttgcaaatggaaatttgaatttttgcactatttttgaatccggactaacaaaaacagagttttgaaattgccaaaatgaagaaaattctgcgtttatcatttttttcgatgttttagttacatgggaatcggtttgagcgagaaaggagtgtcactgaatcggttgcccggctgggacaagacgtcgtacggctaccatggcgatgatggcaatttcttcgcctcggtcggcaaaggggtggagtacgggcccaccttcaccaccggcgacgtggtcggctgcgggttgaactttgtcacgcgccaactgttcttcacaaagaacggaaagcatttgggtgtgtgcatttttgttttgtgccaaattcaggaacgaaaccccttgtttttttgacaatatttttttccgaatatttcgatgaattcttcgacttttctttaaaattttgagaaaaattcaaataaaatttttttttttttgaaaaatgaaaaaaaaaaattttcattctatttttactccaattttcaaggcgtggcaaacactgagcccattccactggtcaacgatctctacccaacagttggcatgcaaacggcggatgaaatggtcattttagggaacgcaaaatgattaaaactactatatctatctccaaatccaattccgggctctaaatcgagcattttttgtatttcatatttatgctttctataaaagctaaaaatttatagaaggctttcaggctttgttagtttttttttggttttgttacctaaaatagaaattcaaaaatatggatgaattaggggctcaactcaaaaagtgtttaattttgcgacttttacagattgatgccaactttggccaacgcccttttgtgtttgacattttcgccgaaatgaatgtgggtggcacttttgggctgtgaatcaacggatgaaatgttttaaaatataaaggaaaaacaaaattgttttcaggcagctgaacaggcgacaaaaaatgcaattgccgccattgaattgccacccgaaaaagtgctttggatgaacaggtcggatgggagtgagggggcgacgagcggagtcggctttgaaattttgtgatttttgtgttagtacttttttgggataatttttcaaaaaaaaaaaaattgaggacaagggatccggcggtgccgatcacttgacaaatggtcgaaaaaattgcaactttcagcttgatcgccaaatggatgacctacgaaggatattccagggcgttggaagcgctgaaccggtcaacggccaatccaaaatcgtccatttcagagcaggccaaagaagaccgacagcagcaacaacaacaacaacagtcaccaccgccaacgacggctgcggagactgtggccaactcagtgatgcaatccatcatcgtgtttggtggcggtggtggcagtgccgccgacggtggcaccgatgccgcggcgccagcgactacaacgtcggcgggcagcatggccaacaagcgccggaccgtagtacgctctgtgcaggaggcgctggacgaggaaatggaacaccacgacaaaatggaccagcgccggtccatcttgcgcatggtcaagcggggccaacttgacgatgcgatcagtcacattgaggtgtgttgtgttgtgttgtgtgacgggcggagtgagtgagtgcttcaaaaactgaaatttttaatttctttagagatttttctgcatatttaagttctttaaaccgaatttcttaaaccgattttttaaaattttcatttttcatacaattttcgaagaaaaagttatataaaaaatctactattttcaattaaatttttttttgtttttttgtatggatggggagcgtgcgtgaaatgagctgctcccttttttggttcttttgagttttcgagactggcacctattggcatattgcgttttaaaataaccatttaaatcatttatctgcactttggagggaatgaatgccaatgttttacacaaacgaatataggcactaatttccgattattttgcaattttttagcaccattatccaacattgatggaaacgaatcgacagctggcacttttactcaaaattcaacccaattgaccnntgcagg

SEQ ID NO: 28471 - DNA, 676 bp, Heterodera glycines
ataaaatttttaaaaatttttaattcctttttaaacaggccaaaaagtttaggcttatattttaaaaagtttcatcgaacctagcgcactaaaatcgataaaatctctccaaaagttgcaggccttctccattgtaaaggactaacttaacttgaaaaaatgccaacgcttgttgtttttaaaatttttcgaaattctgactttttcattaattatttattattttgcaaaattaattcataaatattttttagaacgtgctctgaaacgcaccaaatgttaattaaaagttaaataaggctctctgatgctttttctatcaaaagggagatgaataacatctttttaaaatattttccttatattttggttatttcgttctactttcggtggggtgcttggaaaattggaatcatgcgtacccgtccgatctgacaagttaagcaacgctggctgactagtcaaaaggatgggggccgtgatgaaacgaaaccagcactgcttaccccgcggcacccggcacggacccccgaaggaatggaattaattaaattctctcattcggggatttttttccattaggtcgaccgttagctttcgattggtctagtcaaatttttttattttaaaaaaaaatttgttttttgaagtgttctgatgaagggggggggggcgg

SEQ ID NO: 28472 - DNA, 1654 bp, Heterodera glycines
actcaaaaatatattttgtgttttttttcagtggcaatggacaaaaagccaaaagaacgcattaaaaggggacaaagtgtgcaaattgcaattgttgtcactgacgaagacgcagaagaaggacaaaagacggaggagaaaaaaatgtaaaggaaaaaaagaaaaacaaattaaaaataaaattaaaattaaaaagataaataaaaatataaaaaaataattacagtaatatttatagaataattaaacaaaaaataaacaattcgtaataaaaatatttaaatagaaaacataaatcaaacatttttaattttagcgctttttctgccaatcaaaacaatgtgaagccaaaaagcaacaaaaagcacggaagaagcaaaagcggcggagttttactcgtaaaatcggcgggcgttcattgggaagaaacaaagtgaaaagaaaggggaattaatttgaataattagcaattaattgttcatgatagaacgctttttaggtaacaaaacactttaaatcttaaatatttcaattgaaattattaaatattttaatgtttttttcgaatatgaacaaatttttaaaccaaaaaatttttattaagaaaaaaaaaattaagttttgggaccaatttttgaaaattttttcaattcttagggggtgtattttctgaaaaattttttgagtaatttcttaggggtgtatttttcgcttttattgcatttttgttaaggattttttcgaaaatcctaaaataggcacaatatgtaggcacaaaaaccccgaaatagtcaaaaataggcattataaaagtcatcgtagacaccccaaaccaagcggaaaacgcgtttttcgtgcttacctatgcgtatcaagtacgcaaaaattttagcatttgcctaaaaaaggaagccctagtaattactaatcataagctagcgcaaatatcttagctgacaattttctcatccaattttttatcattctttggaatgggaattgtaaaataagcattaaataggcacaaaaaacctcgaatagatagtaaagcacaaaaacttaatcatcaattgttaggaaaaattttcaatttttagaggtatattttctgaattttttagtcgattcttattcacgcaattctcatgtttaattattagctaaaaataataaagaaaaattttaaaattgtatatgagtcggggtcgttttgacgtcaaagcaaaaataaataaaaaccacgcactaacagaaatataattgatagttcatataattgatattcgcgaaatgctacagagcagggatggcattccaaggccccaaaaattttttaaatcggaattacgatgcccaaaaattttcaggaaatcggtaggcaaaaatttttttgaaattgggtttgcgacctcaaaaatatcggaaatctgctatgatgaaagggatttaaaattctactttaaaattttttttatttgtggttttttaatgtcgtatttcctcgaattgtgctccatcctcgattagaaccccactccgatatagcaccccccccccaaaaagaattttttttttaaatttttcaagaattttttttctcagactcttaacgaaacagagaattaataaaaaattatttaataccgtatttcct

SEQ ID NO: 28473 - DNA, 1184 bp, Heterodera glycines
aacatcaaattagtctattctaataaaaacaaaaatagttatagtacactaaacataaacggcaactttttatgcaacgacctagtagtttttcgatgggaattcaatcacaattttttaacaattaaaatatgtcatttttggatttttttttcacaaagtgcattaaaaagttcaatattttccccggcggcgcctatctgcaccgttatgagaaaaaacctcaaaagattcatttttaatcgattttttagtgtgtaagaaaattttttggagaaagtctcggtctcgactcgagaaaagtctcgggttttttgggtctcggtctcggtatctagtctcgggattaagttcggaatcggtctcgagtctcggggtcaagtctcggtctcgggaaatttttggtctcgagcatcactagttattagtagggaaccgactttgtgacgaaaaatcccgaaatagttaactaaaatagtgacgaaaaagtgccaaaatagtgaaaaaagtccaaaatagtgacgaatagtgacataattttcagccaaaaattgagcaaaaaaatctttattcactgattgcagttacaaatgacattcctttcttacatttttttttagcaaatattgaaatttttaaaccaaaaattttgtaagaaaaatttgggggaaaaatttttatgaaaattttccaattctaactggtattttttgaaaaatttttaggtcgattcttaggggtgtattttttgtttttattgcatttttgttaacaaattttccaaaaaatgtcgaaaaagtgaaaaaatagtgacaaaaagccaaaaaagtgaattttcactattttaagtgacgaaacgccaaaatagtgatttctagtgacgaaaaatgacgtccaaatgaaaaaattttaacgcagaaatgcgttttttgagctcctttcttcaaaacaattgagcaaaaaaaaaagttttttcactagaaatcggttccctagttattagtgactattaggtttttatttttagatcctaaatgcctaaaaaaaatttcgaaagacctatttttgattttatagataaacccttaagcaataaaattttctaaaaaattcttttaaaatttttttttttgaaaaaaattttttgtttttaaaattttttctaatttttttatttttttgaa

SEQ ID NO: 28474 - DNA, 1601 bp, Heterodera glycines
aaaaatgtgaaatattgctttaattaaatatataactcaggtgggattgaacctgggactcccttttagagagagatgagagagagtgagagaaagcaagagagacagattgaatattagaaattttaataagtttcccgtaataaattagtaataatttaataaatgctaaatttttcatttaaattgcttttcttcaggaaaatatccgatttttattaagaattttcttttattacttggcgatttaacattggcaaaataaatattaggcatttgttaataaaaataattttttaattatatttatactttactgctggtcagcaaaatttaatgctttattgaagaaaattggaagaaaaacaacgaaatgagaagaaaaaaagagaaataattcgtaaatattataaaataaagagaaaataaagcaaaaaggaagaaaatatccaaaaaagaacggaataaaatagaaggaaaaatatcaaaaaaattgggaacaaatcgcacatatattcaaaaatggatcaaacaattggagattaatcaaaaattacaaaaaagctataaaaaaagaaaacctaaaaatgagtgataatgcaattgctaaaattatgaacctttcaaaacagaatattcattattggaagaaacaatttggagaagaattgtttgagaattgataaatgatgattttaagaaattacgttgatcccctccccgatcataagtgaccttttcagaaatcgtaatcttatggtttttcatgaataaaaatattattttttctaattttttttctatttttctattaattaataagattaaattacagtttttttgttcacaaattcattgaaatgtcaaggcgtctgggtgaaaattaggtagataaggaaattggtggagaaggagaaattttttgagaaaaacaaatttatttcttttaaagcatttgttcttacgtttgtgtggtctagtgtaccttcggcgtttcattatttgtcgcttgtgttcaattccccaccgtgatagaatattttttactattttctttaaattattttaattggaatttaattaaaaaaatatattttaacttaaaattattattttcttttttaaacagcctaaaaccgcaaatttaaacaaagatttggtccttttgacaaaatctgttaacaaatctcactcaaaatttcaaatttttcccggcggcgccaatcagcattagagttggctatgaaacaattaaaaaatggaagaaacaattggcaataatagaacaagattaatggagaaagaaaaacttgaaaaaatgaaaataaaaaaagaaaatccgaaaatgaatgacaaagaaattgcaaaaatgatgaacattcatcaatcgaacatttcaaaatggaagaaacattttggagatgaataaatcagacaattttttttagaattaccaggaaaacttttttggaaaattttaccacgagaggaaaaggtactgcagtgattacaagagctacataaacagcgattagaagaagtacaaaagtgattagaagaggtaccacgatggtttaaaattaaataaataaggaaatgtt

SEQ ID NO: 28475 - DNA, 1315 bp, Heterodera glycines
gtttttagtgcacataaaagcatatttaggggttttcgagaataaatgcatatttggccatttttgcattttgagagcatatttcggtaatttttggcaaattttcataagaaaaatgcgaaaaaagcgaaaaatacacacctaaagatcgactttttggaatttttttaaatttacacccttaaaaatcggaaaaaaaattaaatttttgtcagaacttttggaaaaaaaaattatgtttttagtatatgctccgttccataattatagaaccaccattttttttttgcgttttacccacttcccatcatccgatcaagctgaagctccttagcccttgttttggtgttttaaaagtcaattcttaatttatacacaatttttggcattttttgagggttaaaagccattttggcagtttattaaggcatattttagtgcatattttatgtgcatatgtatttggcattttttagtgcatacattttgaattagcgcgcaaaaaattacgccaattacgctatttggcgaaatgagcaattttgtctaacactaggcttgacccatagtagtgaggcgccctttttaaatgaactgattgttagattcgtggtcaatcttcccgaaaacccactaaaataatttttatgacattaaattggaattttttaaactagaagctagaagcatcgtcccacttaattgtaaacaagaaaaattccttttttactttaaattttatttgaaatctcgacgttttaaaaaaatttggacatggacctcggaccgtgttggaacagaaaatgattttcctattttaggtagtctataagtgataatttatcactgttaattattatcattaacaatggtagccgcgccagatgaagcgcaatttcatatttcgttttacactgacgaagaagagtgagtaagagtcaaaattcattatcatatatagagagcggatatttttacaaaaaaaaacagccttgtttaggtgtaagaatttgttgcctgccgagtccatcaatgtgcccgcgtcttcgcactcggaccaactcaatgtgttgatcaaccaaatcgggtcgatgaacgatggtactttatctttaatgattttgcaaatgttttatgcaactcttgcaaatgcattcttcacttaaaatgttcggtgcttttcgggtttttcgactttcaaatatagctcgacttttcgacccccgggtacttggtttcaggactttttaaattaaaaacaaattatgtaaaaaaaaagtgaaaacattttcaaaatactacgctttgtaactag

SEQ ID NO: 28476 - DNA, 1847 bp, Heterodera glycines
  unsure (1)..(1847): unsure at all n locations
gttattgctctaataaatttttttttctctgcggcatacaaaatataataattgaattttattatcataaattcacatttgataattaaataactaaacgtagccaataatgataatacattacttttactaaatttaatatttttattcatagcaaattaaaaactctctctctctctctctctctccgtgctgaaaaccgacaaaacaacgtgaattgacgtgtgcagactcaagaacgacgaaacgacgaacaaattggtggcatttgcagtgttgctgacgaagtaaatttatttgaattttgcctataaaaaatatataaaaataaaataaataaaacaaaaaataaaaaatctcttgtgactcattgggtacggtaattacagtatacaataaaagttggtaaattgaatttgtgagggttaaattgacgaaaacggacaaaacctcaaagggcaagatcaggaagaatcagtctgaaactcctgattatttagcaaggagattcaaagataagaccgagagtggtcgagaaagggaaataagacatttaaaaaggaagagaagtacaagtgtcgagcaaaaaagtaaagagggtgtaaacgaaatggctaatgcttttgacatggatttagaagtgaaatttgaagtattaaaaaccaaagtgaatgatttggaggaaaaattggcaaataaaatatccacaaatttaccctcaggagttagggtaccaaaatttgatgccaccggggatttccacagttttttacgagattttaacatcttggccaccgtttccaactggcatccacccgactgtgtcaggatgttgccactttttctggacggtgaagcaaaagaattatttttanatatcccaccggacaagaaaaaaacatggagagaattaactgatgctctggcagagcagacaaaaaaaattgatggaccaatgtggccaaagaaaatgctcgcgcgtgtaaaaatgggtaacgaaagtattactgagtttgccaataaagtgagagaattggttgaacaagcatccccaagccctaaatacacaaaagaagctcgggaggatgagagtgtccattttttcttaagcggtctaccgactgcacttaaaagaaaattatttttcatggataagccaaaatcattggttgaggccatttcccaggccaaaaaggtggtacaagtaagggaagagctcgcaaatgatgcgcgcggagatgagctgaaacaacaaatttccgaattaagtgagaaagttagcgcaattactgtgcgtaataacgggaataatgagagaaacggtcgagaattttttaattcgaattggagaggaaataataataattacacccaaatgagagggtatgcaaataacaattggcgtggaaatcaaaacatggtcaggggtcgaaatatgggaaattttaataattttaatccgagaaatgccaattttactccgattggtcagaatcggaattggaatcgaaattttggtaatcgaacaaatttcgaaaattcgcgatttcaacggggaaattttaacaataatcgaggtatgagaggaaggggtaatgaaaggcagaaataccgaataaatgcaattgggaataatgaggaaattccgtcttcttctacccgtaaatcgccaaccccaacaatgacatttctgacgatttcaatggttatattttcactgtttggtctaatcaatggccaatatcaattatgctccgagagagtgccaacaactcctatttggctcccanaatataaccgaatgttcaggggggagagtacaagaaaatggcagaaaccaaagtgac

SEQ ID NO: 28477 - DNA, 1126 bp, Heterodera glycines
  unsure (1)..(1126): unsure at all n locations
aattcattttggcgaaaaatataaatttgaaatgtacgataacgggcaagtcaatcagcttttgtgcagttaaagccccaaccagcagaatatgaattgagggcgaacgacgcccaatggtcatttcgttgagttttcgcatttttgttagaatttgggctcgggattcgaatcagagactccaatttcaaaactttatcaaaccaaagccagaaatttttagtctggcagtgctaacagacttccacggaaagtttttgaaaattttatccactttgttagcatatttggcaccaaaaataagaaattatgaattataaacaaacatcataattttaataattttatttagattacactcattttaacaattttactgccaaccttagcaaatggctaatttgttacaaattgaagaggttattaatccatccaaacatatgacattctgtttctcattttagggggcaaacgaattaggaaatgtcggcgaaaatcaaccggtgatagggagacaaatcaacgagcaactgattaggccaccgttgactcttccgaacatttttcccacgacagctgccgatttgcacctcttttacagcaacacaggtacgcatggagtttatgtgaaatgaaattttctataaaatcggattctttttgttaaaatagaaccgacggacaacagagaacagacgcagccaactgatgtgacaaatacaacggcaaatgatggagagaatgtccagaacacaccgacggaaaatgatggagagaatgcccttgccgaatttccggttaatggttaagcgccaaatgttttttttattttgtgaatttcatttaattgctttttggttcactttgttaaaacaaaattgacgtatgtatggctcgcattgttaaagagtgtcttttatttctgatattttatatttctgttcatcttgcggcacctttgattattgttagtagttgccgttggatccattgcaccgtttaacgggaaaatgtggagaaattatattcttttttaaaattgcccccctttctcaaccatttgcccatcccctgggactcctcctgcagtgtgctgtactgctcctcaantgtcgccactgttctg

SEQ ID NO: 28478 - DNA, 1492 bp, Heterodera glycines
ctgagtccgtttgtgatgattttgaaccaagtgacacaacacaaaacatatttttttttaaattccatccatctgtttacagtattacgactactatgttgacgagtacactctgctcttggcttcaacggtcagtaaaaactatgtttggaaattaagcatcaattttgcgtcgatttttgacagatggagtggaatgaggccgtgggtgccaaaaaaatatattaattttcctcattttttcgtctgtgggatggggggagtggcccttttcttctcctgcggcgggttacggcattgcttggcttgctcccccccccccccccccccgcacagttcggacctccagttcagtaacgaggtggtgttaacgcagaagcgaaaagagatagagaaaatgtgaaataagcggacagacagtcatcagagttagaacgagtgtttcccgcttgccatacaaataatgccttttgcaggtgtacgcctacgccagtctgatcaccttttgcacgttcatctgcaagcagttctgcgactttctgggcatcagctgcttccgaattgacgtgcagcaccagcggcaccgacggaatctttcgtcggaaaatggcagcatgaaaaagctgttgctgaacagggccgagtgatggacagataattaaggcgattaattcctttaatggcggcggtgatttgcacaaaacaaacaaaacggataaaaaacagccacagacttctagcttttacaacacattttgtttacggtttattatatattgtcccacacattttctaatcactttgtgtcacttccaattccaacgtttgtcagttcgcatttcataggcacaacggtagctcattttacatattattattatactattatcattgactcaacatatattttaattttacaaaacatttataaatagaaaataaatatgtattcttttttagtttgaaaattgttcggcgtttcttaaatgggactttttcaaagattctcggtcttttagcagtgatttttttagaaagttttgtattaaatatttttaaaattgatattaatgggagcagctcgtccccccccccccccgagggaaaaatagtaaaattttaaaaagctttttttccggggtcaaaaatgtgctaatcacgaatctgaactcatccccatctcatatagctaacggattaataattaaatttcaaaaaaaagtaaaaaactaaaagcttgacttctccatatattcaatagctcatctcatccgaatgctctttttaagctctacaacatcggtgtatgagttgtttacaactgactaatttccttaaaattttggaaaaaatcaagtacatgatgaaaaatcataggcaaaaccatgatttttgaattctgagttcagattcgtgatcagtgcattttttaatcccggaaaaaatgctttttaaaattttactattttttccatcgggaccacaattctgc

SEQ ID NO: 28479 - DNA, 1545 bp, Heterodera glycines
  unsure (1)..(1545): unsure at all n locations
taatttgagtaggtggtatgcacgtctaatgctactgttactacgactgttacatttatttcttagtgtttaaatccgaacagggggggggggggggtgggggaattaaaggctgataatttatcattgtataatatttaagtttcacttttaaaatgcataagtggccatattaattaatgaactgaatcgaccataaaatttaataattattttttaggtttattgtttaataatttattgctttggttacctttagacactcaattcttttgtttattgcagcgattcttctcaacagatgcttaataagttctaaatgataattcttattttattatctttattcaatttttactgtttttaatatttatttattgaatttcttatctttgcagttaacataagagctcaacagccttgtataataaacttgttgatgtgtgatcgataattacttggtttattaccaaaaaataaataaattttgtttttataaaatattggaattagctgttttaaacctctctattcctttttgataaacctatttttgattctgtcttaaaaaaatatttaattaacttttcattcattaatttaaaaattttgaaggttattaagccgatttggcgttttactctttttttaaaagctttcatggaaatgaaatttaatttttcgtgaaattgtgttctttccattatttccagtgaaaattttttttgagatccttcatccatccatatcgtaagccagcaagcagataataaacattttttagtataattattaaaattaaaacattaacgaattaaaaaaatcgaatatttgtaatatagtttatattttaaacttaaattcaaaaataagacaaaaacataaaattgttgcataaataaaataaaatattgagaaatgtaatccaaaatatcctttcaaaattgtttattaactcaaagtgccttgcttttttttgaaatttgactcggcttttattaatttgaggcctcattaaatatttaaaacctaaaccgtttatttaatatccatgttaagttttaaagaaatttatttaaattttaattaattttaggttaattattacgttgaatagttactatttttaaggaaaattattatgttaaaaaagcaattatttaattattcattacttttattaaggcttaaaatctataaaattttcttgtagttctctataagtttcttgcgcaacttttcatcattcttcgtctcatttattggattagaatttttatttaaaaaatatttattttattttttattgtacatattaatttattcctaaattgcaattattatttaatagataaatttattgttcggtctttcatatttctctgtaccttctgatacatcttaaatatattttttanattattcttcttttgcatatgaataataaatagtaatttttcacttttgcataattaaggatttaacatttttttcaaaaaaataaaaaatttaattactttgcttttcattaatatttcacatttt

SEQ ID NO: 28480 - DNA, 1039 bp, Heterodera glycines
aataaattttaaattaccaaagttcataaaaaataaaacaaacatattgtaattgaattattttacgtttattccattgactctttaaatttaaattatcatacattcgcgatttgagaaagctagaaaattttacatgatttgctaatatatttcactaaatgcttgggtttttgggtaaaattttgaaaatttcaacataataaatagtaattttgagagtttataggcgattaaaatacatttcacatgaatgatgttatataatagcactttcccatgagtttatgatcagccaataattttgatcatttcatccccttttctcaaagtcttctttgcaaacttcaatcattctgaaaaactccgaatcaagtataataatttatacataattaaaggatggtgcgagaaaaaattaactgcgagaatcagaaaccgaaaaaggcgagaacgaaagaattttttatttaatattcaaaaatttttaaaagcattttaaaaattattttaaaagaaaaaatataatatgtgttctaaggatttagcggaactctagttcagatatttttggaaggcattaattctcttctcaaatctttcgaactcaaatggttttggtagtgctaattagtgcaaaaacagaacagccataaaattggtaatttttagcaatcggctaaacatttccctattgagcttatttgtgtcgacggacaaaactaatcttaaaatcattttgaattcattattttaaggttaaaattttttgtcaagcaggcgccgagaggcgtcgctgggaaatttttgaaatttgttaaatgagtttggcaaaaggtccggcgttataatgagtcttcttaatatatatttttggagcaaactaattaaaattttaaattcgcctaatcttaaaattgaaacgcccggaatttgatttaatttgattcaacaaatttttaaataataaaaagatattttcgcaaaattaaagatataaagttcaacgaggaattgaaccaaggaaaagatgaagcaa

SEQ ID NO: 28481 - DNA, 983 bp, Heterodera glycines
aaatccaacgcaggattaaagtacaggctatagggagctatttcggaaggattcggtctccccataaatctgggcgcatcggtcggggggactgccccgaaaacaaaaaaatcgattttttcaagtgtccgtttggggtactcaaacaattatggggagcaaaaatccaacgcagaattaaagtacaggctatagggaagatattcccgaaggattcggtctccccataaatatgggcgcatcggttcggggggactgccccgaaaacaaaaaaatcgattttttcaagtgtccgtttggggtactcaaacaattatggggagcaaaaatccaacgcagaattaaagtcaggctatagggaagctattcccgaaggattcggtctccccataaatctgggcgcatcggttcggggggactgccccgaaaacaaaaaaatcgattttttcaagtgtccgtttggggtactcaaacaattatggggagcaaaaatccaacgcagaattaaagtacaggctatagggaagctattccggaaggattcggtctccccataaatctgggcgcatcggttcggggggactgccccgaaaacaaaaaaatcgattttttcaagtgtccgtttggggtactcaaacaattatggggagcaaaaatccaacgcagaattaaagtacaggctatagggaagctattcccgaaggattcggtctccccataaatctgggcgcatcggttcggggggactgccccgaaaacaaaaaaaatcgattttttcaagggtccgtttggggtactcaaacaattatggggagcaaaaatccaacgcagaattaaagtacaggctatagggaagctattcccgaaggattcggtctccccataaatctgggcgcatcggttcggggggactgccccgaaaacaaaaaaatcgattttttcaagtgcccgtttggggtactcaaacaattatggggagcaaa

SEQ ID NO: 28482 - DNA, 1295 bp, Heterodera glycines
atacaaagttaaatcatagtttgaaaatgttttaaatttcagttttgacccaatttttcgaagcgccccattttccgctctctcctaaaaagagaggggggggggggggggagggactcttatggccttggtgaaatggtcgtgctgaatgggactcgaaagcgcatcccttcgcctaatcagccccaattgcaggaggatgaccgcgatcggcttgcccctctgaaaagtgccacggacggtcggcattgttttacgcccgccgtcggttactccgctcgtccctctactgctgccgttgactcgtcccaatgccattcgacaagtggcggcagacattgcgccgatttttccaatggcttctaccgtaccaccaccgtcgtggctaacggcggcggacttttgtccctgggcagccccggcagcggcactctgatcggagcggagcagaagtcacggtcaaccggaaatttggacaagaatggtgaggaagttcgggcatgggtcttttgcggcgaattgttttttttactttggtcgcgtttccgcgagaaatgtgctgcgagaatctcgactcgggaaatccttgacttattttatctcgcttattttttggttaaattttgacaaattcattgtctctaaaggaatctgtccaccaaatgtcggtgccgttccctcgacttctgccggccaacagcggagcttttccccatcgtcgcgcggccgtgccgaacgcggcggcataggcccacgactccaacgagaacatttgaaatacggtagggttgtcacggtaattagttttgttttggtaatttctcttttgttcaggctcactgcgcaattgtgccttaatctcatcaagcagttcgtcaggcggtcaacatcaattacggcaccaattcagcacgacggtgcccccgggggacgaattgtgcggcgaagcagcgacggcagagcaacagcagcacttaggattcattttggaccgtctgaacgacgggcagcaccaaaatcaacggcacaaagacattgacgagaacggcacggacggaatgccaaggccaaaacaaacagcggaagaatgtgtgagttgctaatgaggggggaagtgggcaagtcggtaataaacattgaaccaacgcaaagaagcaaaggaccggaaactcgagactcgagcacaaaggcaatcattgcccgagaaaacacgacgatgcccaccccaggcacagatatcactttgttctattctttaattccttctcaattcaaataggcgtgaaggagggggg

SEQ ID NO: 28483 - DNA, 1488 bp, Heterodera glycines
  unsure (1)..(1488): unsure at all n locations
caaaaaattttgaaaaaatagaaaaataaccgggaaaattaaaaaaaggttcataggcaaaaattcaaaatatttaaaaattttcataattttaaacattttccatgcaggaaattgcaatatcttttattacctcatcattattttcggcatttgagctgctgctcggatgactcaaccattcattgataaagccaaaagtgtcggctcaaccctgaaaaattccnaataattgagcgaattcaataaaatgtaaaaatatcgagaaaaaactcacaaagnttgtctgaatccgacaaaaattcggttcgcttcgcccatgtaagccatcagctcatctttgctgtaatcaccgctcattgaaacagcgaatttttgcaatttttgctggcgtaagtttttcccggtctccaaagtttttggccataattcgtggccatggccgtcgctgatcaacacgaaaaccttggcatttcaatatgttaaataataataataataaaggcttttttgcatttattattattttttctggcacttatagcacagaatgcccgctcgaaatgaaaaggagagtacaaagagtactctcatgcaactgcagcgaaaggtaaaatcatttttaaaatctaaagtctgaaaaaagccttaccggaggtgcatttattcttttttttaatggattgtccatttttggagaaaaattaccggcactgccggacccaaatctccagtattctattataaaaatagaattaaaatgaaaattttgaaaatatcccaaacataaatcgctcaacattgtgttatcaaatctttttttttctgccttctattttttcgaaaattctatggcacttttatttattatttcaattattatctttttgtaaacaattaaatatcacctctcactcgatgctacgtctaataaatgcttctcacctttaatgcgccgcttcgaccgaatttctcaaattccttttgccctctgtcaattgcgtcacaaatttgtgtaacgcttcaaatgaataaaaaataagtttttattaaaactttcaatgctttaccctccgctgaattgcacttggcccactcggctgagcatttcggtgccattcaatgtgtcgttaagcgaaaatgccacggaaggtttttctgcaaaactgatcagactgacacggagcgattggtcgccgatcgaattttgcaatttggacaaaaggctcttcaccaaagccacttcattgccaaaggtgtgaaaaatggaaccactggtgtccaacaaaagcacaaggtcaacctaaacacagaaaaataggaaaaccaattcacacatttaaatgcaattgtaacgaagcaaaaaattcaaaaaccttttaaaagtgaataatgggaaaacaaacaattttaattatttttttctttgttttttggcaattttctcacagaatttttgagaaaaatttttagaaaatattttttatt

SEQ ID NO: 28484 - DNA, 1267 bp, Heterodera glycines
tattacagctaacgtacagagggggcttgaatgttggtgtgagagatgtgtttcgtacacaattaagcgtgtgagatgggatttagggggcaaataaatcggctcaatcgaactgggaggcaaaagactattgccaagtcttcctttagatcgaaggattttatccgggtctaagaagagggccagtgcctcattgtccttgtccgcaggggggaacaagttttgctcttgttttatgagcattttggtggactttcggatttcagaaattgatatgggaagaatggggaaactcggtcgaatgttagtccgcgggtcggttttgacaataaatcgattaaaataggacactacacggaggaggggtggaaatcggctgaatttggataaattgaagacggggaattcgggcagagtttgctctgtatgcaaagtcattattggcattgtttgggtctcttggaccggccatttatcagttaaaaatggctttagttccgggttggaagtccatcgagaaggggggagaacaagccagggaggtccggaccaccataaaagagcggactttaacgattggatggatgggaggccacgagttcctaaatctgccggattttccgagccagatacatgtcgaacggtgagatgggggagggatcggatgacgtttaaacggtttcggacgaatatttcttgggcggctgctttttggtggagccaggcgagtacaatcgccgaatcggtccacaaatttaatgtaggagagagggattttaaggccaaatgggactgggaaaattttagggccttgacgcccatctcaacagcaattaattccagacggggaatagtcaatttgtcgcccttgtgcgtgggctttactttagatttagcaaaaaggagaaatgaagagggagttgcctgaggggagggggacaccctgaggtacactgcggcacacatagccattcctgaggcgtcagtgaaacagtggagctgataagatgtttcggccaagtcggtcccattaaaggaacggggaatttccatgatttcattgggtggccaattttgggttagtttggacaattggtctcgaaattcagcgggaattggctggtcccagctcaatgtggtgtgccaaagagactgtaggaaaattttaagtgggagtaggactgggacgagtaagccgcaagggtcaaaatgggccgccaaacacgataggacagagcgtttggtaagagggggaatcggcggagaa

SEQ ID NO: 28485 - DNA, 897 bp, Heterodera glycines
aatttaaaaattctctgtgaaattaaatggcgattgtccaccccgcttcctatcatgctcgagagcatttgtaacgtataaaatttctcaaaataagagatagtcatttttcttggatataagataaatttaaaaattctctgagaaattaaatggcgattgcgcaccgccctccctctcacgctcgagcgcttttgtaacgtataaaatttctcaaaataagagatagtcatttttcttggatataagataaatttaaaaattctctgtgaaattaaatggcgattgcgcaccgcacttcctatcatgctcgagagcatttgtaacgtataaaatttctcaaaataagagatagtcatttttcttggatataagataaatttaaaaattctctgtgaaattaaatggcgattgcgcaccgcacttcctatcatgctcgagagcatttgtaacgtataaaatttctcaaaataagagatagtcatttttcttggatataagataaatttaaaaattctctgagaaattaaatggcgattgcgcaccgccctccctctcacgctcgagcgcttttgtaacgtataaaatttctcaaaataagagatagtcatttttcttggatataagataaatttaaaaattctctgagaaattaaatggcgattgcgcaccgccctccctctcacgctcgagagcttttgtaacgtataaaatttctcaaaataagagatagtcatttttcttggatataagataaatttaaaaattctctgagaaattaaatggcgattgcgcaccgcactccctatcatgctcgagagcatttgtaacgtataaatttctcaaaataagaaatagtcatttttcttggatataagataaattttaaaattctct

SEQ ID NO: 28486 - DNA, 1140 bp, Heterodera glycines
gttcagtgtcgtccaaatagtgtttctccatcggcgtttaattccaattggcatttctttacattttaaacaaaaagttatgcttgatattaaatctaccgcagcagacatgttgcatcaaaagataaaccaaaatgaaagcacagaatgggaacaaaggttggcaaaaatgggagaggaaaagagggtaaaaagggggaaggacaaagacactgatcagacggagaaccaaatccaaggggaaggacaaagacactgatcagacagagaaccaaatccaaggggaaggacaaagacactgatcagacagagaaccaaatccaaggggaaggacaaagacactgatcagacagagaaccaaatccaaggggaaggacaaagacactgatcagacagagaaccaaatccaaggggaaggacaaagacactgatcagacagagaaccaaattcaagaggaaggacaaagacactgatcagacaaccataatcgtaattcactgatctgctggttgttaaggccctcctcctccgtttctgttgccgagcggcgtctgcccgactgtctcataatcggagtacgaaagggaggcacccgcgctttgttggatgcgttagctttgcatccgcggattcgcgtggctcggcacgaagtgcatttcttcgaccggacggaactcttccgacatgggattgaatggtaccgcaagcaaatgcctttagcaaagacggacgaagtgggcagaagagaggacaaacggtgggcaaacaacggcacttttaggtggtcgtggagaaaacgcccgcctattttacgagccctgcggtgccgaagagagtgcactcgctgaacccggggatgaaaatgattctcattgtacgcgagccggtgaccaggacaatcagcgacttcacccaggcgaaaaacgattggatgaaacggggggcggagtcgttacttaaaaaacaatcattattgattttgatgaaaaattatttataacttagctgaaaagcaactgaatttttaattcttgatatcattcgatagcccttagtgatctctataagtctacaaaattccaaaaagtttcgataagtttcaaatgaagttatggctagaggaaatcaaataagcttga

SEQ ID NO: 28487 - DNA, 1033 bp, Heterodera glycines
tgtctgagggttattgagtcaaacgaaattttgatcttttaaagaatacttcaaactgttctgtttcagcttcgatcccgggatttttccgctgaagaagacaaagatgtccacgaagagcgggaatttgtgaaacaagaaggcgccgagaacttcatattgtacattaatgagttgagcaaatattacgggaacgtgcccgccatcgatggcataacattcggagtgcagcgcgacgattgttttggcttgctgggtgagttttctcaaggcatcgcagttcagtacctgggtaaaaaccaggggggggtgaagtgcacgcggacgtggtttatgcagaaattcctattcgccgcttattcctgccaacagatggcagaaaacttttaattatgctaacaataaagcaaattagcactatcaatacgaagataaaaataataaaaaaaacagtcaaagaaaagttagttttttttatctaacaagtgataggcgtgaactccaaatcggaaaatgcattataataccattggatagtgctcatagcggaaacccagggagttacaggcctcgaaaagggaattttagttgaattctcgcttctgcgaggatgaacacgtgaagaaaatgagcagaattggtggctcattgtcagttggttaaattcatggttttagaggtcggattcaaacccttaaaaatgaaaaatcgttaaaaatgaaaaaaaatgaataaaggccttaaggcactaaaaattccgattttcgaggccctgtaactcactgggtttttggtatgagcatgtaaaattaaatttattttttaaagttttaccgatattccgaccccggtcgcttagtgttctgtcgtgggttttaatttagccctattaattgttgatcacgacgttcatttcaggcgttaatggcgcgggaaaaacgacgaccttcgacattctgtccggcattaaattcgccacctcagccaccaaagcaatttccggcgtttgcgtctccaaagcatccgcccatcg

SEQ ID NO: 28488 - DNA, 943 bp, Heterodera glycines
  unsure (1)..(943): unsure at all n locations
ttttcttaagaaccatgggtgctctatccacccaccaaatttncatttggaaatcccacggacacctggggaccttcctttgtgagcggctcgtcgcctataatgcgttgggacggcggcagccggatttggcggcattttgcctgccataataagagtctaccaattttttatgaaaattcgaaaaaaaggggcggatcaattcattgttttctaagcttattttagtcttaaaaaggtgtttatgtggccgaaaatacaaatttagcaccaaatgaagagatccaattttaacaaatcctaaaataaaaaataaaacaaaaagtttgatttccaaatgatcatcataaatcatctttttcctccgatcatgtcatgaagcagcagcaacagtttgtttccgtctcgctgttctgtcctccaacagtctcttttcctcctcctcaacaatttggagtcgttttgtgtacggcacaatgtgccgttcgtagtccccaaacaagtcgaaccgtgcctggccgtcggtcaaccgatgaatgcattcgccaagtctgatgctcgcccgaagatagtccctgtgggaatggtagggaaaattacgtaattaggcagactattaagaggatggtgccgtacttactttgcgccagaaacgtaagcgtcgcccctgaaaatgaaataaggttttttttattcaaaaaatgcctggttgattttctaggggtttttgaggttgctgataccaagaatcgaaatcaagtttataaatttctaaaaattttttccaattgtttgaatccgagttagaaatctccttaggatcattttaacaattaaacaaataaatgacatcaaaattgtttggtttgtgggcaacaaaaaaaaagttaccgtccaaaaactttggctggcgccgacttactataccaactttgattcgttt

SEQ ID NO: 28489 - DNA, 1779 bp, Heterodera glycines
tataaaataaattaacccctaatgacatgtttttggatgatttgggtgaaaaaatttttccactcaaaaatactggtcacccccctttggtcccgaaccccaaaatcacttttgtttttgtaacatctctcaaaaaagtgataaaaatgccaaataaaatttatataatagagcaaaaaattgcggattttttttgtatattacttttacagtatgacttttcagaaccgagttatgaatttttttctgaaaaatcgaaaatttccagaaattctggaataactttttttctttcgaacattataaaaccaaataaatctcataaaattctccttatttttctctatttttaaggctttattcctgtaaaattgatcaacccttcgatttgttatgaattttcaaatattaggccaaaatcccgagggccaaaaaattgccaaaaaataaagaatttttaaaaaattccaaaaattatgaaacttaaaatagacatcatattcgtattcagcaccccaaaataccccagaaaaaaattttcacccccattttcgtccgaaaaaaaatttccgaaggtgagtggcaattaaattttttcttaattgttgatcgaattatggacagggttatatgggatcgggatttcgtgaagaaaccaggagcgggattaaatctgaaccaaaacccgggatggggatctcaacgagccgggatgataacaggagaccaatcccagacgaagtgccgatcccgtgtgatcctaattatggagaattaaggaattgatggacccgggcaaaggattatatgacaaaaatgtggacaaattgacattggccattgatgtcacagtgccaaacgaaaggaaagaacgcatttacgaaccaaatgggacaattgaaatggaaattgaaaatttgtcggaatttgcgcgagaagcctttggaagcggacgttttagcgaatccattctgttcatcaaagaacttccgtggaaaataatggcacaaataaattcgaagaatggaaacactgatcagaaatggttgggcttttacctttggtgcgctgctgcagaaaaaggtgaaatttgaacttctacactaattaagaatctgggccaaaactccaaaaatccataatttttctataattttcatcgtaaaaatatcaagaaaaagttttttttttttttggaaaatccatgaatgttcagaatttctaaaaatcaagcggcccgccaaatgctctaaaaagcaccaatggcaaaatatgcattaattctcgaaaaccaatatgcaaaagcatagaatttatagtcctattgatattaaggacgaagagaagtcatttctttgaacgagtggaactcagattcagcttggggtaagcaaatctaactttataagtaaatttttcgactcgagaatttagactttttcaagactttttcaagactttttaaaattgaatttgtttaatgtcattattatctttttttatctcattaagaagaaaattggagttgcaaatgttcggcaaccctccgaattgtttcacaaaaaggcgatgtgacggatttcagcagagatttcagtggccaaatttttaaccaaacgtcatacagctcgggattcccatatttcatcacttttgaggtgagtgtaatattattgaccagattccattaattgatccattaattatgtatgtaaattaaggaattgatggatccgagcaaaggcttttacgacaaagacggggacaaagtgaaattgg

SEQ ID NO: 28490 - DNA, 1925 bp, Heterodera glycines
  unsure (1)..(1925): unsure at all n locations
ctatttaaaaatttntggttttatttttcatattctcacctttttggttcagccttttcctcaaaataaaaaaatttaggccttcaaattagagcaccagtgctcgatatccttgagaaagatttcaaattttgaatcttctaactgacatcttttctcatctgtttgggcttaattttttttacacttaaagatttgtgaaaacgatttttccaaggaatgactgcccctaaaaattgggtaattattctcgcttaaaagctcgattatcgagtggattttttcggcttttcacatcaataatattgcccacgggaatgacgaataaaactgaccatccgttgggcgggcaaaatcagttccatgacaaatgtgcagacaactaccaaagtgccaccaatggacaagccgaccatgaagcgagtggccaacaaaaattgccatgttgtggcgaaaactaattaattaattaaattaaataatgcgccaaaagtccgcaattttttataaatcaaattacctgaggcaaggacagacgaaatgccaaaagtaagggcacaaattgcaatgggacgacgcccaaacgcatccgaaagggcgccggaagtgaaagtgccgagcagaacaccgccaaattgggcctatgtaatttttttattccattttgtttttggttaccgtatcactactgtaaccaccatttgttctttgtacagtatcccgggtaagaaggcacagaaaaaattgtaacattaaataggcttattatagaaaatccttttttagagtatctttcggatatgggcagtgtgcggaaataattaaactccggaaaaaatcggatattaagaaagggagcagagttgccttagattgttcccttttttgagccaatgatttttaaagtattttggcatttttcctaaaatttattgcaataaaaaattatacacctattcctacaagaaaattaccttttaaatgttcaaaaagcgccccctccaaaaaaaactgttaagattttcaacaaaaatataaattggcaatgaatttacaggagcaattttatacccccaaaattatataaattagggcctattttccagtttttttttggaacctaagccgtagaaattccatttttgctgtacccacctgtgagtagagggcacgcttgtacgcgtcggcaccgcatagccacccaaattggagtgccgttgaatggaatgggatcggctgctcaagtgcagctgatcggcgggacagcggcgaacacggcacaatcacgcgagaatttgtgccaattttttgtggaagacaaatcttgagaagtgccattgttggaggtcccggcacaatgccacacgcggcacaaagttggagaatatcggaaaaggatggaataaattcaaataaattttacaatattcggtgaagcattgaaaatgggaccaaaaacaatttcaaaaatttttacataaaggaaaataggaacattaaaggcgcaaataattttttcatttttattattttttaatagaaaaatttttgaaagtaaaaaataaagtcttatttatttcaaaaaaccaatcttcaaaaagctaaagaacaaatcatttttgagaataatcgattctttaaaaaaataaacattttctgcaaaatgtgtttattaaaaaatttaaaaaacctttctttaattggagcccaaaacatcaaattgaccatgtaaaattgggtttattctgtttgggcttattgtttttcattgacataccgggaaaagcatttgagaagcgaagaaaattgcgaattgccatgtgagaagggcacacaaatggaaacggttaatgccaaagcacaacaacattccgaagttggttgatagtcgcaattcggaaatttaaattttaaattcaaattaa

SEQ ID NO: 28491 - DNA, 977 bp, Heterodera glycines
tttttgagtttttctggccataacttttttgaagcttaacaaaatttttcgcaatttttcagatgaatagaggacacttagggctatcgaacgatactaaaaatgttggattgttggcaaaaaaaaaagttatagccaaaaacttgcgctcgtactaaaacggcccgtactaaaccgaccccgaccccctgatttcattgttttggctagggttcggaccccgtgggcgggggtggcttttcgcgggggcgggggatggcggggtcagagtcgcgggggcggggatgggggcacgaaaatttcgcccccgcggggacgggggcgggggtttgatttgaattaactccaaaaaattttacaaaaaattaattttttatgaatgatgtgatggctccacattcctttagtcaatgtatcgcctcaattcaattccttttggcataaattacacagattttgtctaaagaattaccaaatttagagatttttggctaattttttaagaaaaaataggtttttggggggccggcggtgccgataggccgcctggcgaattttgaaatttaagctcgatttctaacagattttacacaaaaaaaaaagatttttacgataaatttttgtttttttatatattagattatcatgatttactcaagcaaaattggaactcaaatttgtaacatattttcttgtggcacatttttcaaaaaaaaacttggcgaatgtgcagcgcatagggggcctggatgaaaaaaaaatccaagacacgcaaagtttgacgagctcattgaacaaatggtcacctgaaagagtattccgcaattaaatgcatttagcaaaaaatatccatttccggattcgagaagcgcgggaagccccacgcgagtcatggcatagcgagtgaccaacacatggcaggcattctgaagcacaagcaccagcagagacacgtatttaagcagaattggacggat

SEQ ID NO: 28492 - DNA, 1625 bp, Heterodera glycines
  unsure (1)..(1625): unsure at all n locations
ttatgactttttttctatttttaaattatataaatgccattgtctcctgtttttccaccattctcccacacatctacaaatacccaccacacttcccccccccccgcattttatgggggccacagaaattaataagtgaagagcggcgacgatgtgccaacttggcaaacattcttcgccctttttggcggatttgagagaagcgccatcagcagaagtgccgtagacggacggactttgccaatggacggcgaaactctcgacttgggaaaggggagggggcatttgagtaataatggcatttcagggacaaagtcattctccaatcaagaggtgaccattttggcatggcaaatgaatgggggagagcattttgaactacggaatttttaataaatagggaaaaatgaatgaaacggactcagaatcagcagatgatattcccaaaatgatcagtgaatgagaattgagtttgactgatcattgacgccgtcgtaatttgatcggcgaaaattttcccgtaggcatttgcatttttttgtccaaattgccaaatttgcattgcactcactcattaattgccatccgaaaaattgataaatttccaaaacccagagaaaaaacaaaaaaatttttttttaaattttatttgaaaatttaagaaaataattgttactaaacgtccattatatgaaactttcccattgagcccatagaagcaataatttgtcatgccattttgcaggccaacaaatatgaaaaatatgtagaaagtgatgataaaaagaacaaaaaattggccgaaaacttccaaaaaaggcaggcggacttggccaaattggccaatgaaatgcctgctgagggatgcaagctcagtgttggataccttaaagaaacggtgagcaattcgtttctgttcaccaaggggttcgaggaggaggaggaggacaccaagaagggcagtgaccaagcaaatgcttctgcaggtgagttgacggcgggacgtgaaaaaatttcgccgcaggaattttttttaaattaaattttcaacaattttttcaagaaaaaatcttggtaaatcattttttataagaaaaattccaagaagaaaattttgaaaattttttttaataatttgttgtatattttttttttaataataattcaccataaaatacaaatttttcactttttttagaatttcggctgcgagacctttagatttctctatttttacataatttaaaatattttcttttaattttcagaaaaaagatagggagggtattaaatattctgatagaaaatgcttatagttaattgtccaaatgctgagtcggaattctgcatttttttggattaaaatttcgttgaaatttcggcgtggctttttttatatttaaaaaataaaaaattttccattttttgtaccaaataccttaaaatttcttgaaattttatgcctcatcagaacaaacaacggctgaaccaagcacaagcaaaaatcgtcgtaaaaaatcccaatttttgtacgacccanacgatgaggaggacacagtccaggacagtgatgtcgacgatgatgatgatgatgatgaaagcgcggatgaggtacataggatttg

SEQ ID NO: 28493 - DNA, 782 bp, Heterodera glycines
aaaaaatggctcgtttctgctcttttgttgaatccaaggaattgggtcgccttgctgctccgaaggggaaatttatgagttcaaattgtaggaatttccataaaatttaggctctcctttcgcttttaggccttttttacgcccttgaattctctcgcaattaccggttgattggaaaggggataacggaagacaaattccgctatctagtgaaaactgtgaaaaacaacgggaaatggcattcgaattgatggaaaaggcagggataagcagggaggaaaaaactttcgggctacaacaccttgatatcatccagaaattttgggacaaggaattcccggaaatgtttcgcattgttgcttttgaaacggtattaaatcccacaaaattatttatattgttcttttttagaaatctggtcttaaaataatttacaaaggggagcaaatctgcaaaaacgaagtgtgtgttataagagagggagaccactgggatgggattaaatctgtgacccaattcttctgtattcgatacttttgcgtcagctgcgaaatgacctacaatcgccaggaaagacatagaatcgaatgtaaggaacgctgcaagaaatgttgtaggatggggtttgggttcccttgtgtggatgaatgtgcggaaatttattgcgcggtatgtaaccgaaaattctacaacgagtcatgcttcgaaggacacaaaaggatggcatgcaaagagttcaaaaagtacgaaaaatgcggagagacacacaacacaaggaacaa

SEQ ID NO: 28494 - DNA, 970 bp, Heterodera glycines
  unsure (1)..(970): unsure at all n locations
aaaaattcaacaatttttgcatgaatacataataattatgtattttgcttcaaaaaatagttacaaaatccaaacattttccatgacagtgatttctcagctataaccaataaatatttgagtcaatgagacaacttgtacaatggcaactcttacaataaaaattaaaataataagcttaagtctagggctcgcaagcctaagcctggcctaaagcttaggactaagcataaaccttaggcctaagacctaaagcttaggactaagcataaaccttaggcctaagacctaaagcttaggactaagcataaaccttaggcctaagacctaaagcttaggactagcctaagccattgtacgagttgccttttgtacaagttgtcatgacaccaaaatttttagtacttttacttttcttggtgtgtcgatgtgtacaaatccatagctttttcctcatccgtttcactcattacaatttgaaagccgtgcagcactttgtcctgttcaaaatgttttgcccattttgtttgctgtgccattttgcatttggtcgcaattttattgtcctcctcataattttccatgtgatactgcgaattcagtcgtgcatttgccgggtccatttgtccaagaaaacaaaacgtaattctaatacatttttttgaatatatttttaattatatttgaattatcaaattttaatatttatatttattattattgttttaatgacttataataaataatacatcgctttggccgcacattctccaactcggcacacactcattttcaaatggcgattatcatgtccagnggtggtgttgaaatacaacgtggattggattggngcacaatggntgttgatcaagcccacttgcaagacactaattagcanaacttgatgataaaanacaataatatttttaatttgttntttttaaatttatttntcttacttatcagactc

SEQ ID NO: 28495 - DNA, 892 bp, Heterodera glycines
taccggaggcgcctatcggcaccgccggacccccattttaccattttttgaaaaatgagaccaaaatggcaaaaaatagtaattttttggtgaaaaacggcgaaaaattttgtaaaacacccccctaattcggaatttcaaaaaacgaaaaatacacccctaaaaatcgaatttttgacttctggcccccccccccccccgaagccaagggtctggctacgcccttgatattaactcttttgggacctactgaaataataggggccacgattgctttgaaaattaatatctgcttaattaatgatatttttttgaatctgctgaaaatatttttttgggaacatggataatttttccaggacctgataagggcttccatttttaggcaaatgcctaaaatttctgcgcacttgttacacatagataagcgcgacaaaagcattttccgcttggtttggggtgtctatgatgacttttataatgcctatttttgactttttgtgcttaatgcctattttttatgcctattcgccatttttggcgcttttttcaggattttcggaaaaattcttaactaaaatgaaaattacacccctaagaatcgatccaaaaattttcacaaaaattgatccccaaaattcaattatttttttcttaataaaaatttttgaaaaaaatgtccttattcgataaaactttaaaacaacaattgaaatataagcaaaattaagttttttgattaagtcgtttttacgtgatttgctacctaaatagtgttaataagaaaaaaaattttttgcccattttttgtgcctatttcggggatttttgtgtctatttaaggcctattttgcgatttttatgccttttaaggggctatttcccgattttt

SEQ ID NO: 28496 - DNA, 1589 bp, Heterodera glycines
  unsure (1)..(1589): unsure at all n locations
gctcaataattagtgtaatattattacttcaattaaaagtaaaaagtattttttatttattttctaatgtttatttcttatttaggcttaaacaagttcagatgtccaattatttaaagttttttaaatgaatattgaagattaagattaagctgtactgatgctgttaattaataaaaaggataattaattttttatattattatttttttgcaattctttataaagcattttatcaagtcattcaaaaagagtcatttagccgagttaaatattcaattttgaataatttaacagaaaatagccgtttttatgaaatatccagctgatgctttaacctaaaaaactgatgtgatcaataagtaattggttttggaattaatctatatatttttaatttgatttattttaattaagctttgaaattaaatatttatatactatttttaatcttgtttccaagggcactccatgaatttcctgtgtaggcgccaaaactcgttcttttgtatttatgctatttttaacaatcattgtatttaattctattgactcgttttacacattatttttaatatgtttaaaattgtttttttatttaaataataattataataataataattttatataatatttattattcattcattataacattaataaatgtttaaattagttatttttcttttccaaatgttatttttttccaaaaaattaaaactcttaaatatatttaaataacgcttaatttattttaattattgttacatcttttctcaaaattccaatgtttttcttttatagattgaagattaattttgaggattaattaataaattttaatgatttttattgactgattcttcattttttcttcaaaaatatacttcctttataaaccattaagacaattttttttatataaattttaaaatttacttattttctggtataaaaagacaaaattcattcacaaagaaacaaaaatttagaaaaatcagtatttaataaataatttttaaaatctaaaatttttatcaaaaaaaataaaacaaataaatggagaagaattgaaaaattttgggatgcttcgtatgggatgtatttttcgttcttatagcatttttgtttataatttgaacaaaacgccaaaataggtcaattttttaaaaattaggctctaaaataaaacctagaaaaaaaggtgctaataactcgaaaagtatttactatttattgattacattattttttataattttttattgttaaagtgctaaaagattttttaataattcatttgcatttcaggttcaataatttatcatatttattaatttaataaaataaaataattaatactaaacattttattttttttataaatttgtaaataaaactgtttgaaaattaatctttttagataaattatatttaatttcgatgggcattattttgagtagaatttagattattttgagtctcttgccatgcttcctcttgcatacttttccattcaaatgtttttttttttataatttttatctttgttcttttattcatatnaaaattaaaagtcgttaaaa

SEQ ID NO: 28497 - DNA, 1396 bp, Heterodera glycines
aatcaaaaaatgattaggttttgaagacatattttcaattttcatattggctcttttgtagaccattttaggtcatttctagagatttatagttctttttacgtctgattccacgaaaaggtcagcttcatttcgttgtcttcattgtggagtttcttcaggatctgcttagtccccaccacaccaattatcgggttagaaataattcttcatagctaatcattggctctgttgcattggctttgtttgtcacaaaaagacctttcaatgtttagattggcccttacatggactccctataagattatggaacttggtaatatgagaaaaaaatgctgcagaaaaataacctgaaaatttaggagaacattattaaatatgtaaataaaaaatgataggttttgaagacatatttacaattttcatattggcttttttgtagaccattttaggtcatttctagagatttatagttccttttacgtctgattccacgaaaaggtcagcttcatttcgttgtcttcattggtggagtttcttcaggatctgcttagtccccaccacaccaattatcgggttagaaataattcttcatagctaatcattggctctgttgcattggctttgtttgtcacaaaaaggcctttcaatgtttagattggcccttacatggactccctataagattatggaacttggtaatatgagaaaaaaatgctgcagaaaaataacctgaaaatttaggagaacattattaaatatgtaaaatcaaaaaatgataggttttgaagacatatttacaattttcatattggcttttttgtagaccattttaggtcatttctagagatttatagttccttttacgtctgattccacgaaaaggtcagctttatttcgttgttttcattggtggagcttcttcaggatctgcttagtccccaccacaccaattatcgggttagaaataattcttcatagctaatcattggctctgttgcattggctttgtttgtcacaaaaaggcctttcaatgtttagattggcccttacatggactccctataagattatggaacttggtaatatgagaaaaaaatgctgcagaaaaataacctgaaaatttaggagaacattattaaatatgtaaaatcaaaaaatgataggttttgaagacatatttacaattttcatattggcttttttgtagaccattttaggtcatttctagagatttatagttccttttacgtctgattccatgaaaaggtcagctttatttcgttgtcttcattggtggagtttcttcaggatctgcttagtcccacacacaccaatatcgggttagaaataatcttcataactaatcatcggctctgttgcattggctttgttt

SEQ ID NO: 28498 - DNA, 1688 bp, Heterodera glycines
  unsure (1)..(1688): unsure at all n locations
aatagataaanttcgaaaaaaattattaagaaaattcaaggaaatgtaaaaaagtcgtttttttatttttctggaaattcagaaaattagtttttatacgagacggcgacgttttaggggtgtacccggtctgtggatggtattctgagttattttctgaaacccgaccccaaaaaagttataaatcgaaaatttctgaaaaattccgaattttatcaaaaatttcggaaattggaattcagtgccatccctggtgtggccataattcgacaaatgattgatttttgttttccaatcaaattgtttagcattttcttcgtgccaatgccatttcttccgtcagttacgaaattcatttttctgttcgtgcgccgtcaatgccaatggtgccattcgaattggtgaacgaatggacaaaggaaaagctgacattggccaaagaaaacgaaaatgacttggagaattggataatgaagcgatgcaaaattggagaggccgcggatgttcagcttcagaaagatgaaaattggggcaacaattttaacaatgtgtccatttggcttttcagtactaattgcatcgggtgagcaattaaaaaagtcatttaattttgtttaagtaattaaaatttcgcttaattaaggccattgtctccgccatcagcagaagaacaacaagaagcaggacaaagcagcgaaaaaggggcgtcgtctgctgacaaatgagtgacggacaaacgaacaaaaacaatgatcagccgcagaagaagaaatgaattaattaagaatgatcgatcgaccgatcatattcatccgtgatcaaatgcattttatgaagaaaaacctctcaaatatatataaataaatcggatatataaaatggtttgctatctatcgaatgaatgaattttcctttcaaaaatgtgacaattatttttcgggattttggcgggggatttccgacatccattagcaatacttgttccgttgctgctcctttttctcctccattttcctctctttctcttccgtctctcctccttcctatgttcttgcttctgctgatgttgttgtttctgctggtgttcagctgcaattttctttttcctcttcttcagttgctgctcctttttctcctccctttttctctcttttcccccattttctcttccttctcctcccccttcgctgtttcctttttgctgttgttgatttcgtgtcacgacatttgcgccaccagccaaaaaacgacaattgcggtccgtcttttgcggcccgacatttgcgcctcggacatttgcggccccatttcttaagggccattttcggacatttgcgtcccgacatttgctgccaaaaatcaaaataggtctctcatcgaaaatcctttttttctcttcaatttatgccgaatttactcaatcgagtaattctttctcgaaattgggcttggttcaaaaccccctccaaggttaaaagttttttatttaaaagaaataattttgaactttttccccactatttttggccatatttagttattatttttgggaatttggcccccaaaaaacccgatccctacttctaaccttgcttttttttggaaattttttttgactttttttaccctttttcggattttattgacttttttggagttttgggaacttttggttcgggatttttttg

SEQ ID NO: 28499 - DNA, 1196 bp, Heterodera glycines
tgaggcatatattattttacaatcaaattaactcttgaactcgtgtcggcgcctcccacctctcgtccaacgacggcatcgggttgggacgacgaagcaaaaagaagggcatttggagtaaaaataatttgtgatcaaaaaaaagggggcgggggcggggggttggaatttttggaattttaagagatggacgcgaggcggaaaatgatccaatttcttatgaaattgggttctccctccccaacccttccccgcattggaacgggaaaaaccgtacatttagcaaggaaatttaaaattttaattgagaattcctaatttggctattactaaaaaaaatgttgccaaatatcgacaaggaatcggcactgatcattaaaattcactagagccacgaagacagctcaattagctcgtcggattttgtattatttgctctctttaaatccccggggcggcgcggacggacggacgaccaaaatgatcaaaatgaccaccgtggccacttcaatgacttttcaaatcacccactttaaattgtctttgtgtgttttgcgcatcggccaatgcaacaaaattttgaggagcataaaattggctaaaattagcacagaaattccggcgagaaaacgagttgagaggatttgttgttgccatcgctgcttatccatcgccgataatcagaatttattgaaaacgaaaatgtccattattttattgattttaaaagttaattggttagatcgatttgtcataattttacaaagtgttggccattttacgactatctctcgtgcctcttgagcaattttcaaaatttttgctctcgagaaggttttactaatgaagccatcaatctaatcggttcatcgtttttttcatttttcagttttgtctccgaatggttggtccgttacattgaaaccggcgaggactattgaccctcgggggacggcggtggaggcgctgatcggagagactgacagaagcaaaaccatggatcattaacacactttaattggccaacatttcattgtcccgctgactaattagtaaacttattgtattttaattatgtttggatatattcaaatttgtaaattattttaaagtaaacaaattcgctatttgccagaattttgtaatatttttgaaattttaaaatattaattagagaaataattaaatcgtaatta

SEQ ID NO: 28500 - DNA, 1756 bp, Heterodera glycines
gcatctaatttctctctctttctctttcttgcacttttcctcattttttttgttgataagcctgaccaaaaatatttaaaaattaatgtcaatgctttgtgtaatgcgttcaaagagcgagaaggatttaacgaagattagaaaaagtgcggaggaagcagattgcgaacaacagcaaaaaaatggcacaaaatttttaaattttcatttttttcaaaaataaatcgtaagtgtcacggggtggctggttttacactttgttgattaaattttttcatttattcatacgttattattaatttttttgaaatttccaagtctttattgaggtaataggcaaaggttgcaaaatgttgaccaattttaaaaatgttacataatgtaattgggttaatgaattaagtgatcgaaataaaaaggattaagaggctggcatcaaacatatactgataaatgttgtgttagtgataaaaaaagtcaattaccaaattttcgtttttttgccaaaaatattaggagctattataaatgcaataacgtccggactataaaaaaaagtttttttttgttcaaaggattaaacaaacataattgaaggtagtggcacaccattgttaacccggtagctgagcggtgttgcttgtacttaataatatttaataaataaaaacacacaatttgaagtcaactttctgttgcagctggggcgtccaccgtttcagcttgagcacgacgactgctaatcgtggagaggctaattttttggcaatatttgcgcaaacaataaggactccggcgcaacgaaaagtgattaataaatagcgaatacgattgaaaaggtttttcaaataaataacgatttattaaaaattaataacaaatataatgatattattaattgaaggatatgagttagatgcaaaattataagtctcctcaagtttatttctttggtctgaattccaaagcgcagaaatacagacttaagccacaaaatttgacatattgaagtttaaataaataagttacaatcgcacaagcgatatgtcaacatgtatttggggcgaaaaagtttccaggattgagtttttgaggcgtttggtttaatgtttatctcttcttttggttcgttcatgcaggaatcctcattatgcatcattatgaatgtgaattggttgttgcttaggtaaatttatgaatgaatttaaaccgtaaaaaatttttgttttatagatgccaatgtttgtttaacctagctacattttaaatgtcgaaggttgaatagttttctgatttattatcaaacaactttaacaacaacattacgagattaattttcgtccttgttgttttccatcttctgttggtattcttttcgctttctcatcaaaatttcatctctcttttctttcttcttggcgtattcacgtaggctcttctcaacttccatggcagcttttccaccgaaaaattcacgtataacctagttttaataaaataattatcgaaagacaaaaaaattttaaaaaaagttatttacgtttgcctcatctttgtcgaggaattcttgccaaatctcttcggcaggcatttttccatagcaacgctggtcccattcaaccacttgctccggcgtccatttcttaacttcttctcatcatcgtctgaatagtttaaaatgttattaaaataattataaatgttgaataaaatgatcatgatttctcgtttttatacaatttattatttgtttaac

SEQ ID NO: 28501 - DNA, 943 bp, Heterodera glycines
atcatgaattataaagtggtggaaaaaaggcttgactcaaactgataaaatttatagaattataaatcgactggaattttagctaattattttttgtatatttatatatatttatttaccccaatatatgggccgttcatacaccacaaaatagtttcaatccgctttaacaatctcgtgaataagtcgcttgatcagacttgactcaaaaaagggcggaaaaaagtcttgactcagacctgaaaaactatttcacaacttactcaaaattctgaaaaaatcaagtataatttttgtgttcaagtcatagccctatcattcaaaaggcaaatcggtagagaatttttgctctttgcaatgaaaattttcgcagcaccataggaatttttttctaaaattttcccgatttgaagcaatttttgactttccagatcaccatgaaggagtactctgattaaattgatgtaaaagacttgattcagcattccagccttttttgagtcaagtctgttcaagtgaatcaatctcgggaattaataagtcaaataaattattttgttgtgtatgaatgagccatatattgatggtaataatagggctggccgggtcccagacccggatacccggttttttcactacccggacccggacctggacccggttttttgaaaatccaatgcccgatccgcgtcccatagcgcgatagcgctttaaaacatcacactaatggaattaatgttttgtatgttttaaaataacaaatgagggccatatattaccaagccacgtatgcacaccatagccaactgggcaccctagttatatatacgttatattgacaaggcaactcatccttaaaaccaaaatctggcgaacgggaaccgggagcgccctgaaagtagaggaagggtcttacaactttttgaggcgcatctgggaaaaa

SEQ ID NO: 28502 - DNA, 278 bp, Heterodera glycines
tataataacgctgcggacatctacatttttgaattgacctaaattggtaattactctttctttttctccatattgaccatcatactcatactccccccaccctttctcctccttcattttttttttcctttccttctccaaccctctcctccctctcttgatagtttaaactgaaggcgggaaacgacaatctgatccccatcaagctagcttctgcaggtcctgctcgagcggccgcccggggatcgatccccgatctagtaacatagatgacaccg

SEQ ID NO: 28503 - DNA, 1027 bp, Heterodera glycines
  unsure (1)..(1027): unsure at all n locations
attaagatgatttaagcagggctcncaagtgtccttaaaaatgcaaaaattaaagatggtgtctacaaaaacctctaatcgtcctcaaaaaatttactcgaaattgcataatttggacatttttttgtgaaaatctgttaaccaatcacaccaaaatctacaaaaaattttccccggcggcgcctatcggcaccgccggactccaatactctatcttttggaaaagtatgccgcaaaaaagcagtttgaaaagcaaaaaagctcattccaatcgtaaattggatccgatcggttgataatgctttttaactgttttacaaggtaaaaagtaatttaaaaaaatcttatttttggggtcaaattcttagttttagcatcgtttgtcctttttttttaaaaaaaaaaacttgggagccctggttttaagcaaaaaaaaagaaagaaagaaagaaaagccacctgtttcatttgcatcagttggatcagcttgatgtaccgtaatatcatttacagtaagcatagcattgggaacaatctgtgagtgcagataacgtaaaaaaattgtcttttttccatcaaaaaatttaaaaaatggataaatttaccacttgaacatggtcaatggtccatggccgcatttcccaacctgggtacattgtccaataatatggacacagtttaatgtagctattatcatgaaatgatattcggccatagaatccgttctccgccatcaaaatttgcagtgataaaggtttatttgatgatatccccaatgaattgttttggattggccctttctcgattttctccttaaaaatgaaaatttattttttttattaagtcaaagattgctctgctgctgtcattatttcacaggtcttttacccaatcctcttgttttttcttttgtttttttttttttaaatttttcgaaaaaaccagtaatatatcatttaaaaaatcgctgaaaactttcaaaagttttgtcgatacattttcagtagaaaaattttagtacagattc

SEQ ID NO: 28504 - DNA, 1157 bp, Heterodera glycines
  unsure (1)..(1157): unsure at all n locations
gctcgagcgctttgtacngtataaaattctcaaaataagagatagtcatttttcttggatataagataaatttaaaaattctctgtgnaaataaatggcgattgcgcaccgcactttcctatcatgctcgagagcatttgtaacgtataaaatttctcaaaataagagatagtcatttttcttggatataagataaatttaaaaattctctgtgaaattaaatggcgattgcgcaccgcccttcctatcatgctcgagagcatttgtaacgtataaaattctcaaaataagagatagtcatttttcttggatataagataaatttaaaaattctctgagaaattaaatggcgattgcgcaccgccctccctctcacgctcgagcgcttttgtaacgtataaaatttctcaaaataagagatagtcatttttcttggatataagataaatttaaaaattctctgtgaaattaaatggcgattgcgcaccgcacttcctatcatgctcgagagcatttgtaacgtataaaatttctcaaaataagagatagtcatttttcttggatataagataaatttaaaaattctctgagaaattaaatggcgattgcgcaccgccctccctctcacgctcgagcgcttttgtaacgtataaaatttctcaaaataagagatagtcatttttcttggatataagataaatttaaaaattctctgtgaaattaaatggcgattgcgcaccgcacttcctatcatgctcgagagcatttgtaacgtataaaatttctcaaaataagagatagtcatttttcttggatataagataaatttaaaaattctctgagaaattaaatggcgattgcgcaccgccctccctctcacgctcgagcgcttttgtaacgtataaaatttctcaaaagaagagatagtcatttttcttggatataagataaatttaaaaattctctgtgaaattaaatggcgattgcgcaccgcacttcctatcatgctcgagagcatttgtaacgtataaaatttctcaaaataagagatagtcatttttcttggatataagataaatttaaaaattctctgagaaattaaatggcgattgcgcaccgccctccctctcacgctcgagcgcttttgtaacgtataa

SEQ ID NO: 28505 - DNA, 966 bp, Heterodera glycines
tcagtgtaaaaattcgactggccattcaaatttctccctttccaaccttatgggaaagatattatggaactttttggttccatttcagttgtcaacgccgcgactgcatcgttattatatcagtcgatagaattttcgaatcgcttttaaatcatctcttttgcgttccttaatcttcactctgagccgagttactgcggtctaaacacgtttttggtagaattgcggccagaatttaaaaatacagtttgctatggcttcgcatcacccgcttcaacgggtgctcagtgtaaatatcgactggccattcaaattctgcctttccagccttatggaaagatattatggaacttttggttccatctcagttgtcaacgccgcgactgcatcgttattatatcagtcgatagaattttcgaatcgcttttaaatcgtctcttttgcgtcccttaatcttcactctgagccgagttactgcggtctaaacacgtttttggtagaattgcggccagaatttaaaaatacagtttgctatggcttcgcatcacccgcttcaacgggtgctcagtgtaaatatcgactggccattcaaattctgcctttccagccttatggaaagatattatggaacttttggttccatctcagttgtcaacgccgcgactgcatcgttattatatcagtcgatagaattttcgaatcgcttttaaatcgtctcttttgcgtcccttaatcttcactctgagccgagttactgcggtctaaacacgtttttggtagaattgcggccagaatttaaaaatacagtttgctatggcttcgcatcacccgcttcaacgggtgctcagtgtaaatatcgactggccattcaaattctgcctttccagccttatggaaagatattatggaacttttggttccatctcagttgtcaacgccgcgactgcatcgttatgatatcagtcg

SEQ ID NO: 28506 - DNA, 1405 bp, Heterodera glycines
  unsure (1)..(1405): unsure at all n locations
tagtaaaaattgggtttgatatattataaatttaagagagtcccatttgtccttatttaagcccatcgtcccttttttcgtttgtttttacgatttactataaaatacaaaaaatggtaattttcgactaaaattcatttctatcgagttttaataaatgtactttttttactccaaacattttcncacctctcactgaaaaattattgaaaaataaatatttacagaaattaagagtcaaaaaattaatgaaactttagtgcaaattttttgacgaataagaatttttttatagaaaattggaatttgaataaattctagaattttgattattcttcaagcaaaaatctgaagaaataaaattcaaaaaatgattagttttaaagtcagcaaaatatttataaataagattcctcttaaaatttaatttcgctaaatttttaaaatattccctaaatttctctaaacatttttaatttttcaagtgaagggggtgaaattacagttttttagaaaggtaccgtatatgctctaattatagcccagtctctattaatcccgcagtctccaattatcccccaggctacgaggtgttttgaaaaataatccctctatcataatcctccagtctctaattatccccccttttctgtggaggttgaaaaataatcccccatgggctataattagagcatatacggtaatagcacaaaaaatataagtatttgcacaccttccccgaagaaggcgctgtccaaaaattagggtaaacccataagcgtcccactgcacggaaacctttagtaaaaggcgaaagatttcatcgtccgaatacaaagggaccagggatagacaagtggaaaaatagttttttttatagaatttttaaaactaaaatattatgggttgaaatgcatgccaggaaaagattttctctttactatatctctctttctgttattctctctcttgctttatctctcttttcctctcttctctgccaactctccttttacgctgtggactttcttcttctctctgtccatttgtttcgtcgccgcattaaacaaactggagacatccatgcactcttctttataaaagagaaaaagaattgaatggagtgctacggaaaggagcaaagaaataagatgaaaaaaatagtgcgtataattctctgcatttctctcccttctttttctcctcatcttttatttaaatatagtttatcatttattttttttactttacttccgttgttagccttgcgctcggtcaatacagcgagcaatgaggcctagccgagctgctgttattgctgattgaaaacttttaccaattacccgccttggcctgcgaaagcggtgccttgtgcaatttttggacgccctccggggcttaaaaa

SEQ ID NO: 28507 - DNA, 1042 bp, Heterodera glycines
aaaagcgaaatttgcgaaactgaaaaatgcgaaatgaaaaaaagcgaaatgcgaaaagcgaaatttgcgaaaaagcgaaaggcgaaagcgaaattttttctacaacttttattagttaaaatcataaagcaaaaatcattttttaaaattttattccaaatttaaaaatcaataaaacgcttttttgaggcgcgctttttccaaagaaaatttttgggaagagggggcaggtgccgccgggaaaattttagaaaatttgattaaaatttgttgacagattttcactaaaaaatgatcaagatttttatcatttttctaatgagaaataagtgttttggggcgccgctgagaacagtatttcatcaaattaccaaattttgcgattttgggccattttctaggaaaaaataggagttttgggggcacggcggtgccgataggcgccgccggggaaaaaaattggaaattttgatcatttataaacattcactgaaaattagccaatttataggtaaaattttgaaaaattttatgggaatttaatccaattcttaggggtgtaaaagtcgcttttcgcgccaaaaagcgaaaagcgaaatgcgaaacgccaaaaaatgcgaataatgcgaaaggcgaaatgcgaaaagatgtattgcttcatctccttccctcccaatgcttcatctcccctcttcccctccctccctttgatgtactgctttatctccttccctcccactgcttcatctcccctcttcccctccctccctttgatgtactgcttcatctccccctcttcccctccctccctttgatgtactgcttcatctccccctcttcccctccctccctttgatgtactgcttcatctccccctcttcccctccctccctttgatgtactgcttcatctcccccctttcccccccttccctttaaggaatggctcctcctcccctctttcccccccttcccttgaaggactggttcttcctccccttttcccccccctccctttgatggactggttctactcccccttt

SEQ ID NO: 28508 - DNA, 1085 bp, Heterodera glycines
acgatgatttgatccgacatattcattcattgcaataccgtgtggggattattagaatattgttgaaaatattaattttgttgcgttgttaaaaattagtatatgtttgtttcgcttatgtcaaaatagggggggggggcgcaagtgtcggcggcgcaagtgtcattttgactgggcggcgcaagtgtctgcggcgcaactgtcgcggcgcaagtgtcggcggcgcaaatggcagcggcgcaagtgtctgaggcgcaactgtcgcaacgcaagtgtcggcggcgcaagtgtcattttgactgggcggcgcaagtgtctgcggcgcaactgtcgcggcgcaagtgtcggcggcgcaaatggcagcggcgcaagtgtatgcggcgcaagtgtcattttgactgggcggcgcaagtgtcggcggcgcaactgtcgcggcgcaagtgtcggcggcgcaaatggcagcggcgcaagtgtatgcggcgcaagtgtcattttgactgggcggcgcaagtgtctgcggcgcaactgtcgcggcgcaagtgtcggcggcgcaaatggcagcggcgcaagtgtctgaggcgcaactgtcgcaacgcaagtgtcggcggcgcaagtgtcattttgactgggcggcgcaagtgtctgcggcgcaactgtcgcggcgcaagtgtcggcggcgcaaatggcagcggcgcaagtgtcattttgactgggcggcgcaagtgtctgcggcgcaactgtcgcggcgcaagtgtcggcggcgcaagtgtcactttggctgggcggcgcaagtgtcactttggctgggcggcgcaaatggcagcggcgcaaatgtcggcggcgcaagtgtcattttgactgggcggcgcaagtgtctgcggcgcaactgtcgcggcgcaagtgtcggcggcgcaagtgtcactttggctgggcggcgcaagtgtcactttggctgggcggcgcaaatggcagcggcgcaaatgtcggcggcgcaagtgtcattttgactgggcggcgcaagtgtctgcggcgcaactgtcgcggcgcaagtgtcggcggcgcaagtgtcactttggctgggcggc

SEQ ID NO: 28509 - DNA, 915 bp, Heterodera glycines
atattttttgaattttcctctatttcttagatattttgccaaaaataacgattaaaaattaatacaggaaatacaggtttttaaggcctgtacctgtacctgtacctgtatttccaaaatggcctgtacctgtattttctgtacaaaagtacaggaaaatacaggtacaggaaaaatacaggttgccgaaaaatggcctgtacctgtacctggatccaggaaaaatacaggcctggatccaggtacaggccgatctctactaattattattttttttttacttttcctttttgttgctgttgtttgatctgcgcaatttctgctccaaattgctcaatttgcgttgaaatttgctccattttctattttaattttaaatttatactttacatattttttgtttacattttctgcactttcatttctttgctttattaatgttatttctgtacaaatttgtcgcaaaattccctaaatttttgttttaggaaatcttttaaatttattattaatcaattatttaattaatacgttctcattttgatgcttcaattcatcaattccagtttgaattcgcccaaattgggtgaaaatttcccgcaatttctaaatattttttattttaaaagcgtgcttgcgcgttttataaaaaccgccagtcgcgttttataaatccgccaatgtaaacaaaatattgtacatatacgtgattatcaattttttatataatttaaaaatagtaaaaatgatcgagtaaaaatgcgaatttttattgctctttaaaactctctccaaaaatatgaactgacaagcataacaaatcctaaacataataaatattaaaaaatataaaaaactagcaaactttttgttagaaaagcaatcaataagttttataaagacaatatgcaaaag

SEQ ID NO: 28510 - DNA, 1850 bp, Heterodera glycines
tgcgcttacaaaaacaaatcaaacatttatcgttgaatatactcgaaaaaacagctaaatttcggattttctattgtaaatcttttcaatatttgcttttttcttttacgcataaattgctgagactttgaactagagaccggaaatttcaaatttgcggatcccgctgcgggactggaactcaaatttgtttgcgggacgggatcccgcgggattaatcccgcaaatcccgcaatcccgcaaatcccgcatttaaaatttgcgggatcccgtgcgggattgcgggattttggaaaattcgaaaaaattcaattaaattcaaaaaatttccaaaaatcaaaaaatgctgaaaaataaatttttaggggctggcgggatgcattaaaaggtgctgatgggtcgactaaaattttccgattggatccgacggtaaaatttgatcggaaatcaaattattaacggttcataaatttgactatttttttcttttcaaaaccacttttttgcggtgcagtttttcaaaaaactaggaacagagggccggcggtccttatcagggatggcattccgaggccccaaaaattttcggaagtgtcgaaaatcggatttccaaccccaaaaacgtcggaaatcggaaatttttcaaaaaatatacaatataataaaaaaaatttctaaatattttaattggctaaattttttaattcttaaccaagtaaaaggtatttcacaaatgtttttagtatattcgcttgaaaaaattattcaattattttatcaaaatctttttttgtcatttttcattattttagaacatttttgggaaaaggagtgactatttacacgttttttacagcgcgattttttcaaaaactttttgggaacttggaggagagtacggcggtgccgataggcgccgccgggaaaattttaaaaatttcagttcaatttattaacagaaattgtacaaaactgactagttttttgaaaaaaaattaaaaaaatttccaacttacatcaaaaattttggaagtctttccgtgccatacctggtgcctatcgacatctgcgaaaaacttcaaaatttggactagaacaaatttatacacaattatttaaatttttaagcccgtttaataaagaaatcaattttattgacaattcaaatttaaatttgataagaatatttgatttatttttggtataatggcaagcgagtgtatgcattacaaattatacaaatatttcaaaagaaaggcaaatcagcacgggaaattaagtgaataaaaacaacaattcgggcatgttttgatcaggtatgacatcatttgttcgcagaagtgggcagggacagccccggagagaacggaaggcatattaaggataaagccaacctcccccccccccaactcagcgaaccataacataaacctccataattaatgctgctcttgcaagtcactacttctacttcaccgactgcatgtacatgatcaaaatgtcggttactgcttgtttgatgctgccgctactgttgatgttgctgccaatcatggaacaatagaaattgatgatgatgatggcatcatggtcttctgctgccaagtgtgaacaccaccattaatgctattgttgttgccgctttgcggcggaggagatgacactgccgtcgattggagccgtgaaattttgagcaaatggtcaagctgttcacgactccggttagacatgcgatcaccgagcacgtccaaaagcctaacaaattcccattagtactattgcgatcactgtttgcataacatttatagtgagtaataactaagaaagagaaaaaattccatacaatcttt

SEQ ID NO: 28511 - DNA, 1503 bp, Heterodera glycines
  unsure (1)..(1503): unsure at all n locations
ctatcaaatggtatcaaaaattcaaaattagttgttttgagtaaaataaaggctaatttttgtttaaaattttcatttaatggtttttttaaaatctataacgcccttttgatggctttttaactttggacattgaactttaacattgaaaccaatgcttccatcaaggctacacttggccatgcacgggcaatgtgtccaatgagccgccggatcggattgacttcatcttttacaaatgcgatcggcaacggcgaatgaaggccatccaatcgttcatttatgctggcactgatcacatggaaaaagcattgcattctgcgaatggcaccaacaggcaaagcgactggatctcagatcaccacgcggtggtcaccgattttgtgctgtacgcgccataaaagaaactaacgaagcgacccgcggataaaacgccaaatcagtcaaaaacaacgacaaaacgccaaaccgacaaagcatcgactcgacaaaaaaagaagagcaaaacaaaaaaggcgaaaaataccgacagaaacaaaaaaaaagggcttccttagccgaattttaaatcattaaggttatttaacatttaattactcttttggcataaaagattcattaaaactttgagaagtactaacttcctttcacgcctgcgctggtttgaaaatgattttgtcagctttcataatttattgaggcagatatttacaattggtccattttcaaaatcgaaaggatagactaataaaaatcttccaattcataacaacaacaactgttcaaacattggttgatcattcgaagtcattagctgtggccacacacattcattcattcattcagtcagtcattttcgtggccaaaaaatgtgcgaaagtgcaatgtattttggtgccaaaaatggtataaataggcaaaggcgggcatggaaaagtatcattttaattttaatattaatcaaataatttaaaacatttatccattaaaatgtttatcaactcttccaaaatgactgttttcctgttggccttcaccattttggccttgctttttgtttaaatcaaaactttaagcttggccaaaagtcggcggcaaatggcaaggaaaagcattcaaaaaagtaaaatgaaatgaacaaaagcggatgattatttgattaaggttttttgaaaaagtaacaaaaatctggaattatttcttagtttagtcgacaaaattagtgtttttctcattattatttttttattaaaaaagacaaaacatattatttatatttaaaaaataattaatgggcattggatgccaatttttctgtgcactcgatgttttcaatttggtttggggctcgtaagtgcctctcgtaatgtatatttttgttgatattttagggacttanagaaattctttaataanataaacaaaaatgggaaattaactactaagcattttaaaaataanatttaaagttttgcctgattanatgaaggttttcatattttc

SEQ ID NO: 28512 - DNA, 1019 bp, Heterodera glycines
atttttcatgcaaattcgcataagagcagctttttctatgttttgcttttgcaaattctttttcttttctgagtttgtctctttttagaggataaaataaggaacgaaataaaagagaaaaggtcaaagggaataaatgttacgatgggcgagggaagggacattcatttgggggtcattcgttctctgctgatgcccaatgtccattcttcccctagcaccaaccagcacgtccccttgggcgggatggactctttcaccgttttttttttgaggggtgacaggtcattgaacaccaaggaatgaagcaagcatagagtgcgttcagcttaaaccgtttacacccacactgccacacttggttatttttccacttttattggtacaaacatttcagtaagtcaaccacttaggtttacgtaggaggctggctggctccattgaattgtatagttgacggtgtgacgggcgggcgcgagaggggggcggggggcagtggtcacttcggagatttgggtcgtcgtcgtccactttattttgcatctgcatccaattcgaccatctcctgtttttgcccacatttgtttgttgttttgctgtttcgtcgttatgttccattgccctcttttgcctaaatatctctcccccgaggggaggcggtggactgaggtcggcggagggggaggggaggggtgacagccagtgtcctgtctatctccacagctgtccctcgtccgctgccgtcccctttttcgccgaatgaccactgccctggtcactctgccttcagcagagcagaaaagggcaagagaggtgggagtgaccaatgcaaaaacaatgatagagatggtgaaactgagagggtcagagaaaaaaggggagggcagagataacagcaaacaaacgaagaagaaaaagtaggaggcataagaacacaaagcagaacagaatggcagggtaaagacgacaaaataacaaaatatgcatccagccgaaggtcggtcggagaagcccgtgct

SEQ ID NO: 28513 - DNA, 927 bp, Heterodera glycines
cgggtgctcagtgtaaatatcgactggccattcaaattctgcctttccagccttatggaaagatattatgaaactttggttccatctcagttgtcaacgccgcgactgcatcgttattatattagtcgatagaattttcgaatcgcttttaaatcgtctcttttgcgtcccttaatcttcactctgagccgagttactgcggtctaaacacgtttttggtagagttgcggccagaatttaaaaatacagtttgctatggcttcgcatcacccgcttcaacgggtgctcagtgtaaatatcgactggccattcaaattctgcctttccagccttatggaaagatattatggaacttttggttccatctcagttgtcaacgccgcgactgcatcgttattatatcagtcgatagaattttcgaatcgcttttaaatcgtctcttttgcgtcccttaatcttcactctgagccgagttactgcggtctaaacacgtttttggtagaattgcggccagaatttaaaaatacagtttgctatggcttcgcatcacccgcttcaacgggtgctcagtgtaaatatcgactggccattcaaattctgcctttccagccttatggaaagatattatggaacttttggttccatctcagttgtcaacgccgcgactgcatcgttattatatcagtcgatagaattttcgaatcgcttttaaatcgtctcttttgcgtcccttaatcttcactctgagccgagttactgcggtctaaacacgtttttggtagaattgcggccagaatttaaaaatacagtttgctatggcttcgcatcacccgcttcaacgggtgctcagtgtaaatatcgactggccattcaaattctgcctttccagccttaggaaagatattatggaacttttggttccatctc

SEQ ID NO: 28514 - DNA, 1919 bp, Heterodera glycines
tcaaattggtggccaacaaatggcgaatgaaatcgcccaaaacactctgaaaatacgagcgaataatcagagggaaaggacagaacgccaaagggaggggaaagtgccaaaatggacgaatgaatgaatgacctgcagatagtcgttggccaccagtttcatgtacgcctccactgcttttgtggccagagaattgccacggaaaaggagatggtctaaaagaaggggagagggagaggtgaatggaatgccaaaaagaacagaatgccaatgaaatttctcaccattttcttgcccgtccacttcgaccattgccaaatcggccaatgcttcggccgcccgtcgttcgtgctgcaaaacgcggaccaacgcacttgcaaagtcctccttggcctttacgcccaaaatgggctcaaaagtggcacaaagtggcaaaaagtgaagccgaagatactaacaaatgagcgaaaaaaaagtgtaaagtaattaaaattgaaaattaaaatggcacttctctgagcggcgcgtacgcgcggagggggaaaatgtgcacggattggtagcgagctttgatgcgaatggacggcagagaatcagcgcaattggcatttgttgaggcgccgctgctgccattgccgttgagctcatttgaactgacagaatacctaaaaaacaaacgaataattacggtgtaaaagcggaggttacggtagccaaaagttgaaaacttttgcgatagaattatggatgcttataaatatgtaattctattataaaaaatatataaaataattgaattcactagtacaaaagttggacccccccccccccaaatgctcaacaattaattaattgttcagttgcatttctcgaccatttctcgacaggctgtcgtcctgccaattccgccaacggaatgtgcaccaatccgatcagagtttgtctgtcctccctttcggcgccgccgcgtgccctccgtgccgatgccgtctttttggcgtccaactcgcggaaaaggtcgatgcacagcaaacgggaaggagggagggagccgaactcgaaagactcgccccaaaagcaaatgccatcgctcatcccctaggaaaggcagcaaaaaatgattttatactcaattcattttaattgtttttattatttattcctctgattttattttgtttcgcttttccctcactttcgtcgaagtgcgtgccttcagttgcccgtccaaagacagcttaaatttgcgtaccgtttgagcagagaaaggtttacaaaagggagaaacctcgcagaaaaaccgtcgctttgccgggacgcccttcgcctccaaaacccaaatggacaaaaaattgtccacccgatggacacggtcaatttggggattcatccgccgtcgaaagctaaaagcaaaagacaaataaaataaatgaacggattctgctgctgctggctgattgtgaagtgccgtgtgattattactattattaaatgtttacggcggtgccctcttcccccccccccaaattcttacgacggcactttccgtgccattcccctgaaatgggcgaaccatttgcatattctgcacagcaataatcaatccccgtccgtccatccgtcaccggccatcaattgtcccccgaggggagagaaagctctctcgggggaagtgtcgagtggacggacggaaagggaaggaaagcggatgtgcccccgcggggagggtttgagatttgagagagcaatgggctcagagggacaaacctagcggactaagtaatgagcatggaatggattgacggagggcggggcgaggggaaggacggagagaaatgggagagggggaaggggtcatttgggatcagatggcattgccaaaagctaaaatgattttttgagatattttggagaaaaga

SEQ ID NO: 28515 - DNA, 991 bp, Heterodera glycines
  unsure (1)..(991): unsure at all n locations
gaaaattttttgcagacacccanccacttttgcacttaaaaaaattcaaagcgatttgaatgagaatagaaagagccaggttcgatgaagttttggtaagccaaaaaaatatccaaatatttaaaaatctgtaaaaaatttaaaaatgagaattcatgcgagattttctggaaataatcttaattgggccttgttaagctgtaagacacccaccacttttgcacttaaaaaaatttcaaaaaatttgatcgtccataaataatttgtaattgatcagcggctcaccaaattttgcagagatacgtatcggaacactacaaaagcttactaattttcctagattttttaaacccggtgaaaattttttgcagacacccaccacttttgcacttaaaaaaatttcaaaaaatttgatcgtccataaataatttggaattgatcaggggctcaccaaattttgcagagatacgtatcggaacactacaaatgcttactaattttcctagcttttttaaacccggtgaaaattttttgcagacacccacacttttgcacttaaaaaaatttcaaaaaatttgatcgtccataaataatttggaattgatcaggggctcaccaaattttgcagagatacgtatcggaacactacaaatgcttactattttcctagcttttttaaacccggtgaaaattttttgcagacacccaccacttttgcacttaaaaaaatttcaaaaaatttgatcgtccataaataatttggaattgatcaggggctcatcaaatattgcagagatacgtatcggaacactacaaatgcttactaattttcctagcttttttaaacccggtgaaaattttttgcagacacccaccacttttgcacttaaaaaaatttcaaaaaatttgatcgtccataaataatttggaattgatcaggggctcaccaaattttgcagatacgtatcggaacactacaaatgcttactaa

SEQ ID NO: 28516 - DNA, 1580 bp, Heterodera glycines
  unsure (1)..(1580): unsure at all n locations
ggtcatcaattaacaaattttcgagtgttttaggctaaatatttgaaaatttcctatccgtagtccgcggcatttgtgctcactttgctattgtcctctattagtctattcgaaggttgaaaaaaaactcatccaaaattaaaaaaacatgactaaaaagtgcaaaaaagcgaatttttgaatttgtttttctgaactatgctaattgatgttcttggggctatcaaatgataccaagaatgtttaatttcgacgcttttttaattgcgcattaaaattgtctaattattttatggtcggtaaactgcaatagagccataaattctatgtcctataaagttgggcatgaattgttttaaaaatggctgaaaatttcgctaggtttcaaattggagttgtgaccataaatgtgagaaattgctttttgagtaaaacttttttacgagggttgataattagggctgggaatttaagtcaaattactttttttgctgactctanatggccttaaaagacttanagtgttctaaactttgtttgaagcttttaacttgcattttttgtgactttttttttaccttttttacactttttgtgactttttgcgacttttttcgtggtttttttgacattttgaggcaaaatttgaaattcatcaagaaaatgccgaaaaatataaagaaagtccaaaaaataaaatttttagtaactatttataaaattaagtgcctaaaaataagatcaaaatgtttgtctacaaattattaaaattgcgattttttaacttttgcctaatttttcagtacttttttttgcatttttacgtgtttttttttttttggatttttttgtgactttttggcgattttttaagacttttttagtcgactttttgaagatttttagtgactaaaattttcagccctaaatataagaattttttaattctttattcgttttcctaattgaattttaagaaataaaattatttccattaatagcttatttaaattaccaaattttattaatctttttttgttggcctgtgaccaaagtcaatatggttttagtaaaaattataatttttttgttttgttaaaaatatataataaatgattcttgaaaatttaatattttatacaaagtttaatatattagttttataaatttttgtaaatcagaatatttattcttatatattaaaaaattttgtttttcttctatcaaaattccaattttttgtttattttttgtatttattaatgactgcgattttgacaactatatgtcataattttgtattgcttatattatttattttaatttttttttgtttatattttttgaaatatgaatgttttattattttaattctttgaattaaaattttaaaaagtcttattttaatttaaatgtttaagttcgcaaaattactgattcgttgaactcattttctccgccttttcaatgattggcgtatgtatctaattttttataattttttctcatatgtttctcatgaatattttattgtcgcaatttccatcccttcatattcaaatattttcctaatttataaa

SEQ ID NO: 28517 - DNA, 989 bp, Heterodera glycines
  unsure (1)..(989): unsure at all n locations
tcttcttccggtacccctacgcccgtcagcgcctcttctgcccctccttttgtgtccacggcacttccaaacaatgccaatgctaacacgccgcttcctcaaaagaccatctgcgttaacaacttaagaagaccttcttcgatcccggaattgataaattctgtaaaggaggaaccggtcgcggagagttcaccggtggtggacatttcagtcggaccagcgaatgcattagttgtgaatcccatccatcagcagcaaaaccatttaataaatgaagtttcaaaatttggtgaatatttttgaatttgaaacagtgggaattctacctcgaatttagagccaataacgccaatcgcaaatcgaaaaaacgacgagggcgatggcaagaaaaacgtggcgaaacggagcaatgaacgcaaggaaaaagttcagccgacggttggcggaaaacgtggaaggcccagcaaagcggacaaaatgcttgggacgcatgcgagtccgaagatgccacggttgtcggacgacgcaaaggatggcatggaagtgatgcaccaaatgactctctcagtacaagcggtaataatccttgacaatgtgagcgtcatgatgtccggttcagggaaagcccattgaccctgctttaattttggctgacatggcggaggcaaaacgccgttcagtaccaatggacactatcaacatggctctgccctttcccaatttgagcaaaccgttcaccgaccaaactcaatccggaggagacattcaaagccatcattacaccgagagatacccgggcctatcgaaatttttaggngnttctttgttaaagtcctttttacagacagaattacagatggaatgagaggcgtgtttgaaaattggttcgacaatgtgtattcttcgaaacaaacagccaacgatggcggagtgggcattttgttaaattttattttgcactttactaattnngaatatttctttagtcg

SEQ ID NO: 28518 - DNA, 2002 bp, Heterodera glycines
ttaaaaatgcatgacattcaaaaaaaagaataatggaaaactcactaattaataactgtgaattaatgtatgtagaattaataaatctaatttattaataaagaaaatgcataatattatttttgcataatgagattgagttaggaatcaatgaacaaacaatctaaatttaaaattcatagttttttaacaaaataatatataatagatagaataaaatatgaatttatttttcaattatccagcaaaatgaataaatttttttaaaaattaataaattaatgatatgaacgtacaaatgaataaaattcaacctaaaaataaatttatttttattaattttgttatgtaaaaagttgaataacattaaaattccaaaccaaatcaaaatcaataaataatttaagaaatacaaaattacttatgattcacgaatttattacaaacagtacatcaaaagccttacaataaaatataatgaatgaataataagtattgataacataaacgggttttattacccatgtttgtgtttgaggtagctgtacgtgaaaaaggatgaaaaaataatataagaaatttaataatgctaataatatattttataattgatatcttttgtaaagaaataaagttaaataaaaaagcatacaatttattctatcatttgaaacaccgctaaaatttttgtgtgttgataaagccgatttgaatcgaaaaccttgatattaaaaatcaaaaaatgggtcatagagaaattgaaagtcacatatgaaaaaatatttttaaaatttaatttatttaaaaaattattattaactataaaatattcaatgagtccgatttcgttcacggatcgcccataaaatataaaatcgaactatcttaattttgttgatttttccaatggaaatatttatttctttttccgagaaatgtgctttgttgaccgaccttgaggctggctgtactaaaaccctaaaaattggagccctactaataattttgaccaaaaaaaacacccattttaaacattttgtttaaatatttagtacacattttggtttttttccatgaaaatctattgtaataagaatcgcaaaatttggcaagtttttggacaatttaagtttttggaagaaaacgattttccaaaacaatgtttttcttctgtattttgtgaacatcaatcaatggaaaacggcaaagtgtgctaattgcaacaaaaaatgaacagacggtaaggaattttttaaacttggaattttcatttccacttaatttttccaagtttcagttggatgtgcaccgacgtttggctgaacattctgcccttctttgaccatgctcaactcggcctcaatttggcattgctttctttccgtttcgatgttttggtggacaaatcattttgatagaaaaagcaaattgacaatttggagacgtatcacaattcgcaagagcatcaaaccaaaaccaatattatttgtcgattggaaacggaaacctctggatttccattgccaaaacggccgtggcccaccaaaatccgctttaacgactttcggattgcgtaacaatataaattttctgtatgtattaatgcattttgtatttatttcttcagatacattgaccattccgtgatcacatttctccatgccaacaagcaaatttgggacagcaaaggcaccaaattgtatttgaatctgttttcacccaaacgatggatttccacaacattcgggctgtttttgtccgtcaaatttggccaatttttatgacaagcactcgccatctgagctttgccggtcgtgattgtatggataatttgcgtcgtcgtatttcgccaacaattctcgccgatcttgatcatttggattcaatcgattccggttttctgtttccctatggaatggctggcgatgggccaaatgcaaatgctgccgggcaagcgttgtccaaatggttgcacacgccgagaaaagatggccaaccgaag

SEQ ID NO: 28519 - DNA, 1137 bp, Heterodera glycines
ccccctgaaaatcttttttaaataatattttcttagggtattttatgaattgaacacgtatatgacgtatatttttaactcttaagctttttacgagtgttacgtgaaattttttaaccagtcaactacagtatttcgtcggtaataatgtgctttgtcccaccccattttcgaaaaattaaagtcgtgtaaaacgccttctctggaggttttcaaggtcgctgatcacgaatctgacatccatttgtattaattccgaacccagaattcgaataaaaagttgaaaatacaaatttaaaaatctttcactattgctctaaaattgattaaaactagataaaaaattagcataaattactgaaacaccaaaaaatggttattctgtacagatttatcataaaaatgaattttttagcatttgaatttcgactttttgttctaattcgggtctggcgttcggaattgggtgtttagatcataaaattattcaagaaaaaaataatggaaaaaattttcaagggggtgacaaaaaggataaataccaaaacaatggaaacaatattattcccttttgtaaggttttttgggcaagaaaaaaacggattaacccaacaatacactcccccgccatttgtttgttttacccacccggaatggtgagaattgctctgtttacggcgtcccaatcggtggcttcagaagcgaaggatttaggaaatttccagtcaacctgtcggtttttaaaaataatgttcaacattgtaacagacaaaaacttcaaagattataggggatgaaaagcaaaactgtggaacttcatgaagtcaagtaaaagtggtggtggtggaacataacttttgaaatttaaaaaagtcagaacatattgcataggtgtttgtagacgaaataaatgtataaaaaaaatcaaggactcaaagttttgaaaacgcattttggactaaaatcaattaaagaaaatggactaaggaagcggaaaactcacgatgaaattatgattttctgtgagcacgggcgaacatttgaacattcgtaattgacactcgccacctgaatttttaagaatggtattgtgagaaaagtaagaaacaaaaaaaaagatgaaaattgttacttgtg

SEQ ID NO: 28520 - DNA, 1786 bp, Heterodera glycines
  unsure (1)..(1786): unsure at all n locations
taaataaaactggaaatcttgaaaaaaataattttttaaatttntggtagacaaataatttaatcaaagaagtcaattagaaattgcagaaagaaggcatcgaaaatggcctataattccgcaacagatttggtagtttaaagaaaatttataataaattaatcgtttttaattgagtaaaactatatttagtggtaccaatattttaactctgccggttatcaatatttaattctgtcggtggtgtttggatttcgtgcattttttgccacaattggagcactgtttaattttggcgttgtgtacacaacaatcaaaaacaggcactaattaaatcaaaataaatattattttattttccgttattaaaaagaaatctccgagaaacttgcaacattttgatcgccttggaatgtttctttggcctcattttggacattggatattatgccagcccttttgtggcagtttctggccaaaaattcattcgttacgaacattgtttctgggctttaatcatcccatgtgtgtgtggtgacttggcccaatttacgatggtgaccatcgccatcgatcgactgatcgctgttgcctttccattatggtaagtacagtaatttgtgtttatttttaaatttcaattcaaggttcaaacaaagagcaaacaatcgatacttggccattgtcttttcatttattttcggctatggcatttatgatttgacacttcgcttcttcgattacacatacacaaaagaaatgtaatttataagaaattaagttttgatgattatgtatattaatgaataatttaattaaatattcttcttcagtatggtctcttgcgcaacaaatgaaatggcccaaagttttttaggaaaaatattcaaaatcaatggattggtgttaagcggccttctgatgtccgcatattcactctgttggttcatggtgttcaaactgcctacagtatcacaatgttctttatttttgaatatgaatcttataaaaataattacgtatttattaagtggttagaatttactgtttctctatgaaaattttagatgttgaggaatggaatcggaaactgatcaaagcattgtctttcatcattgtcctgaatttgattggggtgttcgttagaatttctgttgagctgattttccaggcttttgccatcgcggatgtgttcatccgaacaccgtactccatcgtttcttccttcttcactattatcgtatatagtgcagacggtccattactgtacatcgttaggtgacaaataacaaaattttgccaagattcccaaatgaacatttccaaaagcctcagttgacagccaaaaaagcttcacctattttgaaaattagcatcactaaactttaacaaattcagcactgagtaccgtactcgtctaaaccaacagtttccttggttaacaaaaatatttgggccaaatgagaggaacataatccatgtaacaccttcttcaatgaatttacaacaacagcagaggagagaaagaagtgtttgaattatacaatgtgttatgtaatttatttattgtatttataatgcaaaatgacataaaaattataaaaaaacaaaaaatttcgcaaaattaattaaaaaaaaccaaaaaaaatatagtttttcacataaataatggaaaagttattttatgttaacgtgaacataatcggaatcaaaggtttttcacgtaagcatatgcgaacacagagtgtgattttacgtgagctgtattttatatataggaagtttt

SEQ ID NO: 28521 - DNA, 1120 bp, Heterodera glycines
tttccagccttatggaaagatattatggaccttttgttccatctcagttgtcaacgccgcgactgcatcgttattatatcagtcgatagaatttcgaatcgcttttaaatcgtctcttttgcgtcccttaatcttcactctgagccgagttactgcggtctaaacacgtttttggtagaattgcggccagaatttaaaaatacagtttgctatggcttcgcatcacccgcttcaacgggtgctcagtgtaaatatcgactggccattcaaattctgcctttccagccttatggaaagatattatggaacttttggttccatctcagttgtcaacgccgcgactgcatcgttattatatcagtcgatagaattttcgaatcgcttttaaatcgtctcttttgcgtcccttaatcttcactctgagccgagttactgcggtctaaacacgtttttggtagaattgcggccagaatttaaaaatacagtttgctatggcttcgcatcacccgcttcaacgggtgctcagtgtaaatatcgactggccattcaaattctgcctttccagccttatggaaagatattatggaacttttggttccatctcagttgtcaacgccgcgactgcatcgttattatatcagtcgatagaattttcgaatcgcttttaaatcgtctcttttgcgtcccttaatcttcactctgagccgagttactgcggtctaaacacgttttttggtagaattgcggccagaatttaaaaatacagtttgctatggcttcgcatcacccgcttcaacgggtgctcagtgtaaatatcgactggccattcaaattctgcctttccagccttatggaaagatattatggaacttttggttccatctcagttgtcaacgccgcgactgcatcgttattatatcagtcgatagaattttcgaaacgcttttaaatcgtctcttttgcgtcccctaatcttcactctgagccgagttactgcggtctaaacacgtttttgggagaattgcgggcagaatttaaaaatacaggttgctatggcttcgcatcacccgcttcaacgggtgctcagtgtaaatatcgactgggcattcaaattctgcct

SEQ ID NO: 28522 - DNA, 1590 bp, Heterodera glycines
aaaatacatatattatataatatcatataaaaattttgattaatttttgcttttaaatttaatttctgttttttaaagatttttttttatttatattcgaatttgtctaaatttttgataaatttgaacattaattattaacaaattttaaatttatatttttttctatttatttattttccttttaccatcataaagcactttcggttgatttgtggctctcgattcttcacacaatttatgcagtgcacctaattcgggcaaagaatcattgttcattgctggcagacgaaatgctgtgggtggcttcatcattatcactgttaggctctttaaaaaattaatttaaaaattcgaaaaatttcatttttggacttttaatgtgcccaaatcggccattttttgtatgtctttggcgccccaaagtgcgccggatgggatgaacacagagcgatttttgtgctgcttaaggctgtgctaaaatgaaaaaattaaataaattttttaattggaaatttacatgaatttcctttaatgtttgccgatttgccagtgccgtcggtgacccaacctatcaataaaaatggggaaattaaatgaagtaatgaatgaatatttaatgaaaattacaaaaagatccgcataagacagaatcagcttggcatgatcacgaatgatgtcaggatgtgccaccaaaaatttaaaaaaatatatataaattaatgattttttggtgcgaagaatttgatcattgcaatatcttttccaattttaaacatgtgattagattagaagcaacaatgattcaaaaaatcattaataaaaaatttgtgaaggttatttttctttttatattacggaaatctcaaattaaaatcagcaatttttaggaattttcgcgatattgaatcaattttaataacaattaggtgccgagagtgccgccgggaaaaaaatttttttttgagaatttaacgaaatttgtaaagaaaaattagctaaatttttgagaaaaaattatgaaattgaaagaaaaaactaagtcctatttcgtaaaaaaaacaaaaatgtggacttaatttcttaaatttttaattttttgaaacttgtctaataatcattatttcattaatttaaaagaagcaaaatggaaatccaaccacctcaataaccaagtccaagccttccaaagtttcggcattcaattcgcccaatcccaatacgccctcctcggcatcctcattccgattccaaatttttttcagcacgaattgctgggatttgcccagctcaaccttgagaaattggcctaaatttcactaaataatttctcagaaatttttttatgactaatttttatttcctttttatgatacaagcgatatattcttatgaaatatataaagcggtgtgtcgaattaatttttattatttcaaattggtttttatattcacaatttttaagacttgattttggtctatataaaatatttttagtaattaaataacaattaaaattttatttatttttaatttaaagtctctattaaagacatacccaaatgtccaaatgcgatgattccaattgat

SEQ ID NO: 28523 - DNA, 1031 bp, Heterodera glycines
  unsure (1)..(1031): unsure at all n locations
actcgcggcagagaatgttcagaaagcaacagcaaaaagaagcaacggagaaaagcacacaaaaaaatgcaaacagaaaaagagaccaatcggagagaaaaaagggaagagacgggacgggactcaaacccaagaaatattcaacaacaattgtttgacggagcaacggaatttaagacaattattgttaaacacttttaatttccaaaatttccagcaccggagcgaaaaatcaggttttgtaaaatacaattttttgtctttttgggataaaattttcaaaaaatattgtaaatgtgctccggcgatgccggtaggcgccgtcgggggaaataggaaatgcgggattggcaccccttaaaaaccaaaatcctgtgaccgttcctgcgccagtaaactcataatcaacaaattttcccatataattaaatggggccaagaacaaaggaaagttccttggaaaacagaatctactactcataaaagaatgaactttgtatctgtttgcccattcgttgcataatttcaaaatgcccaccaaattcctttccgtcattcctttcgttgctccgttttttgttgcgtttcgccacttttccttctccgcctttactgtcctctccaagtcaatttcgctttgggcgcggagatcggcgaccgaacgttgccaattttcgatggtttccttatgccgtttttcaaactccaatttttcacgaatccaaatgcgttcccgcatttcgtacatattcagacgagtggaaatggacatggaaaatgaagaaaaattaaaaatgttaaatttgacataatatatttagataagataacatataatatttacttattttgctcagataagtcgctaaattttgcgtccatttcctcgaaacgcggtttaatccgtttcaattcgtcctcataagcaattgctctanacaanaaacaaaataggctgcagaatccggcaaagtatttttacttttccctgaattccttccacccgtcaagaagatccacgcattttttgg

SEQ ID NO: 28524 - DNA, 774 bp, Heterodera glycines
gggaggatgagagacaaggagaaaactaaaggagagagaaagagatggtgagagataagcaaaagaggaggggagagaaaagggggaggatgagagacaaggaagaaaactaaaggagagagaaagagatggtgagagataagcaaaagaggaggggagagaaaagggggaggatgagagacaaggaagaaaactaaaggagagaaaaagagatggtgagagataagcaaaagaggaggggagaaaagggggggatgagagacaaggaagaaaactaaaggagagagaaagagatggtgagagataagcaaaagaggaggggagagaaaagggggaggatgagagacaaggaagaaaactaaaggagagaaaaagagatggtgagagataagcaaaagaggaggggagaaaagggggaggatgagagacaaggaagaaaactaaaggagagagaaagagatggtgagagataagcaaaagaggaggggagaaaagggggaggatgagagacaaggaagaaaactaaaggagagagaaagagatggtgagagataagcaaaagaggaggggagagaaaagggggaggatgagagacaaggaagaaaactaaaggagagaaaaagagatggtgagagataagcaaaagaggaggggagaaaagggggggatgagagacaaggaagaaaactaaaggagagagaaagagatggtgagagataagcaaaagaggaggggagagaaaagggggaggatgagagacaaggaagaaaacta

SEQ ID NO: 28525 - DNA, 907 bp, Heterodera glycines
tggatttttcctggatccaggtccaggggattttcctggatttttgtccaggaaatccaggtccaggtcaaatgtgaaaaaaatccaggtccaagtccaggcaaaacacgaaaaaactggattttcctggacaaaattttagaatttattatttcaagtgaccgatgtttttttcacgttttcaaaaacagattagataaatttaaaaacacattattattatttattagatatttttagatgcttctaagcaaataattatttttttcaaacattcttttgatttttaaaataaatttcaaaaaatccaggtccaggcctgaatccaggtctcgaggagcctggatttttcctggacctggatttttgtccaggaaatccaggtccaggcttttttcaaaatgtcgatctctaattattacatttataaattcttaaatgtttaaacaaataaattaatcgtaaaataatgtgttgactgtttttgcctttttgtacacttttttttacaatatttacgttatttttaatgaaaaatgaacaaaaacccgaaattcttcccaaccctaataattgtgcatatattttcgatttccaatgtaatttcatccatcaaattgtttcactcctttttttaaaaaaagtttttctctgaaaattttcttctgtttagaaagaattgaaccggccaggccgtcaagaatttaatcattttaaattatcgatccaatccttgcgaaacaatttctttaccatctccataacagcaacaaaacaaaaaaacagaaattgctctttaaatttattccacacacaaccctaaattatatagcaaaaaaattacaaaattagagtctgattgtgaggcacaacattttgtaataatcaggccggaaaccaagagggg

SEQ ID NO: 28526 - DNA, 1190 bp, Heterodera glycines
attaattaaacaacagttttgtcagattatgtcggaggaagtcagaaaaatatacaacaattaataataacatcaacaaatcggaaaccaatttgttttccaacgagacaagaaaaagagaacaaatttgtataaatactgcccatgttaataacagaaaaacatccaaattaacacggcacagtaataaaacattaaagactctgaaaaaatatgccaaacattttcaaaatccttctcattgtgcttttggccgtcatctcattccgtttctcggcttccactgatggcaaaagtaataacataatggaatgttttttgaattatttataatgatgatccttcaaattatgttaattatgtcaaaatttcgccagtttaatggccatgaaaatccttattccgtggtgaacactcaaaataaatgacataaaattgttgtttgctttaagaaactgataatgatcggaatggaaacgactcatcagctgggattggtacgaagatcaaacgaattgtcaccgctgggctgctcttcacttccctggccacgggtgggacaggagcgattgggcgaagcaatgcccagggaggaattgccgccggcgcaatggtatacgaattgttagggacgctaattgtgccaagttaccacgatacgaatgcaactcagtttcaccaggctccaccacctcctcctgcgaactttgaaaaggcaaccccggtagaaaaaataagcacacacttacacgaactttctgagcgaatgctgttaaataaagcgcccgaggtaggaaaaaagtcgacttcaataattgtcttcttattctgcaatttagcgagtggtacctggtggacccaacccattacatcattaaccgtaaggccatggatggaactaactgaggaaggaaggatgtgttggttattttcattcgatctttttgttgatttaactaaagtaaattaaaaaatttatggcatggcgacacacaaattaatttattttaataaaatgcctgaaaatatcacagttttaatgcttttgtcagcaaaattggcgagaaggacaatgaggaagaaggggaagggagttcatctcccgagcgcgggggaggagtgtttgcgtttagttcggaggcgatagcccgggagctgtccctagaggaagaaaatgaatttggggggtg

SEQ ID NO: 28527 - DNA, 1013 bp, Heterodera glycines
  unsure (1)..(1013): unsure at all n locations
tttctctttntgcggtaaancaatcggaagattaatccaatgaaaaatcccatcaaattaatttccctttcagcgatttgaacagcgctttctaccgcaaagtacaggacgaacggatgcgtgccgcgggtgtaatgccaaatgatgagctgctgaatccgttgttgccctacgggggcggtggcggcgacactttggaccgacacattccgacggcgccctttggcccaccgcagacgatgttcgagttgaagcactcccagcagcaactgcaccatgcacagcagcagccgtaccgattctgggaaagtggtgcgacctctgccgacacaatgcattcggctggcgtgggatggcatccgccgtattacgttcaacaacaaccccaaaagcaatcctacggcagtgcgagtgccaacaccgaaccaacccaagcggagccgtaccaaatcgcgagcatccaacaagaacaggtcggtgacgacgagttggagggcaggaattttacataattgggcgattaactctcgagtcatttcgttagttttttttcttgcatttagttgcgtttctcggatcagatgatcggcgaggacagcaccacttttttgacactgggagaatgggaaggggcaatgatcagcggtgccactttcaaggcatcaatcgatcaaataaataaaacctatcaactaatccaattaattttacctaattattaaccgttttttcctccaatttcgggttgccattaaatcgttgaaaccgaatgttccgcacatcgccgttgagcagttccaagaagagattaaagccatcggcatgttcgagcatcacaacgttgtccgcctgttaggcgttagctttttgcaggcccgggaaatgtgtgccgtgttcgatcacatggtccacggngatttggtggaatttttgaagtgcgggagccccgaggngggacagagtgagtcactgcaatggtacttctgaggaaaagcttcattttagcaatgatg

SEQ ID NO: 28528 - DNA, 700 bp, Heterodera glycines
aaaaaccgggaatttcccggtcccggtcaaaactgggcaaaaccgggtggcattttgtgccatttcacccattactaagaattttttttcaaaaaaatgagcattaaattttttttttacatattttgatatttttcttacatattttatgtacatattttaccactttttgtacatatttttgccagccctactcattatgtgttgtgtgtgtaaatttcaaacaattaaattaggtaaaccaaatcagtattgagatacataatttttgaaaccaaattatgaaaataataaataaattttggagatgaatttttagaaaattttacatttctagggcgtgtattttcagaaattttgggtcgattcttagcagggctggacgtaactgattttcagttacggccatccgtaatccgtcattacggcgattttttcagttacggccatccgtaatccgtcatgacgggggtcaaaaaaggccgtaatttggcgtaatccgtaatacgtaatccgtaattttcaaaaaaattttttaatttaaaaaatttttaaatttaaaaaatccaatctaaaaattgttaagattaatttatgatcagaatatctgcttgtttttttgaggtgaaaatcccaaaatagtttgtttcgcggtgtgctttttccaaaaaactggggaatgtggggggggtcagggggg

SEQ ID NO: 28529 - DNA, 1562 bp, Heterodera glycines
cctgttctctttccctttatctttcctctttcgcttcaaaaacatttctttcaaaaatgatcattaaaaactaaatttctccctaaatccaaaaaataagacgaaaataaggacaaagagcttaaataaggacaaatcttacaaataaggacatttaaaatttgtaagatttggaccctcaaaataaggacaaatcttataaataaggacaaagggtaaccctgttcttaattaattttattaaaattaattttctcccggcgtcgcccgcaggcaccaaaacttttttgctaatatatacggtaaaaaactctagtattctcaccttttcgggtttctttgattttttaaagctaccattataaatttggtgaactaataaaaaaaaaattatagccttggccgaaacgacccccgacacgtattgacctttttgaaatttttcaaaaaagtaaaaataacaaagtttattgatcaatgatcactgaggtcgtacatcagtctcaagcggtcgaatgacgcatttgctggtgtctaaaaacagggcaatctgtcggccaaagcgttgccgtccatcaatattggacatgaattcaacaaatttctgatggcttgagttcggatagtcccatatttgtcttcggttttgctttggctgcacatccgtacgcactgaccaagtctggacagaactctgaaaaattgacatgaaaatgtgcatgtttatgcattgaaagaaaggaaattagagaaagaataaaaagttgcaaatgataaaactaatttatttaaactttttttgttaaacctgtttattaatttatttttaatattccatgctaataactagggttgatcgttttttaggttacaaacacataaaaacttaatcaaaacacttaattttagttatatttcaattttagcaaaattattaaatattttaaagtttttagaataaggataatttaaacaaaaaatttttatcaagaaaaaaaatatttatatggaatcaatttttgtggaaatttttttcgaaaatcctgaaggcgccaaaaatggcgaaatatgcacaaaaataggcgttcaggctttgggcacaaaagtcgaaaatagacaaaattaggcattgtaaaagtcatcgtagacaccccaaaccaagtgaaaaaggcgtgtttatttgagcgtatcaagtgcacagaaattttaggcatttgcctaaaaacgaagccctactaataacaagggatgatattttaggtttttattagccctaaaaatttccgaaaaatacccactaagaagcattttttatcaattaaaaattcatccctactaataacacaaataagtttagatttgtgcatttgaaaaagttaaagttatgatcataatttccaaaataaatttttcatcaaaagcagcatttaattttaattgcttacgggtgacattcgtattcagaaatgatgttcagccgtgtatagcatcagccccaaaatgggtattctctctgttgcaaagttcactcaccggtccgtcggtgtccaattgccaactca

SEQ ID NO: 28530 - DNA, 1185 bp, Heterodera glycines
ttttatttttcgtaaaaaacaaaataaaaaaggaaggcttgcgttaaataataaaaattttcattattctgtaattagccaattattaatttatgtgcccttttttgtttgtgtgtcccgcctgcccatttttggtcctttgtgtgaattttgcctttatcatctcatcaatcagtcatggtccttatcaaaggtgccaccacctgacggtgttcgggagtccggactgttcgctcaactttttcaagcggcttttgctgtgttggcgcaacagtgttgatccaccgccaccaccagacgcggcactgcctttaccgctgccgcgttttgtcaactttttgcgcgttgtcaatgggtctgcgtcacgaagaagaattgggttgctgaacgcatcaattggcggtcgagcagcccttaattgtttttttcactgtctttcaatttgttctaaataaaatatcggaacagttggatcagaaaaattgcaattttcaatatgcggaaaaaatatttgggcaccgaaattccgatttttgcgacattttatttggaattttgaattttttttaatcctcgaaattttccaattcctctttccgaatttttggtcggaatgcgggcgtttgttatgagtggcacgacattctcgacacagcggagatgacatgaaatggccggcggcggaaagcccaatatggcggggattaggaggacattattcacttggccaacatggcacggtgttgataataatggccaatggaagcaaagggatgaccatgaaaagtgtgtattcattggcattaccaatcatggaaaaatgactcatccttttgaattgcctttgatttttcggaattttcaacaatcccacgaaaaatttttaagtgtcaatctaaacacatcaaatatttaaatttaagtaagttctcatcttcaccctttccattggctatttatgccaaagggacaaaaaagaaagagagagagagagagagaaaataaacagaaaaggtgcagagaaaaggaaaagaaaaagaggatgaacccttaggggaggagcaacggaaagggccgggggaagggaaacgccgggggggggggggcaaaggggcgaggggagggacacccgccacttctcagaaccgaaatcatcggagatgcgatgaggggcgggatgagtct

SEQ ID NO: 28531 - DNA, 1322 bp, Heterodera glycines
ataaagtcaatgtgactttcgacgacgtgcgcggggttcgatttgaattgaatgtatttaattctgttttaattgatagatggacgaagccaaggcggaggtggaagaaattgtcgattatttgagggacccgcgtcgttacacttcgcttggtgctcgtttgccaaaagtccgtgggtcaataacattttgaatctaatatatttttctcagggtgttctgttggttggccctccggggacgggcaaaacgcttttggcgcgcgctatcgcaggcgaagctgactgtccattcttccacgcggtcggctccgagtttgacgagattctcgttgggcagggcgccaagcgagttcgtgaactctttcgtgagttttcctttccgttttgttcctttgtcccctcatttgtcgacctttctttttcttaaatttgctacagatttctctcgcatttattaccatcttttcgttgaataattattcgcctaattttctgattctttactctccaggtttggccaaggagaatcagccttgcgttgtgtttatcgatgagattgactcggtgggctcgaaacgaacaaacagtgccattcatccgcatgccaaccaaaccatcaaccaacttttggccgaaatggacggctttgaacagaaccagggagtgatcgtgatcggtgcaacaaaccgagttgataatctcgacaaagcactgcttcgaccgggcagattcgatgtgcaggtcactgtatcgaggccggacttgccgagccgaaaggacattttcaggttaacaaaatcaaagaatgggttgaaagtaaaaagattttataaaactacttttggtcattcaataatgacccaatcgaacgcaattaccaaaaatactgttaagactgtatttggacaaaattgtgcatggcgacattaacgttacccaattagccaaaggaacgaccggatttactggcgcaggtgggaaattgctttacagggttggaaattactgaattttgttatttcaagacattgaaaacttggtcaaccaagcagcacttaaggcagccaaagaaggggcaaaggaagtggacatggcccatttggacgaagccagaggtttcaaaggcaaacacttaaataaaatttgttaaatttcagatcgtgttttgatgggacctgaaagaatcaaagggcgactgccggatgaggaagagaaccgatacaccggtgggtattttcggaaataggaaggaatggaggacaattggaagggcaaaaatattttataatggaattgtgaattgtaaaatgctgatgatgc

SEQ ID NO: 28532 - DNA, 1169 bp, Heterodera glycines
aagaaaggaaaagcaaaggaaagagaaaccaaagggagggaaaagcgaaacaatgcaaaaacaaacggagggggggggggagaaaaaagcgcaatttgagaaagggaaagggaaaaacgccctcgaggaacaacggacaaaggcaaggcaaaaagcagcgaaaggcgaagacggcacggcactgacctgaaggtcggtgttcaataccattatcttctcggttgaaatgaacaggtctatctcagtgctgggctgcaattcgccgtccggagcctaaaaaaaaagtccatagacagtccatccattagtatttaatcctcggatttccaatttttcattccaaatccccattccgtttttctcacttttacgcgtgccaccgcctcttgtgcctgtgccattcgcgaacttttggacggccgaccgtccgaactcatttgagttgagcccaaataacgcgcccgaaacagaacgccttcgatgagcactgcaggttcatgaatgattactgcaaagtagaaaaatgtaaagacggattacgataacaaagagcacagtaagcaagaaaagggagggggagcgatagtttgagaagaaattaaaggaaatattcgattagttactgatacaccgtagtgctatgattagtagaagttagctgatttttttctttttttaagtctgataagtgtttcggtgtgtgagaaattgtgtcaaacatagaagtgattggggtgaaaatgctaataattagaaatgctaataatcataggaacggtaattgttattggatgaaagtgacggtttagacaaaacgccatagaacaacaaacacaaacacgaacagagaaaaacaatccgtgaaaagaacgaatgacttacgtgaaagtgcggaagagagggagagagagtgccgttgtggtggaggggaggggaggggggtaattagtgattagcaaaaggcccaagtgtgaacagacggagtgcctcctgcataggaccatagggaaaaccagggggccaataaccattcagatgaaagagtgagtttaatcatttttgtgttaattggcacttgtcttggaaatagtgcccccccccctccggctgatcaccttcctttttgctgtgctttctctttgtgccattttctcgcagttcttcttcct

SEQ ID NO: 28533 - DNA, 1085 bp, Heterodera glycines
ttttgtcaccccattaaaaaattttagagtattaaaatggaaattaaatgtaatgaattattttattgtttaaatcgcttaaaagaagcaaacatctccattcgcaaaatgccatcgctggacaaagtggggcttttccgtggtttttattgcttttcaaatcccctgaagatgctcgaggacattgacttcgctttggttgagctggtagcccatgtcaaccgtttcctcgccgttctgaccgttttcctgccaatgttcgtcgtttcgctcactcttcttctgctcatgatcattgccctcctcgtgttgtccgtttttctccaattcaaacgcctcaggggacaaaaaatggagggaaaagccaatgctacgcgagtggacgaatcggaagacactgatcaaattgggcaacatcagcagcaggtgggagagagggccaatgggacgacgaggggacaaatttaggggaggggcgaaagatcgaattataatgacaaaccaacacggactggaaaatttgggtgttcaactcgggaatggggaaggaaatggcaaaatttgggtgatgaaccgaaaaaattgggaaaattttcaatgtcccatcaatttgatattaatttgcattaattagctttggtttgactccgtttagttgagacaatccttcggtcgaaaagatgcaacttttgtcacgtctttgcgtgtgattgagaagcccaaatggaaagcatcgcattggccgaggggacggagcagagagcgcgattttaacttatgagaagcggcggaggacaaagagagaatcgagaaaaaaggacatcgaatattgaagcgatgatcccttttaaaagcaaaagcaaaagcataatttatttatatttattattattttttacaaattttattagtgacgagaaaccaacgcaaagcatttcctacaaagaatgagataatttcatgcagacaaattactttttcatcgcagcttcagatttgcaagaattcatttcgaaagtgagtcaattgagccgaagccggatttgggaagaaaagcatcagcaaatgatcaaccagtgttcgtc

SEQ ID NO: 28534 - DNA, 1315 bp, Heterodera glycines
  unsure (1)..(1315): unsure at all n locations
aaattcggtgatttttaggctgcttcgcggcttcagacgggcgcttcgcgcccgtttttaatttttgttgtgcttttcggccgcttcgcggccgttttttaaattgtgttgagtcggacgggcgcttcgcgcccgttattaaattttgatggactcagacgggcgattcgcgccctttttgtggcctttntaggccgatttgcggcctcgaacggccgcttcgcgccgttttttaaattttagaacagatacaaaagtgattagaagaggtagaactgtgattagaagaggtacaacagtgatttgaagtggtacaacagtgattagaagaggtgcaacagtgaaaaagtgatacaaaagtgattagaagaggtgcaaccacggaagggaaaggcacaacagtgatttgaagaggtacaacagtgattagaagaggtgcaacagagattgaagaggtacaaatttgatgaagaggtacaaatgtgatttaaagaggtacaaaagtgataaaagaggtacaaaagtgattagaagaggtacaaaagtgattagaagaggtacaacatggtttaaaattaaataaataatgaaaagtttttataaaaatcgattgcattttaatttacaatttttttataataaaatactctttttattcattaaatataattttgaaaattaataattgaatatttattttgaaatgaaattcattttttataaattcaaaaaataaataatgaaattaaataaattaattaaataatttataaaaatcttgaaattaattaaaacattaaaaataaccctaaaatacaaagaaaaataatgtacaccgcccgtgtccgaacttcgcctatatgaaattctttaatcaaacaaaaaattaattttaaaaaatttttcactaaaaaataatttaatttaaattaaaaaattaattaaaaaaacaaacactcttttaaatgaattaaaaacattaaaaataaccaaaaatgcatagcaaaaataatgtacaccgcccggattcgaacttcccccccctcaaaatgatgcctcagaatccccaatcacacagggattctgaggtctgaactatgtcaaaagtaaaatctgatcacgtattcgtgatcagcgtcataaaatacccctaaagacatgtttttggaatattttcggtgaaaaaatttttccacccaaaaatcctggtcacccccctatggtcccgaaaccaaaaatcacttttatttttataacaattcgcaagaaagagataaaaatgtaaaataaaatttatattatagagaaaaaaatt

SEQ ID NO: 28535 - DNA, 991 bp, Heterodera glycines
  unsure (1)..(991): unsure at all n locations
aaaaagaaaatgcggtccaaaaaatgcgacgacgtctcgaccgatgacattttgggtgcaccgtcccatgggccctttttggctttccgctgaccaaccccttgtggcacatcatccaatgaatcgtaccatcgaatggttctaagtaaatcttcgccaaatttcttcttcaaagtttctcgttggcgctccactaaacgctcggaactttcaaccaaataaacttcaacattttgtaataccttaagtaagagaattaaaaaaggaatgagtacggaaggaacatcaaattggcgcagcacattaagcacatcggccatcaattcgcccgagcccggcccgagttcgaccaattgccaccggtccttccaagaggtcatttccaactcatgaacaacccaactcccaatctaaatacaacggacacggcttacaaccaaagcattgcctactaattctccgaatatctgagtcagctccggcgaagttacaaagtcacctgaaaaagatgcacttgcttccgtttaaatccagaaattttaccacgctctccaaaaatttcattctaaaatagcacttgtgatgactgataagatcaaaagagaattacttgaccagcataataaccaagttgagaagtggcacaaatttgcatgtattcagcaaccgtaattgggcctgaggtgcgaattttgtcacgaataattcgaaacaattgatttcccgataaaattggtgaaggaatgcaattcgaaaatgttggtgttttggaagaataatgagccagtttatttgcaataaatgcacaacggagaggagttaaatccaggagacaatttcgaaacataataagctgaaaatgattgaataaaaagtttgcctgccaatttttgaatatttttttcgtcgggacaccaattcttgatgnatgccaatttggcattatgcaattttcgagtctgggacctagaacgatatttatatttaccta

SEQ ID NO: 28536 - DNA, 1113 bp, Heterodera glycines
  unsure (1)..(1113): unsure at all n locations
ataaaaatgaaatttggttgggcacccgtaactttttgatggattgactgatcggaaagctcttttgccgttttttaggagtaatattcggggtttgttttggcatagaaaagatttcaatccaataactcatctcttggaaaaacgggtttaaaaaattttttttttttcatatacttttgcacctgactgtacctaacgtattaaaatgcgcacggatcctatgctagaacatcttcgtttcctctagattatacggcagcttcatcagtatgcagttgaaattcgcgggggtggtggtcaaggaacaacccacggcngggttttacgcggatgtgagaagaagggatttgatttaaatttggcgttccgtctgatgttcattgtccattcatatcccatttatcgatttaccctttgacccagtcaacatattcccccgcccgtttcccatattcattcgtaattgttttattattttctcttcatgttctcctttcccaatccgtccctcctccaaataaatatatattatttcctacttgttcccaaataaataattattctccaagtccatcgccaattgactaagtgaaccgaaccctgcaaaaacccaaacccgagccccaacggccctccctcgttttcctgacttggcgctcctggccgacaccgaactgcaccgccttttggaagacaccgaattgctcgacgattgccgacaagccagcaaagcacgtgaaaaaacagcgccgtccgcccactcaattcgccgaaaatggaagaatattttggtcaggcaagttttcgaaagagaatgttggcacaaggccaccgactgcgagaaagtcttgcctgtgaaggcaacaaaaaccggattttggctgaaactgcattcggtttcggcagaaatgaaggaaattgtgaatttggggggccgtcagtgcattccaatttcggtgagaaaaggatcgaaagatccgggtttgaaggccgaacagagcaagagaaaaatttggtagaaaggctgaaagctgaattggtaagagttaaggccgaacgagacgaagccaatgcaaaaattgaaattttgcgagagaaattgtcggacag

SEQ ID NO: 28537 - DNA, 1037 bp, Heterodera glycines
aatacaaacatatctttctatcttatttattttatataattaggaatttatttttctatttaattttttttcataataagattattctattttatttatttaatttttaataattccaaatttttctcaccgcccttccccaacactctgatcaacgcgaagttctccatggacaccttctgctgctgttgttgctgatcatctccatcaatgtttgtccaccatttgaagtcgtcatcatcggaggccaatatttgcccaaaatcctgcgcttgctaaactgagaaatattttaaaaaatttaatttttttttaaatttcggccgatagaatacaattcccgatttttttttaattttggaggttcgacgaatttcaatttctaatttctgaaacataaaaattccgactccgaaatttctcgagggttttagaattccaattatgattatttaattctcagaattcttccgatttcggagaggtttgttgttgggccttaaatccctattgcccctattataagccaaataggtacaaatccgtttcctaatccaggcattattattttccgaattatatggcttcattatatgctgtagttgtccttcacactcagccgctaaattggcttttctaatccggattatcctctccaaaaaagggactcaatccatgctatggtcttgtccttgaaatgtccttgaacatgcctggtccttcttggccagcagtccgttgttctgttgtgactgttcactttcggcatctgtgccacccccgccgccaccaccaccgggctccatcgatgacgtggatgtggttgtgtttgcggatgaagcggatgccgatgtgctgggcggacaacacggcatttgcagtgacgccattttcaaatttggcagttctggcattttgtgaaagaaatgtgttttttttccttcgcctcaaggggaaataaggccataattattgtgcttctcaaatatgcaaaaaccaatcaaacaaatgatgtaaatgcgcgaaggaaaacaaag

SEQ ID NO: 28538 - DNA, 934 bp, Heterodera glycines
  unsure (1)..(934): unsure at all n locations
ataaagcatagagaagtggcattatgccgtcgaaatacaaaaaaaagacagtacatcaaatcaaatttcgcatcgtattgtaactgtaccgtaccgtaccctttttcccatcgatgttcattggccactctgtctactcctcattctcctcccattccatccctcctccaccggcatgtcgtcggcttctgtcctcctcctcccgcttgctccagttgctgttggtgctgctcccgctcgcggacagtgacacggagggcgccaacgcggcagcagccgcccgctccgcaatgccgagattcagtttgccgctcgcctccaacgcctcggcggaatggttggcgaaatagtctgcaaaagtggtgacaaaataagaattactgctccaatttgtgatgccttccatggaaatcgtaaaatttttagggaaatttttgaaaaaatgttttccaatttattttttttttcagaatttaccaacggaatccccaaatcgaaagcggaaattctttcaaaaatgttttgggtcaattctttcctcaattttcctacgatttgccattaacccctctccctccgttaattgtgccggtttcggcacactcacagtccaactgcttttccaagagatgcagatggttgggctggtcgggcaactccgtgcgcacaatttccttgatgtcctccaatcgtgtgcgcatgcgcttaaaatgggaaaataatgcgttgaaaacaaagagacacacacagcagggccaaagccgaatcgcaactgatcaaagacgaatgaatgaccgactgataagccaaggccaggctcgtaaccaaaaaatttttgaggngaaccccagccgggtgcacttcattccccccccccgtaaaaatttttttaaaaaaaggtgcaaacctaagaaattttttataaaaaaattct

SEQ ID NO: 28539 - DNA, 2042 bp, Heterodera glycines
cagactaaatttaaaaaatcattaaatcacaaaactttttcgggattttccactccaatcaaaagcttatcacattagtctaattggcgttttaatgcgtaaaaaataaattcaaattctgtttcttcacatttgataatataataaagtacaaaatttgtacagtatgaatttgttcatgtctttcctattgaatgattaaaaatattattttaaccaagaataaagcaaatttaaaataattcttttttatacattacaaaaagttatacagtatgaatttggtttttatttgaattttattatttttatcaagaataaagcaaataaaaatgatcaaatatatttatttatttttgtaatttgatcatttcgttgtggcccgaatttccgatgtctttttgctgtacgcttgtatcattatatcgaccacaaatgtgataagatgtgtaaatgcgatgcatgtttcgactttgttgtccatttcaagtcgtgcaataattgctacaaaataaaatgttacagtaacagacaaaataatttttgattcatgtaaatacatattaatttgaaaaaaacattaaatatttggcgctaattaagaaaattgtggcttttgattagaagaacaaaatattttattggattattctgcaaattcactttttaagtcaaattttaaaaaggcgtaaattaaattttacaataattaatacttgcctaaaattacatcaagttaaattttctaattcattttaaaccaatattttatattaaaaattctcccacctaataattgttgttgaaaaaggtccataaaatgttgcttaagcccatactgggcataatttgcatgcatttcgccaagatgtacacatgcatcgtacattttatcctcatccattttgtattcattgatcagtttatcgaaaaacttgaaaattgcctgactgaaaattgaataaatagataatttataataaacttttatatttttaaattattatcatttaaaatattttagaattgttggcattttcaatttgattttcataataaataaatttaactcattaagaaaatatggtatgaactttgggtataacttattaaattttatatgtttagaacgcaacaattttgtataaggtcatatatatcgaaaaaggcaagaaaaaatatagaacataaaagtttactcgcttcgatgggactcgaacccacggcgcccttccataccgtggaatgctctacccgactgcgctacgggcaactcctttaaggggtcctcccatgttttttatccgactttctcccacactccaattccttctttcaccacatcaaaagaatcatttttttaaattgattatttattaaccaaattctgttaagttttggccattttgtcaggtctctatagcaatagtggccgcacgcgataatttcgttcatctttgggctcgcatgaatgcaataatgcattgccttgtggaacagatcgcttcgacttgtcacaatgttattgtgccaacacaaataaattctgaaaaaaaataaaaattttattaataaattttataatatagtaactataaaataaaaataaaaaaacaatattatattgatgtaaatatttttttctaaaaattaatgagccaaaaattcttcaatgccatgattaattaataataaataatcaaatatatttttcttattatttgttaaactaataaattgacgtacaattctcggtcttttggcgacaaaaaattagtgtccatcctccgttcaggcaaaacaattgcagtttctgtccttggtttactgagcatttttgtcagcgttcgtttgttctttaattgtcgtttgatgaggatcgttgtattaactaaaagataattaattcattttaattaattctttatttatttttattactcggccgacgcaaaactgcgacaaaatcataggacggcggcgaaattgtgtgtcctcttgttgaatcagaaattaagcatgaatcgcccattttattttaa

SEQ ID NO: 28540 - DNA, 1557 bp, Heterodera glycines
  unsure (1)..(1557): unsure at all n locations
ataattaaaaancagggctgccaaaaattttcaaaaccagcatttgccgacaaaaaccatcatttaggggccaaaaatcatctgaaaattttagtcaaaatgaaaaaaaaataaaaatgttttttcgcgtcgcgctttttccgaaaaaattttttgaaaacagagggccggcggcgccgattaggcaccaccgggaaaaaattttgaaaattgggagtttttggtggtattttttttttacataaaaatggccattttaaggatttttttctcaaaaatcaaagaaataactgatgagtgtccaaatgccttcagactttaaaatactccgaggggaattgaaccaccgaaaaaacaaacaaaacaagctctcccaaaataagtaaggtttttaccgccaattgcattcaaaatgtgttagatgttatgattaaggtatcgattaaacaactgataaaaatgtgtaccatcgtaaaaatatttattaataattttttaacaatcgccgaattttcgaatgattttttcgagctaacaattcttgttaggagtttacgagagaagtcacttataaatttttgaaagcagaaaaaagctagggcttctttaatttgcctgggacgcaattcgctcgtttcgcgcaacccaacggtcggtcccttgtaagcctaatttaatgcacattattaatttcttcacttttcattttatatttatgaaaacaaatataaataaaaatatgcaagcaaaaagaaatgatgacaaaacgttgggaattttgtggaaatatttaaatgccataaatgataaatgatggtaaaaaacaacgcaaaacccgcgcaaatgatgatgaatgaaggaaatgaaacgaatgaatgtgaacaattataattaaacatatatgcaaagagagagaaaagtaaaaaatttaaaagggcaaaaatcaaattatgcaattaaaaaaatacaaaattggaatacaatcaattagcatttaattggcgtgaaattttatgattgagcgtcagtgtatggttgttttatatgctcaaaaatgcttggaatattttatttaaatttttttttatttcagtaatctcttataataaaataaacatttttgagcataatttcgagagacttttttacaattttatttgatcaaaaattgctgctattttttttttgcccatcgtaactaattacgggctattaaacatgtgtggaattgcgggaaattgttcgttgctgttgctgctgcagttgctgctcatctgccaattgcatcattatgccggcagatgtgaaaaatgtgccattgtccgcatcggtggaatcgggcgtgtgcagcagcacttcctccggcaccgtctccatgatgataccgtactgctgctgctgttgctgtgacagtcgattgttgtaaggcggtgacgaacggttgccgttcatgccagcaaatgccaatgccgcagcattattttgtgatgccattgttgttgtgtggggcggcgatccatcaattgccatcattcctccgtcaaaactgttcggtga

SEQ ID NO: 28541 - DNA, 1516 bp, Heterodera glycines
tgatgtcataccatcaggagtgaatataaaattatatgctgatgatgttaaaatctatatttgttataaagcaagaacagaaacggaaattatgcataaagcattgcataatttattcgaatgggcaaataaatggcaaataaaagtttcaattcaaaaaacttttgtactttatttgggttcaaaaaacccaaaagaaacttataaatttgatgggaatacaataaatgctgtggatacaattagggatttaggagtaaacattgataacaaattacaattttccaatcatgttaatcatataacaaggaatgcgtatttacgtatgcgttccttgttccgaataattaaatccaaatcatctaagatttggattacgttatataaaacttatattaggcctttattggaatacgctccggaggtttggaatccgtctcttcaaaaaaatattaaaaaaatcgaaaagtgtcaaaaatatttcaccaaacgggtgttttttaaatgcagccttccgccaattccataccaaaatcgattagaatacctgcaactaccaacacttgagaaaaggcgaaagctatttgatctgttcatggcgcataaaattgtttatggccgaacagatctagatatattaaaaattttcaaaccttctgaacgctttaatgtccccttttataggtttaacacaaaatataaattaggcaaaaaatttattccctttgcggggagggctacaaaattgtggaatcagctggataaagaaatcattaaaataaattctttaaatcaatttaaaactaaaattaaactccttaacgtataaaatgaccggaaaagtgaattatctctttaattaaagatattatatattttatatagtgatttggttttattaatcattgacctcattcttatatttaattttgttgtgatttctttttttgtttaatgtttaatccatattactcgaggacaatttaatctatgacacgtccgcagagtaagtggattactcccttttgtggacttttttcttttttgcataaataaataaataaataaatttgacaaaagcagaaaagccaaaagaaagaagatatatttatgtcaacaatttttttataaattttgtccataaatttttattaaatcaatttcctaattcttaaaaattttttctaaaaattggctattttcaaaatttcttacaatgtcttggcctgccaatgacgcgatgtgcagtgccgtgttgcccttctttgtgcttgcgtccacagtcgcgccacgtcgcagcaactcgcgcacaacctctgtaaacggaaaaatttttcttttggcgaatggcgataaaatggccataatttgagcatgattatcttaatttctccttggccaattcgaggaatgttttaagtagggatgatatttttagggttttcactatttttttcctgagctccccgtagcgggaaatgcacgaaaaaccatgttttttttggctgttgttaaa

SEQ ID NO: 28542 - DNA, 1305 bp, Heterodera glycines
tgcctttgcatttccaatgccaaaattgtctttatttgttttttggctgtcattccaattttgaattattgagaaactaagagttttagagccaatttgactggaaaacatttgattaatggcaaaacacttctcttggaatttgtctcgggggacaaaaatgaatggctttcttcggacggcactgactcattgtcagccgcttctccctcgaggggcttttcctttcaaatgctttgccaacaaatccttcttagcccggttatttgctaagaattatttgccaatggaaaaacagcaaaaaaaaaaaaatacaataaaagtgccaatggattccttattacttttaagtgctttaataaaacattggttccctctcaacaacttttgttttgccaacttttactttggcattaaaatgccattgctccccttaattgtgccgtgtcgcattcactccaaaacgcatttggacttaatcccttcctaattataatttattgactctctctttgagtgcaataataattagatttaaataatatattttctgatcactgacgcctctcacaaaagagaatttcttggataaataggtttattacaaaaggcgtgcagaaatgacaaagtgactacaatttataggcaaaaatgatcacagaatttagagggaacaaaaggttaaattataaaaacggaaaaatgacaaaggacagaaaataagagtgattaataaaattattcataagacaaaagattaaatccaaatttataaaattaacaaatgtcaaattagtaatttcacgagcgaattattttggtcgtgacataattatccttttcttatcaaatgttagctcatttccttctcatctttgttttacattggttaatcaaccagccaaaataaaccttcatttaattaattaaaatgttttttacaaaattttcataattaaaattaatatttttcgctattttgagatttattaatgtgtcataattcttttaatctttttttcagaaacaaaaaatactgaaaaaggtttattatgtattcaatccgctgaagagagagagagagggttttggacagtttttttttggggagagcagtgaattttgagtgccgaagtgacagaaaagcgaacggccgaaagagcgaagccaacggacggatggcatcatttcgtattaaatcctttcaaatttttatcagttcgcccccttcccatctccatccctcctctcccctccctcctctcttccctccctccccttcccctctctctatttaatagatcc

SEQ ID NO: 28543 - DNA, 868 bp, Heterodera glycines
aatagagtacccattctcggcgatttgtcaccaattagccacccggggggcaaagtgcgatcagtgatcgcaaaacgtttagtgggaaagagggcgggagggggaagcatttgggcgggcggcgaaccgagccgataaaagtgtataggaaagaatgaaaggaaacgataagagggggggggggggggggagacggaggacgatgttattaacaattggtgattattaccaggctgaactcgagtgactttattatcaccgagaatattgtgcaagggcaacagagagagaaagaaagagagagagaaagagagagaaagagagagagagagaaagagagagagagagagagaaagaaaagagagagagagagaaaagagagggagaagagagagaaagagagagaaagaaaagagagagagagaagagagagagataaagagagaagagaaaagagagagagagagagtcattgttaagtattgtttttgtatttgtgaataatggccaaaatgtgacaaatttccatcgaaacaacaaataatatttgtctgctgatgtttggtccctaacatttgtgtaaaaaatggcaaattaatccaaaaatacaaaaaaaaaagatccgttggaactggaattaaagaaaacaaatgatcggaagcatcgctttaggtcagctgatggccccaacgttatttttaaatcgcaattagtgcttactaattaccttccccattattcgtttttttataattttgtcgtgttcccgctgctgtcaataacagttggtttggcttccaattatgctttaaattggacattttcgtgtgttcgggcgaatattttccctttccattagggggggggg

SEQ ID NO: 28544 - DNA, 539 bp, Heterodera glycines
caaatgatcagatttttatttatccaacaaatgaatgatcgaagaatggactcaaaaccacaaaatgatcagcgtatcaatgaatgaaatcaaaagtgtccaaggcaatgaaaaggaaaggccattaaactttgtaaaacagcagaagtataatggaaatgtatgtgcacaaacaaatcacagcagcacgaccacaaaaataaggcacacaaacgcaaaatgggaggacaaatgggcgaattgggggggggggggaggaaaagcatagcattagcatcgctaaacagtccatccaaacccaacccatccaaatacaccacagtctcgaaaggggggaagctgttgagatgtagtgattggaatggatgaaaataatgatgaggaagaagacgatatcaatgaggagatgatgatgatcatcctcattatgaacagttaacaatccaacaattaaggaggcgaaaaaattaataatcaacggaaagaccacatgaatttgttcatatcttgccgcaaaatttgcctattggaactgagat

SEQ ID NO: 28545 - DNA, 763 bp, Heterodera glycines
ctatatttataatgtaattttgtaaaggtccaactggaatgccagctgttgactgtttgaatgggtatcgcagttacactgatcgctgtggggagttttttatgggggacccattggacccaaatatggagacagacttcgattttgctggaaacttggcgctttttgacaaggctgttagtaattaatgtgatacttatgcagttttaaattaaatttttttttaataatatatatttagtacaaaaaatacgctggctcattttgattcctttccacctgctaaattaaaatcttcgtttcggaataatgttattcaaaaatatctacttgtaacaatgtagtttttaatatcaaagattgtatatatccttcattttatttttgaaccgtaaacacacacattaatagctttatttttgaaaaataggaattcaaccgcgaaactgaaaacgtcttccatgggcttgactcggccggcgattgttctcggaactatcgcaatgatgagaatgttcttcaggtatgtaaattattgtttacttctgctctattcatttcgcttaaggattcttcccgtgttatctcgtggaccaaaaataccactgctgatgatgatgacaatcaaaacaattctacctcctctccgatcgactgacctcataaaacgatttgaacatcgcccaatttaggttgttgcctcgtgcaattgttgtcgttttttctaacattatacctatgtggatagaatccgatctaacaa

SEQ ID NO: 28546 - DNA, 1366 bp, Heterodera glycines
tgaaatttattctttatttgttgttgatttttggcaacttggcatagcggcgattacaaagagaagcaattaagggggggggggggggaatttgggcgaattggaaaagctaaacaaaataaaaaaaggaaggaaaagaaaggcagtggaaaatggggaggagaagggcacgggggaggggagggcaatcgctactgattttctgcgttttcttcccctgatcagaatagcttttttcaacgtcttcgggtgccgtcctcgaagaacactccgccgtccacggcacagtatttgggacagattccgcgctctccggggttgccaggctgtccgggttggccgggctggcccggtgctccgccgttgcctggctgtcctgggcctccaggcggtcccttcgggccgggctgtccggacgcgccgggctgtccaggggctccaggctgaccgggctgtccgggtgcaccagcctctcctgaaacagagattaattagtccgttaaaaattaagcgaatgtctgtgtcggtctaccaggtgggcctggaggagggggctccgtctgcggtgggctggcaggttgtccgggctgtccaggcgctccaggctgtccgggttggccaggctggccattgggcccaggtggaccgggctctcccggttgcggctgtcctcctccggtaccgggttggcctggtgatccaggcgctcccgggggtcccggtgggccattgtttccgggctgaccgccagggcacggggtgcatggaggctgagcatggaaattatgattacacgtttgatgccaaattcacgggactcaagactaaacccaacccgaatttaccgggtgcacttgctcacaaggcgtctgcggggtttgtccgggctgtccgggtgagccgggtgctcccgggtttccgggtcgtccaggctgtccgggttggccgggctggccttgggcaccgccggagcaacactcttggcagctaccgtatgcgctacgcgccgtacggtttccggagaccagcagaggcagccccttcagctgactgacttcggaccaaatgtctttggcattgtgctgaaaatggcacttttagcacttaaattgtgtgccgtattctttgcctggcatgagctgagctcagagtccattttcatgcccacgttcgacacgtaactcttcagcattggcagtgtcaagcacaccgacaaaagtgagatgatggagaaagaaacggtcgtgtaagccacgaagcggtaagctttgacacgcccttcgaagtcggccattttttgctaagttttctacctgaagcgccagggggagggaattgttaattagttgggacaatgcttaatagt

SEQ ID NO: 28547 - DNA, 1263 bp, Heterodera glycines
tattacgtatataaaatataaaaattgattgatgcaaatatatttatttgataatatcaattaaagattaatttccggcatctatttctaccaatcaccgagccccagacccgaattcgaacaaaaattcgaaaagtcaaattttatgaattttgagttttatatcaattaaagattaatttccggcatttatttctaccaatcatcgaacctcagacccgaattcgaacaaaaattcgaaaagtaaaattacacacacacttattgggctttactaattgtatgtactttgtctaatattcctttggtaatttatttaattaaaaatatattttattgaaaatatttttctattaaatttaatttctcataatttagaaattgccagttgtggagatttgattgcattactcaaaacctaacgatacgatgtgtttttcaagagaaagtttgtactcacaatcagcaaaatctatgcttttaaaatgcttattttaatccattaacttttgatttttccaactctctagaaatggcaccaagaatgccgttaacggctgtcggtggaataccaaaaagcagtaaaaacgcttctttgtttaaagcaattacctatgctttaatcaattcagatgcaattggtctctgtttgatttgcaaggaactttcttttggcaaacactacggtttgtttgggaagaatcatttctcgagaattgacttcaatgcccttgtttaggttgtataagttgccttggttgtaaaactttctttcgtcggtaattattccctttttatcccttttgcattttatgctttcttttttgaatttcgttttagtgctgttatgcacaaccaggacactgtgtgcaaaaagccaggcttttgtgagttcgaagtgtcggctcgtcgactttgtcgttcgtgtcgatttcgtaggtcctcgatggacaatgaattttgtcgtttatattttgattatcataggtgtctcgagatgggaatgagtcgagaagcactccaaccaaagcgtgatttgatcggccggcagagacgtcgtcgttaccaagcagttgcatcttcggtcacccctcccaaccaattctctccttgcacttcgtctccaaccgggagcgaagatgcgttaaaggtgaacgaatgaatttgggtctaaatttacccattcaatattcccttgccgatatttcttctaaatttcagttccttaataattcccctgcaaatgaaaccggtaatgatgcc

SEQ ID NO: 28548 - DNA, 855 bp, Heterodera glycines
aattacataaaataaatttaaatgaaatgtagggcaaagccgcaaatgtcgggccgcaaatgtccgaaaatggcccttaagaaatgggccgcaaatgtccgaaccgcaaatgtccgggccgcaaatgtcgggccgcaaatgtccgatttggctggggccgcaaatgtccgagccgcaaatgtccgggccgcaaatgtccgggacgcaaaagtggggtaaccgttgttacccagcagtgggaaaaaagttattggttaaatagcaaaaaaaaggtctttaggtcgggatagcaaaaaaaaaaaaaaaatcgtctttaggtcgggtcccccccccccccccgaaaaatgtttctagatacgcccctgggggaaaggggcaaagttttggccctttactaaccaaatttgagattcttgcaatcacattgggtttttgggtgttttgccaagtcttctttcttgaattaaatcagacatacgtttaaccatataaattgagtgatttcaatttgtcccagcaaaaattgatgaattccacgccttaacacaacacacattaagggaaaagcgttgggtgatgctcaaggacagcagcatcagtgtgtggaaatgggtgccggtgtcgtgcccgcccggcggtgtcgtggcacccaaattaatcaccgcgcaaaagacagcggcggcaaatgacgaaaatggcagcgccaatgggacgccgacggggcaaaccgcggctgctgccgcggcggtcgcttccgcggatgaaacgacgatacaaagcggcgtgtcgggcgagaacaattccaacgaggacacggggtgggaaatcaaaatggaatttctaattttgattcaa

SEQ ID NO: 28549 - DNA, 1112 bp, Heterodera glycines
  unsure (1)..(1112): unsure at all n locations
actaagaaaacgaaatttantcgggtaaaaattttaatatttttgttgcgaaaaaccgaatttcatgggaaggattctgaagtgtttgaaaacatttttttattttgatggaattcaatatttacggtgaaaaaatttatgaaaatttgaacgatcgatctttcggagacgttttttatttaattatctacaaatttagcataataaagccacagaaaaatagccttcttataaaaaatgatgcctactttcataggctccaaaattatttttattattttatttatttaaaaaaaaattcggccattgactaaatttaatataaacttttttttaccttccaatcgtttcgtaaatgcatcttttccctccattagtttgttcattgcgatttcgtgcaaattaaacaaaaactgcaaatgcttttccctggcacatggattttttaaatattttggcgcaattttttcgctgaaaagttcatttttcttttcaaataaatcggagagtaaacggtgttcgtttcggtcaatctcctccattggaattgcttccatggcaccgttcattaaaatttccaactcggccaaacaattgtccaactgttcacgttttccaccattatcagcagaagcagacaaatggtgttcattttctttaaagcttaacagaggagagttaaatgactgtagaaatgtaaataataataaattaattaaaaataaattaatttaagtgtgccgttagagccgggattaattaggcgccacaaatttaccataacgaaagattatggacatattttttaaaatttcgaaaaaaaagacttttttatgtcagttttaaaccgtattccaagaaaagcaagctaaatgttaggatagaggctttggcaagcctggcccaggccctgttggtttctctcgtttttcttaagcctaggttttcctgcaggaccaagtcaagcatgaaaaggtcaagtccagcaagctttttcaaagatggttgattcctagtcaatacttttattaaattattttaatatattaattaagatatttgttgtcgtggagtgggaggagcatttgtcgaaaaaattttaatcaaaataa

SEQ ID NO: 28550 - DNA, 1200 bp, Heterodera glycines
atctactcaaaccgcgatcacaattcaataaaaataaccttccggtgcgaaaaatggggcttgaaaagtttttttgagcttatactttacaaaataatacccctgggagaagggagtgggaaacatgatttcaaaattttccattttttctagactaatctactccaaacggttcacaattccataaaaataacattcacggtgcgaaaaatggggtttgacaagtttattggggaaaaaagactttacaaaataatacccctgggagaagggagtgggaaacatgatttcaaaattttcaattttttctagtctaatctactcaaaccggttcagaattcaataaaaataacattcacggtgcgaaaaatggggtttgaaaagtttattggggaaaaaaagactttacaaaataatacccctgggagaagggagtgggaaacatgatttcaaaattttcaattttttctagtctaatctactcaaaacggttcagaattcaataaaaataacattcacggtgcgaaaaatggggtttgaaaagtttattttgaaaaaaagactttacaaaataatacccctgggagaagggagtgggaaacatgatttcaaaattttcaattttttctagtctaatctactcaaaacggctcagaattcgataaaaataacattcacggtgcgaaaaatggggtttgaaaagtttattttggaaaaaaagactttacaaaataatacccctgggagaagggagtgggaaacatgatttcaaaattttcaattttttctagtctaatctactcaaaacggttcagaattcaataaaaaataacattcacggtgcgaaaaatggggtttgacaagtttattgggggaaaaaaagactttacaaaataatacccctgggaaaaaggaagtggggaacatgatttcaaaattttccattttttctagtctaatctactccaaaacgggtcagaaattcaataaaaataacatttcccgggggccaaaaaagggggtttgacaaatttatttgggggaaaaaaaaattttacaaaataatacccccgggaaaagggaggggggaaaactgattttaaaaatttttaatcttttctaagttaaatctactccaaaacggtccaaaaatcaataaaaaaaaaactttcccgggggcaaaaaaagggggttggaaaa

SEQ ID NO: 28551 - DNA, 898 bp, Heterodera glycines
gaagagtgattagaagaggtacaactcttcaattttgctctaaggcattttttggctaaaaccgacccctgacgagttatgggcccgggactcaaatgtcccgctcaggccaaaaattttttctatttccgggaaaaaatcgaaatttttccgaaaaaaataccagtcgatagagctcgaaaaactatgttttggaagtggtctccgtttctctgggaaaaatcgttaaaaaatcctaaaattcaaaaacccgaaaaccgttttttaggcctaactcgaaaaattttgaaaattttcgaaattttaaaacttggtttgatagcctttcaaatactacacatttttgctcagaaacaatttttcggtcaaagcaacccctggcgagttattcgcctggtactgaagtgtactttttgagcacacttcagttagccaagcgtgcaggccagggggtggctctaataaaaaaataaaaaataccagcatgtagaggacagttgtggggagtgccctcacagcgggcactttttgattcgggttttagaaaaaaagttaggggccctaaactgcaagaaaaagtgaaaaatcggtccccgggactcagtcgtccgcgctgaatttttctctatagttttcccggatgctcctcaaaaagttgtaagacccttccactactttcagggcgctcccggccttcggccgggagaaaatggttttagcaacgaaactcaaaacctatataacatatatataactagcgggtgcgtgaaccgtcggctatttagctgggaaaaagcgcttcgcgctttgggagcttcgctacctagattagctctggttatggaaattggaatttttaaaaaattatctggagacttttttttgaatttttaaaaaa

SEQ ID NO: 28552 - DNA, 1264 bp, Heterodera glycines
gttttccaaaaaacaaacaatccaaccttttgttcagcacggtttccaactcaacttcggcaaaacggtacattgttttttgaaattgtttatcaaaatccaaacggattttgacaaaattagtgtgttgttcatcaaaacgctctcttgacttcgccaactgttgtttgaaacgagcccttgatcgagcctgttgctgttcgaaacgctcattgagatgcgatgtgaaattttttgaccacgccgtgaaatcgttgttgatttgcttgatatcgttgaaatgtccactgatcatcagtttgaacgatttgtgcttttcgtccacgtgcagaaacaattgataagtgatgcataccatgacaacgcacagacccagagcgccgacgacttgccagtatttgctaattccttaaaaaaaattttaaaagacaaaatcttgaacagattggtggtatgctatgtaatttctaatcgagaatttaccatgaattaaataattttgattgttccgtccacgattcatgattaggtagagacgaaaaaaatgcaagaattttactaaagaatcaaaaaatgagaattaggaattaaattcattttaaacggataatgtggatatattagcttggtatatgaggtttttttaaacaattttgaacataaattcacatcttaagcgaccggctgagttgtattatgcctttttcaagattttcgtgcctttaatgcctttttggcattttgctattttggtgcctttttggcatttttccgaaaaatcccatttaaaaatgcaataaaatcgggaaaatacacccgaaatgacctgaaaaattttcagaaaacatagatggtacttgataaaaaatgttaggtttaaaaatttttttccttaatataaaatatttttaataatcattcaaatgaccaaaattaagttagttggttaagtattctagtgccttttgctaaaacctttcataaacaacaaacaaaaacaaaatatggctctagtgcactttatgagtccaattgagttttatgagtccaattgacaatccctgggttgttatacaataactttgttcatgttcgaacaaaccctatgtttttggtatcattcgaaagcacacagtctgaataatgataaacatttaaagaagttacaaccgaaaataataggcaattacttgattaatcagatcttttttcgtaatcatgttggggttgagattttatatattttagctactttagactttgt

SEQ ID NO: 28553 - DNA, 868 bp, Heterodera glycines
  unsure (1)..(868): unsure at all n locations
gaacaaaaagtcgaaagtccaaattttcgaattttgcatttttggttcaaaaacggcatatatgctctcttattgaaggattgatggatcagtttgtttccttgtatttaaaccgattttgaagaaaaacactaatttcgaaaattttgactttcaactttttgttcgaatacgggttcggggttcgaaattcagaacaatattcttatagaattatacttctgtattacaatatcaatactacaaaacttaatattaaaatatttgtatcactgacgcattttccggtcacgccccgcttaccatgttaagcttcgggtcgggtgcaactgcgtcattggcattcacaattggaataatgttcagacgtagcagactttcaatggtcgcctgcagatttttgcgtcgctgcgggtcgtcaatgtccggtttggtgagcagaacctgcaaaatgaccatggaaattggaccatattccatggggatagacaaatggttggacaggacagacctgggctacggtgataccgtactgttggaacagctgttcgtacagactcatcagtcccggcattccgctggcggcacacgcccttttgtccgtctgcatgccggcgggcccgcgcaaagtctgccgcatggacatggacatgaccaactcctggcgcaacttttgacggccaaacgcaacggcgcccgatgaaaccatcagcatttgacggccagtctgttgcaattcggacacctgagaaagagggggaaggaaattggatgaaagaaagacaaacaaacaaaggaagggagaggaagtcatcagactatcaggtaaataatggtnaattgatcagaagggggtgatcggacctat

SEQ ID NO: 28554 - DNA, 810 bp, Heterodera glycines
tctgttctctgttctgccattaccgaatgtgtgtgtcccgtccgttctgatgattttggataatctgaacaacgatgacaaagacattcgccggtcgcttcgtcccggcatggcgaaggtcgatcatttgccaccccgaaggctctgtgaaggaaagggacttgggctcgtccaaatccaacaccgaagcgccggtctgaacttgaattctgaaaaaacaaaggtaaaagcaaaagcaacaaaattcaaagttcacttggagggagtgtacgactcgtcgagtttgtagtccaaaaacatcagcagaaagtcaacttccgttttccgttggaattctatggtgattgagtgcggctgaagaccatcactttgcctgaagggaaggaattgacggaacaatcgccaaaaagtttcgcttcccttcccactaaatgtctagtgtgccacccccccccccccccttaccaataagtgtcttcgcggtcgttcaacaactgatgcaccccaaggccctccttacagctcgaaagtgtccaaatggcatctcccgaaatgtcgttggggtgaccaacgccgggcgggagaatctcagcccaaaagtgactttgtcgctggtgagaatcatcgacaattgaggacaaaccgacactcattattcgtatttgggccgaaagcagaaaaatgtcttttttttctgccgactaatcagataaaattaatcattataaaaaagaacaagtgattatcggagcccttttttgaagcaaatagtgttttaatatatcgaaatcctccatccctggaaaaaaa

SEQ ID NO: 28555 - DNA, 1190 bp, Heterodera glycines
cgaactgaggtagaccgttgagggggtattcccgcccgtaaagttcacagggctgaattcgaaatcagttgctaaacgaattgctcagaaattgccttagggcagcaaattgttgttttgaacattttgccttggacacataaatgttagcccgagaaatattaaattttaaaaatgccagaaagtttttttaattcttaatgattgccgcttttctccttaaattgttttaattcctttggggcattaaaaatcttcttctttttttctctatggttttttatgtttacaaaatgccaatttaaaaatgtttaaataaacaattgtgcttgagattttttcagattaacaaattttgaatatttaacaaaaaaagtgatgttaatggaagctctttgttgttgtgccattttattaattcattcttgtgcccttgccgtgtaatactaaaaagtgaattaattaaattcaaataaataaaaattaattaaaataaattaccatccaataaacgaggttgaacaagccaaaagaaattgggaaacatttttggcaaaatctaaaaatggaaatgatcatttaatgattttgccaattttatccttttaggggaaaaaattaaaaaataagaagaaaaataaatttgaaaatgatttttgatatttaaataatattagtttttgttaattttcttttaaataaatgaataaattatttttttataaatgattaaatgaaaagaaaattaatttttgtacatgattttgaacaataattacaattttaattttaatttcaatttaaaatattaattttttttccaatttcaaattatttttatcattataaacaattaaatataattttttatatcttttcacctgtccaagtcttcgcccgtccatttgctgaacagttttggcacaggctttggcttccgtcgcttgcgcgacattgcccggttcatccacgtccgtgccacaaacgccaccgcctgcaaaaaattataaaaaaaaaaaaaattttttttttgtacctgggaagggtctgtggccaagccggcacgggggtcttcggaagggcctctgaaaattaaattacaaaaatttttgaaaattttttgtccaacggagtagcaaaaaaggtcgccggacgaattgttggaccataacttttttctttctcaacca

SEQ ID NO: 28556 - DNA, 316 bp, Heterodera glycines
cccccccccccctcccctttcgctcgtttttcccgacttctcctcgtaataacaaatccagtttcggttccttaataaaacacataaacttttccaaaagctgctaaaccacagcaggagacggctgacgtgcagaagcgttgggaagttaagcggagtcgtcaaattaatcgcgtctttcgtccccccccccttccccccatttcccccgtctcagtcgtccgttcattcgacagaatgaatttaaaggattttaggaaggctttagcgcatttatttgcgacgaaattttatccccgcataatcgttctccatt

SEQ ID NO: 28557 - DNA, 925 bp, Heterodera glycines
attaaaagagaaaaacataaaaaagcacctttttgttcccgttttttcttcaaaaaagtgaaaagcagaagaaaacgtttttcggaaggacaaacgacgtaaccctaaaaagtaattatttcagatcggatggacaaaaagatttatttgaatatttacaagcaaaacaatttcaacaaaaaattgcaattaaatgacagagtcccgctagaatccattcgctgacctgctccaacccctcaaccgtggccatgtcatttgggtccctttgctgctccatcactccgattttcagtgggtccgttttcagcgcagtctttaccaactcgtcaactttgggcgaacatgtggcggagaaaagcatgctctgccgtttctttggcaacaatttgacgatttggtgcatttcctgctcaaatccaatgtcgaaaattcggtccgcctcgtcgacaattaaacacttcaaattgcgcacgacaaaattggatgtattctgaagcattaaataatgggaaatgaatgctgcttttcccttcggttccctcttttcaattcaacaaataaatcaaaaaataacaaatggatgagtcaggacggaattgcccaaccctctcccctcatcgcccgtaaaaattctcattgtactaggtcgttgcataaaaaagggcgctttttcaaaatgactttttttaggacttgattaacgctagctatgtctttattgtgtgtaattcttttatctgaatgatctcgtcatgcttttgccaaaaatattgattttgtccttttatatctaaagttacagtccaaaaaattgcgtaaggtcaacaaaatttggctaccattttacaccaacgtccataacttgaggtaaaattgtcaaaacgacttaaaacttgatcagattatgagatttgatgagctt

SEQ ID NO: 28558 - DNA, 791 bp, Heterodera glycines
ccgaaaattggaaaatgttgtcaaactttcactggtaaccttttgcatatataaaagtggataaatgtgtacacattttctgtttttgtcagcagcacaaagcctttgttttcgctaccgaaaaatcgaaaaaaaaaaacaaaaaatatttttagaggaaaaattaatcattttgagaaaagcgaaaggcgggcgaaagagcgcaaaataagcgcagttgaggaaaaggggagaagcattcagagaactaaacataaaaatggacccaaattgctaactaattacttaattaattatctggattgtttgatgatgctaaattttaattttcgtgttccatttaatataagcacccaatggacgtgattgacttgacgcacgaatggtctgccgatttgtgggattggcctttacaggtaaaaatgagaggtgactatggaaaagaaaaacgattaaaccggtggtccatctgtccgttaattacattattttttgggattttgtgcaaatcattgctctgctaaaatgccggatttgtctccgtccctaaatgctctcccatttgaagcacaaggatggcgttgtgcgtgtcgacaatggccacgaccgctgggaggtcggcttagacgcggccttttttcgacccgacgaaattgaggcatttaaaaataattggtttaataaatccgaatattttgtaccatttttttcttctttttttcctccgcttagatcagtttggccggtgaccatctgttcgtctatttcaccacgaagaacggtcggatgag

SEQ ID NO: 28559 - DNA, 1379 bp, Heterodera glycines
  unsure (1)..(1379): unsure at all n locations
taaatataaaattgtttagcagtcaaacggaccccagagacttcaccgacattgggttggacaattcatttaaattttcaattttcaaattaattatttagcacacaaacaaatggccaagtcattggccactggcgtcttcaattggggttgtcatcatcgtttcggtcgtttgctgtacaaccaattcggccctttccgtattgccctcatgttgcattacatccgcgggcctccgccattttgaatttggcatttcgcccatttccattttcaccaaaagtcatttcgtcccctctcgctgatcacacctttttgttaaaccttttccatcacatcgaaatcactctgcccattcgttttcctatcaatcttttgttttcggctcaatcctttcaaaatccgccgccatctcttttcaatctcaaatacttattttgaccgaatcattttccatctcccacacactctgatcgccttgtatttttaaaccgcttttcgttatttaattttgctttaaccattttaattcacttattctctatttacattaaatgttgttttctttttcaattctttttacaattctcatgttttattatttcatttaatttatttttggttttttacaatcaaataaaataaacagcgaatttgagttgcttggcattttaaaaaatgaacttactggaatttctattaaataatggtaatttagtattcatgtttcacacaatagcatgaaaaataaaaataagtctgatcaattacaataacttttttgttccaccccagaattatgctaaataaatttttatcagatttttattgcacaatttgccttctgtaaaagtgatttttgttaaacatattggctaattgaatccacagaatttaaactccttcctcaaccagttgaaattaatataatttcgcagtttttgatcatttccggaagaacaattgacaacagttatttaataagtaaaatttaggaattttaatatttgctttttccattttgctgcttctgatttttaagaaatccagcaatttgctttttttctttgtttaaatggaacccaaaaatttataattaaaaagtaacaaaaatgagaattattaaatttttctaaattttattccaagttcctgtttccatcggctgattttttacaatgacaaaacctttcgcaaattgcttttgtttttttcagacattcttttaaactcatcaattcgttcaagaaaacaataaaatnctctttggtgtgctctaatcaccatgatttagctagttcaaaaaatttgtaaaataaattcctttttttcttttcataaaattcttttcctttgtttttattttttctgcattttga

SEQ ID NO: 28560 - DNA, 1871 bp, Heterodera glycines
taaattaaattaaaaaaagcaatttatatttattcaatgaaaatgaatattttaatattgtattattaagccaatttataaaataaaatttaaaattttaacaatcgtccaaatacacgacgaactttcaaatagaataaaaaacatttataggctaaaactgacaattctaggtccgatcccgcaataaaataaacctttaaaaatacgacaaataataattcaagcatgttttgtttaatgtgataaaccgctaaaagttatatttaacaaattttataagaaacgtatgaaattgcactaaaattaaataaattttcaaaaaaaatataacaaattttcattaaaaacccgaaaatgaaaatttaaaacgccaatacagattcgatcttcgggattgtcaacaaataaatcttcgatgatcgttaagaaggtataattatcttatataattaaataaatagaaaaaaatacaaactacaaaaaatgaaaaattattattagcagattaatttaataataatttgtatttattcattaagatttaaacttttaaattattgtaacctaactaaacaaaatcaattttacaagtctaatttgaatactccgcagatgagtttgaaaaatatattatataattaaattaaactgaaaaataaatttactaaaaatgataacttatttattcacgatgagcgtaacttttttttaattaacgcatttttttagtaatttgcaggcttgtagaaaacatttagagctatcgaatgatattaatattacttaattttgtcattattatgaaagtttcggtcagaaatttttcatgataaaaattattttatgtttaatgaaaaattttcgttataaattgtatttttttattgaaatcattcgatatcactaagggtatctactaacctgcaaaatttcaaaaaatttggtaagtttcaaaaaaattagggccaaaaatattcttaaaagctggttccttgagtacttttggccagaccgacaaaacgttattttctgtgaaaaaatgattatataggcctgctgtatgagttatttattattacatatagattaaattataatgaataaaaatttgggaatcgtataagaactcgcatttctcaggtacatatattttgataatatttattgtgattggttttaccagcataatttaatatctcattttttcattatataagaaatataatttttttcatcatttttatatatttagagataattttttaatatttgtttaaaatttttaaggatctttttgtataaagcttttttaaattatttctcgtctccgtgagtatgagtagtttctgctgttttttactcttagcttatttcctattaattttaaataatttgaataaattttgtaattttttattgattctttttaattgtttaactctttaaagcaatcaatttttcaaacaattagtccttttttaatttgagattttttaatgttctatttttcctagtgaaaatctttctccttgaataaaattaaaatttaaataattaatcatcatcatatatttttatctgtctttgatatttttatatttttcattatttttaaacttgttgaagaccgagatgatgtgcattcttcttgacgggcaattcaaatagtaattttcaaaaatataattttaataatatttatcttcacaatttaatttcgattaatttattttcatttgatatttaaaatttaatgtattcataagatttatttgtaatgtgctgattacatcaggctttataaataattaaattaatttattacaaagaatttctatgaaaattaaatcaagcaaaaaataattaca

SEQ ID NO: 28561 - DNA, 730 bp, Heterodera glycines
gaataacagtaaaaaagtgaaacccatcacaaaaaaatgacgaaaaatcagttgatgaaatcatagattagatgatttatatgacaatctgatgtcagattcgtgatcatcaccctcggtaacccccgagtaattctcagaatcgcaaaaaacgaccgttttttgccttttaaaacacctcataatcgtccccatgtttgctgatcatgtgctcgcaatactgaatgtccgtctccaacagtttgtgctcccgcggctttcgttccgtcgtccgccgagtgatccgttccaatcggagcggctcaattttgatcggctttaaaggtgtcgccattctctgcaacggtcgttcgtcataatgtttgtttttttctggtgacgataataatttttacttggatttcgtccactgaagtggccaatttgtgcacatccagcgcgaattgcgtcgtcacgcttcccccgttttgctgctgcgtctgtcgttggtccgtccctaccgtatccccaccaccgtattcccccgccctcttcgttttttggtcggtgtttctctctttctctgctgctccttttcctttctctcctcctatgccattttccattaaatgtttcgtctgtcccttctcttcccctctcttcttctgctgttgcttttcctctcctttttccccttttcctctcttcttttttctcgtccaaatcgctaattcgcacagtttttcttctt

SEQ ID NO: 28562 - DNA, 746 bp, Heterodera glycines
ctacccattttggacatattcaaacttcttggccttggtaaatttggccatccgatttttatttgtaataaattaattatttttaaattaattatgtgatttaatattcccattttggtaatactgccgatgtgtttttgtaagtcgtaaaaacatgtttatcgggattataaatgccaaaatttccaaaaaactattccaagattccaattcttgtgctcaccgacttggtacggtataagcccattgtggcgcttgaagctgtcagccttgtggcgtgttggctgttgctggtctttgggacaacacttggacaaatgcaattaatgcaaatttgtttcggtgtgctctttttaattgttttaaaaagaacattaaaacatattctatttatatttgctactttaattaaatttacaaaattaatattgttttccaatttagctgttttttagaaaatcttttaactttgtgacagggagcaagcagttcatttcctccttgaaaatgttttattgtttaattttcaaaatccgatttttttttttaaatcacaaaaaattttctagcgattttttaaattttatgtttattaataagttttttaaaaaattttcaaaacttttttgcttgaattttcttataatttttttaaaatataagtttgggcgattttctttttactgcagcgccattttaatattttttttcttgaaataggcatttcaacggctgccggcattgcc

SEQ ID NO: 28563 - DNA, 954 bp, Heterodera glycines
ggaggataaaatttccaaattttttgactcggtaaggcgctttgataaagacggctttcgttttgcaattagtcggtcaacattcggaaattggtctcgaattttttcggcaattacgtgcaatcattttaaaagaaaaaaaacataaaagctaaaatttattaatttttttagcgcaaaatcaacaacaaaagcgaaattttcgcttttttgcttatttttgacataatttattaatttttaaaaaaatttaaatttattcaatattctcgagaaattttggcgaaaaaatgattttttgaaaaatttttcgggttttgggctcaaaaaggctaatttagctgctgggggccgttctaatagaggtttttttgaaaaatgccaaaatatggacataaaatatggaccaaaatgccaaaatatggaaaaatatggaaatatggacataaatcgcgaaatatggaaaaatatggaaaatatggatatagaaatccttcctagaagcttcaaaccaagctaaaaacatgtttttcgtgcgtttcaggcctcccacagtccaggaaaaaaatatggatttccatgtaattctattccctactcataacgccaaatagcgcatttggcgtaaatttttgcgcgctatttcaaaatttacactggaaaatgccttttttgtattttttattttgatctgccataactcgcttcattcccaactaaactgaacaaatttggtatctaaaaaaaatttgaaaaggggaatctttttctaagcgaatgctaagtaatttgacatctcagaaaaaagttgtgatactttcaaatttttatcacgttataactcaagtcctaatgcgaaattttcatcacactataatttaataaccgagcgtaaaaaattaaaattcgagcgttaaaaatgttcttaatttttttctctacctctatgcaaaa

SEQ ID NO: 28564 - DNA, 575 bp, Heterodera glycines
acaaataatacccctgggagaagggagtgggaaacatgatttcgaaattttaaattttttgtactctaagctactcaaaacggttcagaattcaataaaaataacattcacggtgcgaaaaatggggtatgaaaagtttattgggggaaaaaagactacaaaataatacccctgggagaagggagtgggaaacatgatttcgaaattttaaattttttgtactctaagctactcaaaacggttcagaattcaataaaaataacattcacggtgcgaaaaatggggtatgaaaagtttattgggggaaaaaagaagcaggaacaagtgatcagctttcttcgacagcagatccgcaacatagacgcactgatcactgcgcttcggcggcagttggaggaaaagatggcaccaccgatggagacaccgaccaccaggaaaagtgagtgaaactaaaatcccctttttatctttttcaaataatttctcttttttaattttagcaattccaacaggacgaccaaagatgaatgtcgatcatttagctgaattttaaggtgatgaggcgctccattccg

SEQ ID NO: 28565 - DNA, 1517 bp, Heterodera glycines
tcacttttgggtcgatgtttagaatattctaaatttaaaacttttaatcattttatatagattcgaatccaaatttccaaaacgttaaagccttaataaaagataactcatccatgtataattcatccacatacctaatattttaatggacaaaaaataaaccctaaaatatttaatggatatttcttgatgttgatctaaaaactaataacatccaaatttaaattcatttttatttaatccatgcttttttctggtgatgagttgttcgtaacccttttccggccgtccaaaacatttcccatataaaataaattagccatgctaatatccgtgccaagtgttttcgacagtgggtttcgacaatagaattttgccaagatttatcgcttttttctatacaaacatctcttgctggactgcattcaaaaatacaacaagttttctagataagcttcttgaatcgcgtgggaattgctaataattgccgggtttgggtgccaagattcgaaactgcaggctcttatagcagaattcgaaaatcgaaacccctctaaatgaataagagtatgagcatatccttttaattccaaaagttaacgagatttataccgtatagaaaaagttttttaaaaacaaaattttactgtcgaaatcaatcagtgtcgaaaactaacagcactctaataccgataaaaatgtaagaatttgttttggactatggcggtatttatgacacgactaatctaaataggtatggtatattttgttgcaactttgtcttacccccaagaggaatgcgatgtccggcatttggtaccatgtgctaaggatttgaatgatcaccacaaaatatctttcccaccattctttggcacccggacgcgcacttgtgtttatcaggtgcaatttgattagcaaatcatccgtaatatcggcttccaaattcaatgctgcgcttcgatacaattcgcttgctaattcaatgtttgtcgctatcataaaaatgacaattcccgctgaccaaatgtccattttcggagttacctgaattatttaaataaacaaaattaaccatattttaaaaaaacctcaattttatatggatactcaaggtacccatgataagcaaggccatcgaaatcaggcactaattgctgaaagaaaggggaattatttcaaatatggaatgcgagataaaagcagaggacacccctttttaagttgctaaaaatgcgcataaaaatgcacaaaaatggcaaaaaaaacccccaacaaaactcggtaactttttagccaatttttcaaggtaaaaaaacatttaatagcacatatttatcagcacttttcacgtgttttaacaccaatttttaaatagttgaaaataattgtattttttgaaccaatgagatttaatcaatttgcctatttattaaaagaatttgcacaaaaaatattttggatttattattttttaatcattttaacaggtgtattcaatgtaaaatattaaaccc

SEQ ID NO: 28566 - DNA, 1082 bp, Heterodera glycines
tgccattactccgtttggtctccactcactggtgagcaaagtgatcataaagaggtattctgcgtaggaaattattccgttgtcgcccaattcgcgaaacattcggtgcgtgccctttcgcagtggcggcgtaagggcaagcatttgccgcaactgcgactcgctgatgacaatgcgaaagacacgctctgaaagaatgagtcaaaaaaacggggaagaattaatggacgacacaccccgaggctcgtcgagagtcaaagagtcgagaaagtcttgcggtgtcatgaaaatctcgccgtcaaattcaacggaagcaaattttcgaaatctaaaaaaaggaattcgaacaaaatgtattttcaccaaaattcactgcttttcaaattaaaaaaaaaaaaaaattaaaaaagccccccccccctttttgtttttaaaaaagcgtcccacaaaaacagcaacagtgcgcacctttgtagcctccgcgggagtctgaaatgtgcctcttcagtgtgttcgttttctgcgctttttatggaggccattctggcgagaaaaagcaccggcggggcactcgccggaaggaaaaatgccaaaggttttcgaaaaaagaaacagcgaatggccggatgaattttgaagaaacgttgaacaatatttatgaagacaaaccgacgtaattgtaaaggaaaccaatgccgaaagaacattttgatcaatctaataagcagaattagagcccggcgcgggattttaccggatcccagtccaaatcttgtcggattgctggatttatgccagcgggatcatatccagcaaaaattttgagttcaatcctgtagcgggaaccgcaaatttgtttttttttgtgcggaatctcacgggacccgcctgcatttttttgaaattgaaaagacagaatgccaaaattttctgaaataagtttacaaaaaaaaattcaattaattaaagccatttttatggcaaattttccaaaatttgggacatttttcctgacgggtctaccggtccgccgaaattcaaagttttctgtttcaaaaatcccgcacgggatcccgcaaatt

SEQ ID NO: 28567 - DNA, 951 bp, Heterodera glycines
atacagcaagcagcacgtcattccactaggttgggacagctttgacagacatatacatacatgaaaaatagttaatgcatacaaggtacttgctagtttaggcccataaatatatgtacatagaacatgatgggtttgaattatttcgaaatttttatgttcaaaattttgcatttcatcatagagttatattgtcgtatgtatgtatttttagaggaagtaaaattggagaatttggaggatgagggcgactcacgcaatggatggctgatcaaaacgcgcaccaaatcttttgtcgtttatgcggccactcaaattgaaaaggaacaatggatgtcacacatcaggcgatgcgttgaggagctaattgatagttaggattattccatcagacattttatcaacaaaatatttttgttgtttttgatggaaaagtgccaccatcggattatgccgcactttgggtacctgacaaagaagcaaccaaatgcatgtgctgtcaaacatcacattttggtgtcatccaacgtcggcatcattgtcgcgcctgcggaaagggttcatcaatttgttcaaaagttttggtactaaaaccatttaacatttttattagttgtgtgtagtggctgttcatccaagtcttttgtgcttgatggtataagtaagaagccggttcgcgtctgtgatacggtaggattttttttattcatcattttttggaaaatgaatttaaaacaattccttgaaattgcaaaaattaagaaaaaagaacttaatttcgtttacatggaaaaaaactaatttttttttgtggtgggcgggaaatgattagaggagagcagaggaaaaataaacgtaccgtcacactatgcgccaacaattatgggcggaaaatttttgtgtcagattttttcttaaaatttttttttttctcctttctgtggggagggg

SEQ ID NO: 28568 - DNA, 1087 bp, Heterodera glycines
  unsure (1)..(1087): unsure at all n locations
accgatattttgatccatgcacgaacaatcctaaaatccttaaatcataaagacaagaaaacgaaaacagagcaagnncccttaccatccgccgccgatccgctaaagtccaacaaaaacaacaaccaaggtgggaagcaagggtggtacaaatccatgctttataaatggatatgataaaaaatataattaaaagtttatatacctaggtaacaaaaaataaatttgtttattaaagttacagtaatatttttggtgtaagaggcctatatttaactctctcacggtctgatcacttttcactctccaatcagtgtctcatcacttttcactctccaatcagtgtctcatcactttttcactctccaatcactgtctgatcacttttcactttccattcattgtcagatcactttttcactcaccacaatcactgtctgatcacttttcactttccattcattgtcagatcactttttcactcaccacaatcactgtctcatcactttttcactctccaatcactgtctgatcacttttcactttccattcattgtcagatcactttttcactcaccacaatcactgtctcatcactttttcactctccaatcactgtctgatcacttttcactttccattcattgtcagatcactttttcactcaccacaatcactgtctcatcactttttcactctccaatcactgtctgatcacttttcactttccattcattgtcagatcactttttcactcaccacaatcactgtctcatcactttttcactctccaatcactgtcagatcactttttcactcaccacaatcagtgtctcatcactttttcactcttcaatcactgtctgatttactgtctggcaggagtgggacgcgacagcgattcgcggcttttctttgcgcgaacctcgattcgcgaccgcggcaatttgaatctgcgatgcgcaatccgcgccccgcgggattttctgtccgcgccccacccatgctgctgtctgctggtcactttttcactctctactgcaagcgcgcccctaatcaaaaacagaaataaaatgcataagcgcta

SEQ ID NO: 28569 - DNA, 1216 bp, Heterodera glycines
  unsure (1)..(1216): unsure at all n locations
cgcgtccccgcgacttctttaagggcgtccgtgtgctgttgcggatcatcttcctcgtcctgttgccgcttctccaaatcgctcatcaagaaagaggttgtgttgtttggtgcccgcggtttgagcgcgttgcgcgactgcgcctgatggtggcgcgcagaaatgacactgaaagcattcgattttgatgtgtttttattgcttcgctttttaaacggaacaaattgggcggtggttgcgcggtttgtttcaaaccgacgcctttgcctgcgaaaacaattcccaaatttcgcttgagatttggaaattttcttgcaacaagtcatatttttgtttttggtcataagaaatttcaaatcaatttattagtagggaacgattttgctaatggaagttgaaaagaattgtgaaatgaaacgaaggaaaaggcagcgagagcagacaaaggaagagaaacggagttggtggtggtgtctacccctttctgtgcctaaaagcaatgagagtttaggcgagaaattttgaaattagaaaggaagagacggaagagaattgattgcctcgcatttaatgcgctatttccttttaatttcaccgtcttttaatattgaaaaaggaaaataattaagggggagagtaatgaaatatatttatttttttggcatccaaattttatttttttatgaataaaaaaaatttaaaaaaatttaggccaggaaaaattcaggcggctaaaattgtcttgtggcctggacctagggacagtcccaggggcgggaatacgtgtggtacgtacccccccccccccgcgcacccgaaaattttaaaggaaaaatagtatttttgttgaaaatttttttgatttccgtgttgataccccccaagacgacctacctcaccaaaattccaaaaattacacgaaattttttcccggcgtcgcctatcggcaccgccgaacccctccccttgttccccaaaaatagtaattgcatcgttagaataattacggtaatttttaaatatatcgtattgtaatttaaatatttatatttaactaaagactatttccaaaagacgaaggtacatagaaaaaactaaagtgaaacttgtgaattgataatcaaaaaatatttcaatgcaatttttagcccatcggagaaaataaatggtccttgtggcacatggccatctttanaaagagcaaattacggcttgc

SEQ ID NO: 28570 - DNA, 2168 bp, Heterodera glycines
  unsure (1)..(2168): unsure at all n locations
caactcgtgcgcttaaactccgccccaccagcagaaaatcctttaacgtacaccacgttgggtacggnacgtccctcccctcctccgtcatccgtcggcggtattttgccagcggcaattgatttgcgttcgttcgtcaaattccccccgctgctggtgtccccccgccattcgtcggtgaacgaacggtcgcactttttctcgaaaacattgcgaaaggttctaaggtcctcgagactgttttttgccttttgccccttttggtcaatgccttcccaattttgtcaaatgcaaacgcaaatttcccactttaagattttgcggtgagaagtgccttttgtgcctttttgtttctttttttgtgcctttcctttggcggaactccaaaaaaatgacagcggaaacttcgtcgaagtcgtcgttttgttgtgtggcagcaacgacggcagctgcggaggacacaaatttaataaaacaaagcgaaaacaaaacggaagaggagggggaagaggatgaagaagcggaagagggggtaattcacctgggaggtgcccaaatcatagatttggtgtggccaccgttggcattgaaattctatggctgccgatttcctaagcagtttgacgatcttcttaggttggtgatgcgtctctgccgcctccgntctgctcatcgccctcctcctcctccttttgcgcgttgcccaaagagtcggaactttcggagagaaagcgaccggcggccatccaggaactgctggagaagaagcgggcacgacttgcgcacaacgaaagtggaagtaaaagtgaacgccgatcgatgacaccgacgacggacggaggagcagagacaaaattggcacggggagaggggacgaacggcggaggatggaggaggagggagagggagaagaaaggggggacaacggacggacaatgccaatgccatcgaagggagaaaatgacggcacgggagggaacggcagcaacagttattggtcaacggaacgtgaggacagcgaagtgagcggtgtccataggacggcaaaaccgagaattaagagtagggcgaatattttgtccgtttcggttccatttgtccgtcctccctccgtccgctccctttcctttccttccgttcatttcccccctcttcagactgtcagcagttgcggttcgtcttcagcgttcggcgcttataatggcggaattttctgcaacagcagcagtaaatcgccgttcgcttcatccgccatcggcgagctgaacctgggacaactgctgaagcgcgcctttggcgagtcgagcagaattttggccgacccgcaaatgttcgctgccattcaggcacggcaagaaatgaaaatggcaccgattaattgggccataaataataatttgtcaggagacaatgttgcaaaaatatgccgttaatgggaccacggcggcgctggcggccgcacttttatccaacaaaatgccaacggacgaagcgacgtcgacgagaaagacagcaatgaaggcaactgggacaccgtcgccggtgaaaaggggcggcgagagggacggagcggcgacgagcaatggcacaacagcggcgggcgacggagtggtggcactgaacattgtgccgaacgacaagtacggactggacaaagggagggggagcaaaaagcagggcaatgcttagcacagactgactgattagtgttttctgctgggattgccccccccccaccatttggcactcatttccttggccattaattcctttttcgcttttttcagagttttctcccaagtgcccggccgtctctcactgttgtccaatgttgttaagtacaaggtaacgctgcttcatcccttggttttcctccattatttaatttctctttcaggtcactgtcggagagataaaacgtcgtctgattggccccgaatcgttcaactttaggtccctcctccttttcctcccaattcattggccttcaaaccaaccgcacattttcagtcttctcggggcgatgttacgacgtgccaaaatgccagagaaaagtgcgatgctaatgggcgaactgaaccaagtcggcctgtccattccccgcgggcgtcggcgcctttcccaagtcactcttttgtccgcgctcaccggtaaaaaataaatgaatt

SEQ ID NO: 28571 - DNA, 1036 bp, Heterodera glycines
  unsure (1)..(1036): unsure at all n locations
ccaaattttgcaaggtaacagctgagaagaagaggtcctttaagtgaaattncctttccatnntgtggatttgaaattttttcggtattcttattttgcgtacatttcgaattttgaaaaaaataaattcattaatattttttcagagagtgatctgaaacgcaccaaattttattttcaagttaacaaagccctctgatgcttttactatcaaaaagggatatgaataaaattcttaaaattttttaattggttttaaatatgcgaaaactttaggcttagcttttttagtgaaaattcaatcactcatagtttttcgcgttctgatcagaaatgcaccaaattttgcaggataacagctgagaagaagaggtaattaggtttggatttccttcccattttgtggaatttgaaattttttcggtattcctattttgcgtatctttcgaatttttgaaaaaataaattcattaatatttttcagagagtgctctgaaacacaccaaactttatttacaggttaattaaggcaccctgatgcttttactatcaaaaagggcgatgaataaaaattctaaaaatttttaattgctttttaaacgagcgaaaaactttaggcttagcttttttagtgaaaattcaaacaatcatagtttttcgcgttctgttcagaaatgcaccaaattttgcaaggtaacagctgagaagaagaggtaattaggtttaaatttcctttccattttgtggaatttgaaattttttcggtattcttattttgcgtacatttcaaattttgaaaaaaataaattcattaatattttttcagagagtgatctgaaacgcaccaaattttattttcaagttaacaagccctctgatgcttttactatcaaaaagggcgatgaataaaaattctaaaaatttttacttgctttttaaacgagcgaaaaactttaggcttagcttttttagtgaaaattcaacaaatctaagtttttcgggttctggttcaaaaaggccccaaattttgcaaggt

SEQ ID NO: 28572 - DNA, 997 bp, Heterodera glycines
tgacaactcatccctaaatggaatttgttaattaccatttaagagcaattataattttgcgcccgttggttacgccttggaatgggccgtgttggccgaccattgcattgaataggtcagttatgtgcccaactccccactcacttctgaactaaaattgctgaaattttggtccctttaaagccgtcccggcgagtgaagaagtgtctggccatttgagcaattgtttcggtgggatatgcaacactttgttgagagtttgtccatgtcaaaatgtcggaactaagggcggacactaaaaattggacataaatgaaataagaaagttaaaatttgagtgagattcgttactcggagagtcgacgcgtgtcccatttgcaccttttcggtgcttttgagcctttttcttcccattttggcactttccgatggcatttcgctttgctccgtcctcctcattttgcccttctccatcggtcactctcctcttgtctattgtttcactggctatttcttctcggtgttttttgcaaatgttcgtctcacaaatttctttggacggagtcgtcggagtgctctttgacccatgggaagtcgatggcattctgttagttgccattttgttaaaaataccctcccgcgatcgattgttacaattccattttcccataacccccccccctgatcttccgtctttctgtgcccctccgttggtcctgcctttccctgccaaatccgacctgtccgtcgacgttgtcgtttcccttgcccccttttccgtttgttgctgcgttttactgtcaatcgcttctcctccatggtccgccatttgttgcttatcgcaaattgcttctcccctttcctttccgatttcctccattggtcggtcggacgattgggcgaccattggcgggggaaaatctgaaggacagaaaaagtcgttgtcgagttttggaaaaggggtcttgccttttggtcccgttgcctttctctgtcc

SEQ ID NO: 28573 - DNA, 1663 bp, Heterodera glycines
acgagttcagtcggagagtgagttttttttaatgtgtgcgttaaattatgacactaatacaatttgtgccccctttttgaattcggatagaatgctaataccctcgtgagattttccgggttcactgcgggcgttgtcttttacatgtttcggatccaaattagttcaggggttcgtattggttagaaatggtcaacgaatgtcaaacatttatggataattgactgaaaacccacaaatatttcggcgctatcaaagttaccgattttgaatactttgatcaatttctaaacccgaacttgtaaaaagtcgaattcaaatatttttattttgttaaaaattaggttggaaatctggctttgctaaaatatatgtgaaattcgtgatcgtggaccacaaaaaatgccgggaacaaattttattgctagacaaagaaaagggtcccccctttgattttaagaaaattcaaaatcggtaactttgacaatgcgataatatttcgatgtcttatcaaaccgtcaacatttgttcaaccaacttacataattcgctttcccttttttcagtcgcacttggtcaccaggaaattgagagcaaacgaaaagagttggaacaattgaagcagaaatttaatgccgaaattgaagtgccggagattgggccggaagtgaagcgcgagatttggtgggtttgatttgtttgcattgattgccaaaaaaaataatgcaaaattttgtgggcatttagcgacgactgcaacaaagcattgaaatgtcagcgcaaacgattggtggacttgaagatgctcaaccacaacatgaagttcaaattggagagtgcgcacaaaaactgaggcgacgggacgaattcgatagcgcataatattgtccattatttaatgatgtaataatcgccaaaacgtataatatgtccattgttcattatgttttaatattgctataaattatgtaatttaatgaaatacttgccactaattgtaagtccccaagtgaattgaagaatatgagtattgtgcaaaaccgatagttgttgtttaactcgaaagaagtcgttcattttttgctgaccatttttttgaaagtgaggcctcggggcttatctaattcgtagaacacagccagtttacacgtataatcaatttttatgcggtaattagtgcaaaacaaattcaggaaaatacgtcattggacggcatcaaaaaaagagaaatggaataaacgcagagtcaaaattagcatatttctcttttcctcctccgtcctccctcttttgcgcgtcgtctttctatgccttggaagcgcagtgagtgatcagatcgaccagacggcaggagtagccgaactcgttgtcgtaccaactgaccagcttgacaaagtgcgggttcaacgaaatgcaactgaaccaaagggggcgggaggcaaatgtaatggaattataattaacggtaaaacttacgcgccaacgtcaaaaatggacgagtgcgagtcaccgagaaagtcctgaaaatgttatttattgtatgaagcaaggcaagggaaaagaacaaaaacgtggtattatcaaaaaatgaaatgtcggattgaaaacggaacacaaaacccattgtaaaatgagtccgttgagagtattgacgtaccgcacc

SEQ ID NO: 28574 - DNA, 1043 bp, Heterodera glycines
ccgattgaaataaatggaaaaaaaagcaaagtcaaagacaaaacctttaaagcactagccgattgaaataaatggacaaaaaagcaaagtcaaagacaaaaccttaaaagcactagccgattgaaataaatggaaaaaaagcaaagtcaaagacaaaaccttaaagcactagccgaagcaaagtcaaagacaaaaccttaaagcactagccgattgaaataaatggaaaaaaaagcaaagtcaaagacaaaaccttaaagcactagccgaagcaaagtcaaagacaaaaccttaaagcactagccgattgaaataaatggaaaaaaaagcaaagtcaaaacacaaaaccttaaagcactagccgattgaaataaatggacaaaaaagcaaagtcaaagacaaaaccttaaagcactagccgattgaaataaatggaaaaaaaagcaaagtcaaagacaaaaccttaaagcactagccgattgaaataaatggaaaaaaaagcaaagtcaaagacaaaataggaactttatacaaatttaaaaaagtaatattttgtatattgtatatgcatttaatcaaatttctactttctttataaatgttagctaattagtcagcgtctatttattttctgtaaaaatttgcctctttatttaaaattaaattaatataatttcatgaaataagacactaaatgtatagagaatgaattaacgtggtcgattggaataaatggaaaaaaaagcaaagtcaaagacaaaaccttaaagcactagccgattgaaataaatggaaaaaaaagcaaagtcaaagacaaaaccttaaagcactagccgattgaaataaatggaaaaaaaagcaaagtcaaagacaaaataggaactttatacaaatttaaaaaagtaatattttgtatattgtatatgcatttaatcaaatttctactttctttataaatgttagctaattagtcagcgtctatttattttctgtaaaaatttgactgtttatttaaaattaaattaatataatttcatgaaata

SEQ ID NO: 28575 - DNA, 949 bp, Heterodera glycines
  unsure (1)..(949): unsure at all n locations
cttgtcatttaaaacccatactcgtataggatataggctttttctgaaggcttttcctaataggaacctcagaggttgtacaaagcacagtacgcaaatattttatattattgcagactcggtaattaataacttaattattatttattttgcttaagtcaaagagatgtttttatttgtatgaatatcggttacttatactagggattataatcaagttcacaatatttcatggaaatgtgtctgtaatttctggataaattcaacatacagaaaagtttctttcaaaaatattcgctgaaaatctagccaaagctgaaattattagggattttctacataacataggacttttgtgtcagcattttaatttaacatatatttatcttgtcattcaaaacccatactcgtataggatataggcttaatctgaaggcttttccttaaaatgtgtctgtaatttctggaaaattcaataaacagaaaagtttctttcaaaaatattcgctgaaaatctagccaaagctgaaactattagggattttctacataacaagggattataatcaagttcacaatatttcatggaaatgtgtctgtaatttctggataaattcaataaacagaaaagtttctttcaaaaatattcgctgaaaatctagccaaagctgaaattattagggattttatacaaaacataggtcttttgtgtcagcattttaatttaacatatatttatcttgtcatttaaaagccatactcgtataggatataggcttaatctgaaggctnttcctaataggaacctcagaggttgtacaaagcacagtacccaaatattttatattattgcagactcggtaattaataacttaaatattatttattttgcttatgcaaagcgatgtttttatttgtatgaatatcggntacttacactagggattat

SEQ ID NO: 28576 - DNA, 1004 bp, Heterodera glycines
agaaaaaacacccttattgaatatttattataaaatgaagaaggcaaatccgtctttgagcgacaagaaaattgctggatttttgaaaatctctttagccaacctaagcaaatggaaaaatcaaaaattatcgtaaattttcttaatttctttttactctcaatgacctaatattgttttttaattcattttgttcatttttccaattcaaattttggttgtaaattattatcaactgataaagtttcgaagaatgaattggctattaaaaatattaccaaataggaattataaatttgcattttctgaaaaataaaataataataataaattgtttttgcttttttattaatgtaatggtgacattaaaaaaaaataaattctgtaatttatgaaaaatgatcaaattacgtggaaaatatttattaattgattatattatttaatactgttgaaattgggtaatatagaaaaaatggtttttttttacaatataataaatagggaaaaggaaataataaaaaattttcaattaccattgaaaataattccttatttttataacttttgggagattttataatttattaatgattaaacttaggatagagcggtaccagtactggcactgaaaaacggtacaactgagtactgagtaccggttttgaccagtaccgatactagtaccggtttttaccggttttcccagccaaaaagtaccggtttttcaacccgaaaattaccggtaccgggtttttttacaattaccgattaccgctctaccctgaattccttcttttttctaataattcaatttttaatttatttttcgccttagtccaaattctttttttcatgcgtaaatttttattcggttgatttcatttttttttcttttaattttttttaatattattattaaaatttggcatttttaaaaataggtggcggtgtttaatggccaaaagcaggctccaggggcggcgcgaattacttacataaat

SEQ ID NO: 28577 - DNA, 884 bp, Heterodera glycines
ttgcttaattaattatttctgtttgatgaaggcactcgccgctcgtgccgtggacaaaatcaaccgacagacgaacaatgccttcctgtttatccctgtgaaagtgctcagtgccaaagcaatacccgtagctggagtaagatatgaactgcgcattttggtcggaaagtcaaaatgcttgaaaaaggtaagtgcaaaatggggagaaattggcacaaaaatgggcaagtcggcactgtaatttttaagaaggcgtataattttaagagggggatataatttttgggggaaatcgggatcaccaaagtcggataagccgagctcagcagtagaccctggactgacagtttaaatcggatttgtatcgggattacttttttttctcaaaagtcggattggaattattgggagggataaatgtgaaatttaaaaaaaaagaataaaatttaaaactccaatgaaaagcaaagtaaaaagtgaaacaaagcatgtatacaattttaatttaaaaaagtgatgtttttaaagcagccaaaggcaaagcgcgcaaactgtgcaacggaaactgttccggcagagcgaaaggcatcgatttcttatttaattatctgctaattagcctaattatctattctttaggtctttgaagtgagtgtgttccaacaaagttggaaaaatgttgaggacattacattcgtacccgaagaacacatgggcaattcgacaaaaaattgtgaataaaatgataagcaataatcgtgggtgaatacaaatttttaatttggtgcaatttttaattaataaatttgtgtaattggcttaaatccgcaaagataatttttatttgaaataactgttgtcttcgtttattgttttcttgattt

SEQ ID NO: 28578 - DNA, 285 bp, Heterodera glycines
taataacgctgcggacatctacatttttgaattgacaataaatggtaattactctttctttttctccatattgaccatcatactcatactccccccacccttttcttcttccgccacccacctcccccgctacgcgccgctcccctccccttcgtgctcctctcttgatagtttaaactgagggcgggaaacgacaatctgatccccatcaagctagcttctgcaggtcctgctcgagcggccgcccggggaccgatccccgatctagtaacatagatgacaccg

SEQ ID NO: 28579 - DNA, 1053 bp, Heterodera glycines
cgtcaattgatccgtcgtgagggcattctctgcgccgtttcttcgggtgccaacgtttgggcggcactgaaagtcgccaaacaattgggggccaaacaaacgaattgtgaccattttgccggatagcattcgcaattacatgtgagaaattggagcgaaaaatttaaaaaataaaaagcaattaaaaaaacattaggagcaaattcttcgacgacgaatggatgaaggcaaaaggattttccacgggagaagaagaaggagtgagtgaagcagctgaagaatgaaaacggagcaaagaaagcgaagggggaaattaagcaaaggcaaataattaattagcccaacaaattaattaacttaattaccccttccctcatttttgtttgaattaattactctttttgttccatcgttttgcttaattaccaaactcatcaatggcaaaatgggcttttgtatcttatttatttacttcaaatatctttcattttgtaataatatttacctttgaacaaaaagcgacaaaaacagaaaaaattaaattaaaataaatttcacttttagaaatgacagatttttctgtggatggattggcatttttagttcttgtcattcagccgggcattacgcgttaattatgaggagaggagagagggggggggggaagaattgatggatgaaaatgatatgacggacgaaggccggtggaagtgaaatcgcagcaaatgacgcaatgtccggacaaaatgaagacaagagagacagagaaagagagagagagaggaaagagagacagagaaagagagagagagagaggaaagagagagagaggaaagagtgagaggaaagagagacagaggaaagagagagagaggaaagagagagagagtagaaggaagaaaaaaaaggaggaaaagatggaagagagaagggaagggaaagtgagctgcacagcaacagttgggttaaataatgtttcagccaaatgcttctttgatgtgttcgaacggacggacggcgaggtcaacggggagatctttggggggggggggg

SEQ ID NO: 28580 - DNA, 1606 bp, Heterodera glycines
  unsure (1)..(1606): unsure at all n locations
tttaaatgattctttaatttcgtccaccagcaaaaaaacattggaattgcctaaattcgtaaaatcaaaaaaatgaaaacaaggagttttaatatgttattttatctggttgtcacaacgccagagcatcatcaagattgtgttgagctttataaaaagaaaataagcaaaattgaattcttagtcaatataaagtatttaaattatgaatttatacgaaatatattttgtgactaaaatcttttgtttattaaataaagaatatgaaaaatatagaaaaaataatcatttttcactttaaaataaaagaattgtgattgccctttgagcgcgcttcttttaccaaatgatcctctgagatttcaaaaaaaatgaaaaattatttattcatgatagcaatgaaaaaggcattaatgaattaaaattttgattagcgcaaataaatttttatcggagttcgatcctaagaaagcattgaaaaattcgacaaaaaacgattaaataaataagtattttaatgctttcgtaaaaaataaaataaaaaatacagtgaaattcataaaaaatatttattaaataaattcaatttaaatttattgattgtaggcatcatttttgaaatcagatttcatagcacgcggtaaagacagcagctctccgcatgaagttattattgcataaaaaataaaatttttgaagaaccaaggaagtaaaatatataaaaaaagccaaaatatattaaaatattttataaattaatcatgatatctttttttgagaaaaaattttaatcttcataaaaatttataaattcttatatctataaaaagattaaatatgcattacgcaatataaaaaacatgtccgaaaaactagtaaactttaaaaatgaattggtattagaagattatcgtgataaaatacaaaattatatattaaacttttttaaatatatttatttgaacatgttttaaatataagcaaaaaggggatctgaaaagtggaaaacagatttgattcatcgagaataaaaaaagtctgttattttgcaaaaagaaaagaaaagaaaaaaatacattaaatttcataaaaaacaaccaaagttttattaacttttttattgaacttcataataataaaaataaagcaaatcatgaaatgaacataatgttgatcttctcaaggttatttattagtcgttattcaatatttaagaaagtaatttaaaaagccgaccaataaattttcacaattatctgcaaataaaaataccattgtcatattaatttctgaatttcaaaatatatttttatagacatgacatatgacatgtaaaagaaaaataaataaatgaaaaattacaaaaaaaaaaataatttgtaaaaaaagataatttaaaactaatgcgttttttaaataagaattaaaaataagattaatttaggttttcttgagcagaaaaaagcaaaaaattaaatcttcaaaattaaatctcatacaaaggaaaaatgaggattataaattgtaaaaacaacatatcaattaaattaattaatatctgggtggagcctaaaaagatgnaacagcaataagtcttttaatttag

SEQ ID NO: 28581 - DNA, 833 bp, Heterodera glycines
cggtcatttcgtttcgaggcaaattcgcaacatatgaaccgccgctttactttctttaacgtccagctaacttcttccttacaatatcccgtcgataccctgccttaaaaattaatgaactcggcaaaatccaaaagatttcttaaagcccacgctgaaaaatattaaaaaaaaagaattcattcagtggttcgttattgctaattgaaaataatttcttatgaccataaggagaaaacaaaagggtgttcgagatttaattttgagctttaattatgggggtgccacaaaatgtcggcggtgccgcaaatgtcattttgacttagtgccgcaagtgtcgacaccgcaaatgtcgttctgactaggcgccgcaaatgtaacgccgcaaatgtcggccaatcattttgtgtcattagaaaatgcctatgccacacacctgtgtactcccaaattaccactaccattcatcaaaattatctatataaaatattaaagattgttcatttttatttcttgtgaacaatatttttcaaaatctgtctttttgaaataaacttttttttatctgctaaaatgtcattgaaaattgttatgattgctaaattttgacacatttacttttttagaatttttccatttcaaattgtacaaattgactcgaaaggaaaacattggtggaaagggccaataaatcaaaatcaaattccatcaaaaaagcataatcatgaaaaagagcaacaacaacaaaatcaaaaacaacattacatcggtagaagcttttagtttaattttttttttactatttatcaattattttttgctttttaaactga

SEQ ID NO: 28582 - DNA, 990 bp, Heterodera glycines
atgtttcccactcccttctcccaggggtattattttgtaaagtctttttttccccaataaacttgtcaaaccccatttttcgcaccgtgaatgttatttttattgaattctgaaccgttttgagtagattagactagaaaaaattgaaaattttgaaatcatgtttcccactcccttctcccaggggtattattttgtaaagtctttttttccccaataaacttgtcaaaccccatttttcgcaccgtgaatgttatttttattgaattctgaaccgttttgagtagattagactagaaaaaattgaaaattttgaaatcatgtttcccactcccttctcccaggggtattattttgtaaagtctttttttccccaataaacttgtcaaaccccatttttcgcaccgtgaatgttatttttattgaattctgaaccgttttgagtagattagactagaaaaaattgaaaattttgaaatcatgtttcccactcccttctcccaggggtattattttgtaaagtctttttttccccaataaacttttcaaaccccatttttcgcaccgtgaatgttatttttattgaattctgaaccgttttgagtagattagactagaaaaaattgaaaattttgaaatcatgtttcccactcccttctcccaggggtattattttgtaaagtctttttttccccaataaacttgtcaaaccccatttttcgcaccgtgaatgttatttttattgaattctgaaccgttttgagtagattagactagaaaaaattgaaaattttgaaatcatgtttcccactcccttctcccaggggtattattttgtaaagtctttttttcccccataaacttttcataccccatttttcgcaccgtgaatgttatttttattgaattgtgaaccgttttgagtagattagactagacaaaattgaaaaattttgaaatcatgttttcccacttcccttctccccgggg

SEQ ID NO: 28583 - DNA, 1205 bp, Heterodera glycines
ctgtagtgtaaaatttcggccgtataaatattggttgaatttttctacgccgaaaattactgcacgtccctccttatcaatttgcgcatacttccgctcggatgagcttaacgttttttaagcataagcgatgactccaacttttccagtcttggcatccttatgaaataaaacttctccaattccataatccgacgcgtctgttgccaagaagtgaggcttttcagggtcgaaatgcacgaggatgtcgtttgaagccaacatttccttgatttctccgaaggctttttgttgctccttcccccagtgccatttcttttctgtccggcgaagttcattcaatgtttccgaaaccgtcgccaatgaagggatgaacttgccgtaatagccaaccatgccgagaaacgattgaagttctttcaaattttccggcgccggcattttttgaatcgcttccaccttctctggcgaagtccgaattccttgccggtcgataatgtgtcccaaataaacaatgctttcatgcatgaacgagcatttttccttttttactcgtagtcctgcctttttaagtctttggagaacggcatccaatctcttcaaatgttcagcatcgtttgcagcagtgacgacaatgtcgtccaaatacactgccactccgtcaattccacagagaatttcttccatcacctgctggaatatcgctggtgccgatgccaccccgtagggcatgcgtgaaaatcggtacagccctttatgggtgcagattgtgaggcattccttcgcctgatcgtccaacggaagctgtaaataggcctctttcaagtccaactttgagaatttgttgccattgttgagagcactgaacagttcttccggtcgagggagcgggtactgatggatgtccaggcacggattgactgtgaccttatagtcgcagcacaaacgaattttgttgccaggctttggcacaatgacaagcggagttgcccattcagatgtcgccacaggctcgaggactccttccttttcccattggtttataaccttctccacctcggaacgcaacgcgaatggcacgggacgaggcttgcatcttttcggctgtacatccgtttttattttaacgcgatgtgccttgtgcagcggccaagtccttcactaaagacttcggcgtaattttggagcacttcgtccaatttact

SEQ ID NO: 28584 - DNA, 705 bp, Heterodera glycines
agcgtttctcttcccctcccccgctcaacatttatgtcatccatcgattgacccccatcccacccccggggcatttctccgccttctcatcatccctccctccgtccgtccatcgtccgttttgcggatgaatgggacggggtggtggtggtggtgaggggggggggggggagcaaatgtgattcaatttgtggtgttggtggttgggtgatgatgaatcccagaatcccccacaaattatgcggaatgcctattcctccccctccccttcccccccccccccccgaggggtgagtaatcagcgccggcggcgcccctcgctcattacatatgcagtgaagtcgttgtgtgatcttggagccccaaaatttcgccaaaaatttaattggattagtcggcgcaaagttgcgctcgccgctttcgaataaatttggtgggagacaaatttggggggagggggcggaacggaacagagaatgaaccaacattaaggcattagtgaaactcacacaattagttgtgatcactttcattcattggtcacattatcttggttcttagttcagcgtccgcctgattctctttcatttgaaaagttttaaaatttttcgccgattttagaaaacccgaaaatttcaacagcagaaccctccctctttcactaatacccaaataaaatttttatataaagtactgtatttgtaa

SEQ ID NO: 28585 - DNA, 735 bp, Heterodera glycines
tgatgcgttcgaatccgatgactttacgaggcaattgcattttcggaattggcaatgcttttacatgataattggcaatttccatttcctttgtgccattctccccaattttgcttccaattcgaataattcctaatgcccatttgcgcgttttgaagtgttcatccacgtaaaagtcaaaacggtggctgatcagcgcaattccgaggccaagttgggaaggcgcaagcaaatcgaacaccgccagccaaccatcgccggagatgaaactgaaaaaaggaaaacaaaattgaaattggaaattaaaattgggttttaattttacattgcttttgccattttttcctctgcctcttttcggtcgtctgacattttgttgtgccaaattattaaggcaattttcggcacttttgaagttcagtgggccttttttgttcaaaaatatatatgaaaaaggaaaaaaaagagttaattaaaacaaaatcacaagaaaacaaattgaatatttttttatagttgaaaagaatgcattgtttttgttcgtttttcttttttgtatttgcgaacaaaagctgggactagggcttatatttacagttgctaaataggtcaaaatcagtattgaactaaataatttcaaaaatattttagatttaggtgctaaaataaaaaactagaaaatagttgctatgaactcgaaaactagcttaacaacaactgaaaaaacatgttttt

SEQ ID NO: 28586 - DNA, 844 bp, Heterodera glycines
aagacaaaaattcgatttttagggggtgtatttttctttttcagccgatttttaggggtgtatttttgcttttttgaaatcccgaattagggggtatattttgcaaaaattttcgccgttttcgccaaaaaattactattttttgccattttggactcaatttttcaaaaatatggtaaaatgggggtccggcggtgccgataggcgccgccgggaaaatttttgagtattttaatgcaattttgttaaaaagattgcttaaaatttcaaaaaatttaccgaaaattttacttttttgagtttcgggggggggggggctttagccacctcagccctctccctacctacgcccttgctttgaccctttcctcaccaatgccctcaattacattgacttcgtcaccgtcccatgcactaaccccgttatacaaaaggcgttaataaatatacattttggtgaaaaatgaatttttgttagagtacgggaccgggttagaaatgggtcaaaacagatgtcggattcgtgatcactgatcagttacccctgaaaacctattaggtaatttgattttttttaaagtaagaaaaaatatggagcctaaatggaaccagagccctttttgcgttatttatttctttggcaccccatgtacctatatgctacatgcatatctgaatattttttaggttaaatggctctaaggttaaatttgttttacgatattttgtgtcctcgttcttgggttttctaccaggtaaattaaatctttcaaaaatttccttttaaacattttctttagacactgcaaaagaaattgccttactggagaacttttcgcgaaat

SEQ ID NO: 28587 - DNA, 1039 bp, Heterodera glycines
ctgctagacgaaatatcagaaagaatgatttcgttttcttgtgttatgtgtggggtgactataaacaagcattcagtggacaaaatggcacgacgctgagggaaatggaagaagcggggggggggggggggaggcagccccggaggggcttgaactgactgatgaaagctttccgaggaaagccgagaacggacggagagtggggaagagaaaagaggggaagacgagaatgagaggagagagattggcccactcggagcacccgccccctccccccaaccattggccgatgtttggttcagtggcgatgaaatactcgcgaatggcacggcattgctaatgccaccaaattcattggaagatcggccaagggaatacttttgccatcaaagcaaaatgaatgaaacgaagtgatacataaaacaacacaaatttgttgcattctcagagatcacttttttcccattcgtctacccattcgtttgtatttattttgccaatttggcaatggcaaaagtgattttgccaggagatggctttgtgtgccgaggaaaagtgcctagggcaatccattggggcaacaacggacgacgaactggcacaaaattgctctcccgtccgtcctatcccccacatcgcccattcattcagcctaccgtcccccgccctctttcgtcagcgtttccgacggcagagacggctctcaacgtcggctctcggcctcccaattcccatcaacggcgacggcactgaactaaacattgccaacggcgcatagcctcggggaacaatccatccaaaaattcgatattccctttcccggtgcccattcttcctcctttccatccattcactcctttgctcccttccccgcctttattctcagcggctcaagcccggggaagcgaagaactgacggagagaggacggagggacggggggaggacggatagatggatgggaaggaagccgcagaagaactggcattgacactcatgaagcagccatgccatcccatcactcacccaccagccattca

SEQ ID NO: 28588 - DNA, 888 bp, Heterodera glycines
gggtccgaaggccccccacgaggccgcgaagcggccgagtgagtaccttgggcgcaggaaaattattaaggaggagggttcattatttatttatttttgcaaaattaattcataaatttttttcagaaactgctctgaaacgcaccaaaatttatttacaagttgaataaggcactctgactcttatattatcaaaaagggagatgaataaatattttaaaaatttctaattcctttttaaacaggccaaaaagtttaggcttaactttttcagcgggtttaaaaaatctagaaaaattagtaagcatttgtagtgctccgatacgtatctctgcaaaatttggtgagccgctgatcaattacaaattatttatggacgatcaaattttttgaaatttttttaagtgcaaaagtggtgggtgtctgcaaaaaattttcaccgggtttaaaaaatctaggaaaataagtaagcttttgtagtgttccgatacgtatctctgcaaaatttggtgagcccctgatcaattacaaattatttatggacgatcaaattttttgaaatttttttaagtgcaaaagtggtgggtgtctgcaaaaaattttcaccgggtttaataaatctaggaaaataagtaagcatttgtagtgttccgatacgtatctctgcaaaatttagtcagcccctgatcaattacaaattatttatggacgatcaaattttttgaaatttttttaagtgcaaaagtggtgggtgtctgcaaaaaattttcaccgggtttaataaatctaggaaaattagtaagcatttgtagtgctccgatacgtatctctgcaaaatttggtgagccgctgatcaattacaaattatttatggacgatcaaattttt

SEQ ID NO: 28589 - DNA, 100 bp, Heterodera glycines
tgccttaaaaactaccgtatatactccagtactgtaatagtagaaatcattgtatacattcattgatgcaaccactgggccgtttgttttgatttcattt

SEQ ID NO: 28590 - DNA, 1616 bp, Heterodera glycines
  unsure (1)..(1616): unsure at all n locations
aaaaaaaaaaaaaattttttttttttttttttttttttttttccccccccccccccccccttttcttttgttttttaaaaaaaaaaaaaaaaaaaaagcgggcgggggggggggggggggtttttcctctaaaaaaaaaaaaggtttggtccttctcacaagaaagaggaagggagggggggggccccccccccccccgcagaccataaaaacaaaacggtagtggtgaaaacaaaaaaaaaaaaaacaaaaacaccccacctccccccccccccccccctcttttttttggtgggggggggggggggggggggagagaaaaaaaaaaaaacaccccccctcctcttttttttttttttttttaaaaaataaaaaaaaaaaaaaaaaaattatatttttttttttttttttttttttttttttttttttttaaaaaaaaaaaaaaaaaaaaaaaaaaaaaaaaaaaaaaaaagaggggggggggcggcgggtggggtgtttttttttatttttatttttttttttttttttttttttttttttaaaaaaaaaaaaaaaaaattttttttttttttttttttttttaataaaaaaaaaaaaaaaaaaaattttttttttttttccaaaaaaaaaaaaaaaaaaagggccgctttttttttttttttttttttttagaagaggaaaacaccccaacaacccccccccccttgtttaacgccgggggggggggcccctatatattataaaaaaaaaaaaaaaaaaaaaatttttttttttttttttttttttaaaaaaaaaaaaaaaaacaaattttttttttttttttttttcccccccccctttttcccaaaaaaaaaaaaaaatttttatttttcccttttttttttttaaaaaaaaaaaaaattttttttttatttttttttttgggcccctttatttctttttttaaaaggaaaattttatttttttcccatttttttacacaaaattaatttgggttaattattttggtgcattaatgcctgatntgtgatagttttgtgggtatccattttagctaatattgattactaaaattnttataaaaacattaatttaattatcacctaatttgattttgtattagaaaagtttctataaaaaatatcaatttaatttagcgaccaatttaattttaaaaataaaataaaatttgtataaaaccccattaatttaattaaatgctattctggatccagtctctcataatcctgtaagccggtcaatccctatttttcaaattgccggatccggattggtaaaaatttcaatgttaatttaggggaaaaaccccgcaaaatgtcatcaactactatatatgagaaaattcggtgcaccagaaaatatcgccatagaaaagacaatgcgccgaaaaaataaaatttcaagaaaaaatttaaaaaaaaaaaatttatttcagttttttatttttgaaaacctatgtttaatgaaaaagagccagtttttaaagaaaaattgggatttttggagtccgacggtgccgataggcgccaccggaaaatttttttggattttttaatgaatttgttaagaaaatttccanaaatttgcgaccc

SEQ ID NO: 28591 - DNA, 1562 bp, Heterodera glycines
aaattcaaaacaaaaacgctttttaccccgttcctgcaaaatccgtacgggaaaaaaagacggaaacccggagttggattcccgtgtttatttcatatggtaatcctgttccagccgggcactaaaagcatgccctctgtttggttgaagtgcgaaatttgaaagtgcggaagtgcctatcgaaaaaaactgtcaaatatttgtgcgctgtttaaataaattggaagtttcggtctaaaggaacttggaaaaatgaccatgactatagtaatttaatgaataaattctatcacattttaattataacatttaacaaagtgcatttatttgttagcatttagctactaattctaattttcgtttctttcaagcggttaaatctattcacttccgccgttccctttgtggcactaattcccaataattttatcgcttaattatttatataaataaaaaatatttattttctttatttatattattatacacgacatcatttttattaattatttgtctgttttttgttgataaatcgtgtgactttgatagataatcaattattttttgagctgtcaccagcaatttttgctgacagcgcacaattccattctttgtcggtcggtcggtcgtatgttttccctatctttcgaatgatgtcattgcattttggagggccaataaaagcagttcccttctcctcctttcggccattgtatcacaaagcaaaatatatttccatctgtcattgcattataatatctcagtgaaatcgcccattttaagcttcattaaaaactaaatgctccttaattcgttagaaaagctcaattaagtgaaattattttaattttcattttattagcatttcatataaaattcatttgattttttaaacatttttaattcccatcgttccttaaaatggcctgtgaatgttgtgagttgaatgaatgtgttgttgcgtcgtaataaattgtaaattccttaagcctgctgcaaaaacaaccaatgttgtaccactaactgctgcggaggttctgctgacaaataaacaaatatttccatgccttttaatgcttttttcagattcttgttcatcatgccaatgccccaactgcgagtgccaaaagcaaaagggacagtgccaaccccaggggaagggatgctgtgcttagagaagcgaacggaaaggacggagagaggggagagggtgaagcaaagagagagagagggagagagagaaaaaagggaccacagtgatcggaatgaccaatttgtgtgccaatgataagagcaaatgacaaacataattactaattgtaagcaaaaagacttgtatttttaggggttcgcttccgtatttcctatggaagagtttcttgccgcattctcatttcttagtggcgccaataattgcccactttttcaacattcgatgaagtgtatttttctattaaattccttttttttggcaattttttgtgactcaaatcaaaatatttatggctgaaaaaataaaagaattttgtgagaaatgatcaatcattttcttggctttgggt

SEQ ID NO: 28592 - DNA, 1051 bp, Heterodera glycines
tgtaaaaaaactagtcagaaatagatctcatcaaaaagaaaggaattttagatatgtaaaaagaatcgatttctcatttttgataaaaaaatatgaaataaatttatttaattaattgttgattggttaaattttaagatggaattaattttggttttttgttttctaaaattaaagaaaaacgctttcattttactataattttttcacttggaaaaatgatttaattaaattttttgttttttttcgtttggaaaaaatctccgttttgtgccgggcccattttaaataaaaatttcggcctaaccctttttccttaaaaataacaatcaaatttttaattttttgtaaaaaaaaatctcgtctcgtctcgtgttctcgtgtttttaggggcgtctcctctcgtgtttcgtatatcgtattttatttttgtctcgtttttctcgtatctcgtattttatttttatttttgcaacatccctgctataaaaggatactcattccgctgggattcgaacgcacggcccttccaaaacagggtttggggtgtctatcttggcctttttatcactaaattaattcagaaaagaattcccaaagtcatttatcaaaaaaatagtgataatccaaatacaatgacatcatgaaagtttgtattgtaagaataaaaaacaatttaaaaataaatgaaagaaaatggaaaagaatagaaaaggccaaaaagaaagaaagatggaaaaaagcagggcagcagggcagcagacatttcaaccccaattcagcaagttcatcatcaaaagcccaataatgggggggggggggatttaaaaagccgacaaaattaagaagcgaaattaaagcacttttctagtttaggtggcccgatgttgctagttaaataaattccaaaaattttaatgcataagaatttggtatatgctcataatattttgaaatttgcagaaatacagtcaagaaggcagattttaaaacaaaattatctgtatgaaagtaatcctagtaccaaagtattttcctgtaaaaattaatt

SEQ ID NO: 28593 - DNA, 358 bp, Heterodera glycines
ccccccccccccccaaaaaaaaaaaaaaatttttttttttttttttttttttttttttttaaaaaaaaacccccccccccccccccccccccccccccccacaaaaaaaaaaaaaaaaaattttttttttttttttttttttttttttttttctctctcctccccgcccggggggggggggggggggcggggtgcggggcccccccccccccccccccccccccccccccccccccctcccccaaaaataaaaaaaaaaaaacgaaaagaggggcggggccgagggagtggggtttttttttttttttttttttttttttttttttttttttcttctccccccccccccccccccccc

SEQ ID NO: 28594 - DNA, 790 bp, Heterodera glycines
aataattacaaaaaagctattagtaacaattgtatgataatattctatatctattcaaaaatttaaactaatttcaacaaatttacataattttaaaaaatatataaatttttagcacatttaaaaataagtaaaagcctaacccataaacttttgaattttatttacctagttcggtcttccatttataaatttgatgccgactaatgctcaaatccttcgaaatttcccgttcaatttttgctctttcactcttttcacttttgttgccgtaaattttttccttttttatttgatcaaattttttgatcagttccaattttgttgactcatcttccattcttggtttccttatttgttgaaattttctctttattttaaaaatattgctccgatttgtgcccaattttttagcaatttcgcattcaaatttaatgtttgtcatttctttataaattccttctcttcgtaaggtatttttcatcaaattaaatttatttaatatttccaattcatcatcactttccccaatgctttttgcattctgtaaatttccaccattttaaattgatatggactatttctttaataataaatcaatttttaccgtatcatttgtttcggaactcgaataatttccctgtttaattgcttcattatttagttgtggtatcgttattttttgctcatttttttctacaaatgattctgatttgatttttggcaatatttcaggttttatgtcttctgttgcctgataattggcatattctgtcttaatgagtgcact

SEQ ID NO: 28595 - DNA, 719 bp, Heterodera glycines
  unsure (1)..(719): unsure at all n locations
aaatttcgacncaaaaaggggatacaaactgaattagtacccagctttgcttatatattgtagatacaaacgaacacatatttctttcacaatgtcccaccccctttggcggcgtgtctcgagaattggttacgtttccgttttggcgggtgccaccgccggtggtgcttatgtcggcacagtaatctttaaattatgtgttgcatggtttttcacaaattagttttgtttcacagcaatattaccgccacgggtctctgcccgagttgccccaatgggcgcaacaatttgccgatcggatgccacagaatggtaagaatcaaatgcaaatcattgcattttttgtgccaattcggtgcccgattcaactttttgtagccaattttgtgaggaatgtatgccatttttaagaccagcgaccataaaatctcaaaaaacgcaaaattttacgagttgcacaaattttgttggtaaaagggctgttgttatggaagacaaaaagctgtaaaaagaggggggagcaatggcattggcacagagcttggcaccttttgcaaattaatttttcgcccctatttagttgtttcacttcgtccgcaaaatgaaagtgtggccaaacaaagtgacactgagcggcaaaaggcggaggtaattaatgcaattagaatttgctgtaaaacaattaatttcacacttaatttaggctgtgaacgcccaaa

SEQ ID NO: 28596 - DNA, 1016 bp, Heterodera glycines
tggcaaggtcgtggatccagtgaaaattacctaggttcaaagaatggcacagaattttacaaaaagggcattgttaaactcccatctcggcggcaaaaggttgtagacagtcagggcaattactttgttaagtagctttttgatcggctttgttatgattgttatttttcattttttgttcataaatttttttccttcaaaaagcgcccttttttatgcaacgacctagtaatagattttgggcaaattattaaatttgctgcgtttggttggcaatggaaatgttttattggcatctctttttgggccatctcagggactcatccgttgcttttttgccattttgagcctatttcatcaaaattccaaaaaaaaaattcctcgcctcggctttttccaccgttttattgtcgtgtttttttcacagattgccggcgtcgactttgtgtacttcaaacagcgcaaccatctgaacatgcgccagcgcacactgctcatcgaagcgtcgaacatctccttttccagccgaattgtggtggtggaaaattgcaaatattacgtgagacaattttccaaaaaaaaaaaaggattttttttgtacactttttttagcaaatgttgataacccatctaaaaataccaaattttttcctaaaacatacttttctgaaaattggccgtttttgaaaattttttcacttttttttggtatttttttttgtttacaaagtcatgaaaccaagtacccgtgggttttagaggtcgctgatcatgaatatgacaattatttgggcctattaagaaatttggcgctagctataaagtgacagatttttaattttatcaaaaacaaaaggggggacccttttgttttgcaaaatttttttgagataaaaaatcgtgaatatactttttattcaccataattgtgatggtaaatacttaatatacatcattatgtgtaaataaacagcaacaaaaaaatttaccaaaaaaggtgaaaaaatttttcaaaa

SEQ ID NO: 28597 - DNA, 971 bp, Heterodera glycines
aaatatttcaacaaaaatttttaaaaattgactagagcaatcgaacgctaacggacgacctaatggaaaaaaatccccgaaggagagaatttaattaaatccattccttcgggggaccgtgccgggtgccgcggggtaagcagtgctggttcgtttcatcacggcaccgaaccttttggctagtcagcaatcgttgcttaacttgccagatcggacgggtgcgcatgattccactgttccaagcaccccaccaaaagcaaaacgatataaccaaaatataaggaaaaattttttaaaaaattttttctccatcttcctttttgatactaaagcatcagagtgctaaaattaagttgtaaataaaatttggtgcgctttagagcactttctgaaaaaaatatttatgaaacaaaaaaatcgattttttcaagtgtccgtttggggtactcaaacatttatggggagcaaaaatccaacgcagaattaaagtacaggctatagggaagctattcccgaaggattcggtctccccataaatctgggcgcatcggttcggggggactgccccgaaaacaaaaaaatcgattttttcaagtgtccgtttggggtactcaaacaattatggggagcaaaaatccaacgcagaattaaagtacaggctatagggaagctattcccgaaagattcggtctccccataaatctgggcgcatcggttcggggggactgccccgaaaacaaaaataaatcgattttttcaagtgtccgtttggggtactcaaacaattatggggagcaaaaatccaacgcagaattaaagtacaggctatagggaagctattccggaaggattcggtctccccataaatctgggcgcatcggttcgggggggactgcccccgaaaacaaaaaaatacgattttttcaaggggctggtttgggggtactcaaacaatttatggggaggaaaaa

SEQ ID NO: 28598 - DNA, 1331 bp, Heterodera glycines
tttttctatgacctggggcaacgagtttaaggaccagggttaggtgaccaaggtaaactccaccatttcttactccgtcatcgctaaagtcctggtcactcattccacaatcggttgagtttgattctcagctgggattgattaaccacaaaatcgaacaaattaatgcgttaattttaatcggtaaaatgtaaaacctaaacaatcaaaaagcgcagtcaaaacactaataaatttatttggacataacacacaatttgacagtaccaaaacatttcgatttatattctgtcgactcggtggtctttcctacaaataacagtccgaatggccaattcgacattcattcttcgtcagtgaattctttgatccgtcccagacgacggtactctttcttggcccagtcggtgaccaaaaagtaagtgactacggggaagaagaacatccaccagtggggcaactgctctttgaccggctgaaaagcacaataaattttgtgggttatggcacatttttcttaccttaacaaacgcatcaaagaaaaagcccttccatactttctgttcaaccggagcaatgcgaacgtaataccaaccgtaagcctaaaacaatagaaaattgcatcccgtggattaatttttaatagtctaaatgacagtgaactttttggacttaatcaaaatgttgaatgcatttcgagtctacatgaaatgagcttgaattgctttgataatacagtcatggttatgacttataagaattctccatgcaaatagacatagaccaaataataaaacagaccttcgacaaattgccaaaatgtttctcgctggcacggagcaaggacaaacgcatttttggtggcttaggaaaaatattaaatttgtcaaattaaaacaaataatatccgatccgacaaagtcattccgttgattgagaaaaaaacgaatttttttatataggtttaatcccaaaaatcctaataagcaacagaaaatgaaataaatttatttataggaggatccttcttctgctgccccgtaacttaaaatcaatcattccattggatgaaacgctctatttcacaaatttgtcgtacttctcgagtctaaaaaatattaaaaatactttaatttattatttgctcggtgaaattgtatagagttttgcatgtacagttatttttgattttgaatttcgaaaatttgtttgaaaatcccttttaattgtaagtcaagtcaaaaagcaaagaattcgtaaaaacaaatgtattggttgttctattgctcttgcattacttggcaaaatccgcgtttctttgttgcgtgaac

SEQ ID NO: 28599 - DNA, 803 bp, Heterodera glycines
ccagggctaaaaaatccccggcgctccgcgaaaaaaaaaaaaaccgcggccgcgcaccgcgcatcgcgcattcaaattgccgcggccgcgaccgcgcctcggatcgcgcaaaaaaaaacgccgcgaatcgcggatcgcgcatcgcggatcgcggccgcgctccagccctgcagcccataaaaaaataatttttaaatcaatttataaacatttctagagggttttcggggtcgctgatcacgaatctgacatccatttcgaccaattttgaatcccggacccgaattcgaacaaaaagtcgaatcattttacggtgcgaaaataaaaaaagttcaacaaatggttatttgattcattataaaaatctatgaaaataagtcaaaaatcgaaatcgaaaaggaaatgtggagagagaagtgttttgggggggcggcggaaggtacgggtcgtcgcacggcgatgaagtgtgtagaagcgaaagatggcctagaaataggagggatgtgagaaggagataccgtttggtaccactaaccagtggtcggtcatcagaatttgattgctgacgaaacttcgagcggacccttcttcgaaatcccttgaaatctttctgaaatttacaaaactgagagccgagccgagaccggtgatgaacggcgcatgatcattgtcagaaacgtccaccaaaatgaagcgtggtgcagtcgatttgacaacgcaaagagacgggggaagaaattggagccgattgagcccgaccagcgatgaatgacacaacgagttgatgagacagagctggaaat

SEQ ID NO: 28600 - DNA, 1858 bp, Heterodera glycines
aaaaagtaagaaataatttttttaacccgtatagcccaaaaatgggaacaaaattcccaatggttccaattcaaccagataaaggcaaatcaatccagggcattgtaaaaagctatgtatgagttttaagggatttatggacatttgcattgacattcattccattttattttattttactttacatttcatattgttgtattttttgacattatttattttgatttttttttttttatgcgccacataagagcactaatgtgcctgtggtttgctcaataaatataaataatttttttatagtctcattattgttcttttaaaagatgcataatttcgcctcattcattaacacaattttgttttccgcatttctctctctcacacctcttctctctctctccctctctctctttctctcctcttaaactttctctctttcgctctctctcttctctttccttttatttttcttacatttttttctccttctctctctctcgttctcactctctccctctctctcttcttattctctcctcttatcctttctctctttcgctctctctcttctctcactctcttctcttttctctcatctcctctgtcttcgtttctccctcttttctctgtctctcctctctgtctctccttatctctctctcgtctttttctgtcttctctttctccctctctctctcccttcttttttctgctcttatcctttctctttcattttaccctttcttcctctctctctcttcgctctatttctatctctctctctccctctctctcgtttctccctctctcctttctctccctctccttatctctctcctattttctttctaacttctctctctccccttttctctctctcgcttcctttctctctctcacttattttctctctctctccccttttctctctccctctctctgttttcctctcctcttgtcttttttctctctcttctctttcatctgcaagatatttgtgaaaatttcatttcatcacatttctttttgtttccaattcaccttgctcacctctctctccctcacctcttctcctttctttgtttttctctttttacctattctctctcgctcaatcatccttgtttttctctctattctcattgcaaaataaaggtaaacaaaaaggaaatcgttttaataagtgagctattataaaaaaagggcggggcgtacgtatgtatacatccaccaaattactatagtggaccagcagcatttccatttggcccatcatcagcaattccatcggggaacagattaccggaattgatcgaattcaattgatcaagatcagtgagaaatgttggcgatatgcgacgacgcaaattgtccaaagcatcggtattgcaaaagaccaaatgacgaatgttggtcgcaaaaattggccaaatttcacggacaaaaacatcccaaattggctgatcatcctcagttttgtttggccatatagacaattccaaattggtgccacttctgtcccaaatttgcttgttggaacgaagaaatgtgagcacagaatggtcaatgtagctgaaaagggggaacaatgaagacgacgaccaaccatattaattggtttccgtataagtttaatttacccaatccgaaggttcttaaagcggattttgttgggcagcggacggtcggggaacggaaattgcacaggcttcgaatcggcatatattttcgcttttggtcctttgtccttccgaattatgacacttctccaaattgtcaattccgtcgtttttccatcaaaatgcgtgtcaaccaaaacatcgaaacgatcggaaagcaatgccattttgaggcc

SEQ ID NO: 28601 - DNA, 1072 bp, Heterodera glycines
  unsure (1)..(1072): unsure at all n locations
aatttaaataattttcaaaaaccaaaatatctaggtaaaaatgaaaatatgcacaaaaaatgatttgactatttattctaaatgatcaaaatgacaacatttcctcccattagcatcatctgtctccctctcattaatgagtggcccttccatcgccctggcttctccttctccctaaccctgggcttcttcgccaatcatttggatggtttccaacgcggcggtcgcttccgattcggcctccgcccgcgtgccattgatcagtttcagcgtttccttcgccttatccatcatgttttgtgtgaaattcagttgtacaattgtctccaattcgttccgcacattttcaatgctttgcttctcgccaaatccgttaaatccgacttcaaaaaacgtttcgccaaacaatttgtccattaacaatggcacttccatcgtggccaaactccgcttcactgccctttcggcttgctccattttgcgtcggatgttggcaaatgcgtgcagtgcttggccatggctgaagcgatcatttccttccgaatttgccattttaaacagttgcgcggttggattgacgtacattttgtgataaatttgggacgagtcgaagaaaattggcgcaaaatcggccaccttttgtagggaaaagacacgagaagcattaatggcatggcaattaaatttcttattacaataattaattttgggtcggtcaaacacaaagggcaccgcagcatttgtttactttcgatcctaaaatattcaaataaattagttatcaaaaaaaacaatttttcaacaaaccatcgtgtgatgcaatcggcgtgatatttgtgctaaaaataataattaaatcaaaaattattaatttgtcaaaaaattgcaaaaaaattcgcctcataattcgtcctttttccatgcaatttgattatttgacgattctccaactgnagagaatctaaagcaattgngcacgtttcttcctcattttggtcatttttctgtgcgtttcggntttgggctgcgcttggcagctgaattaatcttnntttaatgaaatattttgcta

SEQ ID NO: 28602 - DNA, 1507 bp, Heterodera glycines
tagggttcggaccccgtgggcgggggtggcttttcacgggggcgggggatggcgggggtcagagtcgcgggggcggggacgggggcacgataattccgcccccgcgggggcgggggcgggggtttgatttgaattaactccaaaaattttacaaaaaattaattttttatgaatgatgtgatggctccacattcctttagtcaatgtatcgcctcaattcaattccttttggcataaattacacagattttgtctaaagaattaccaaattttagagatttttggctaattttttaagaaaaaataggtttttggggggcccgcggtgccgataggccgccaggcagattttgaaatttaagctcgatttctaacagatgtttacaaaaaaaaataagatttttacgataaatttttgttttttaatatattaaattatcatgatttactcaagcaaaattggaactcagatttgtaacatattttcttgaggcacatttttccaaaaaaaaaaaacttggtgaatgtgcgagcgtagaggtccggcggtgccgataggcgccgccgggaaaattttttgaaaactgatggatctgttaatagattttgtccaaaaaatgataggtttttgcaatttttagagaatttttttaataagatttacgaatttttgggccctgcgatgccgataggcagcgccaggcgaattttaaaattaaaaaaataaattaaaaaagaaaccgtcaacctaaatcgaactcacgacagaaagtaatgtcaaggttgattcactaaccactacaccacactacacatcaatgaccaataataaaattaactttaattatcgcattaaaaattataaaatttttcacggcggcacctatcggcactgccgggctcccccccccccatttgctgcccaaaatttttttgaaaaaagcgcgccccaaaaaagtgctttgaaaacaaacaaaaaggtcgttgggcaatggtggttttgcggtttctgcgtaaaataaatttaaaaatttaagaagcattttttctaggatagaaaaatgcgctgattaagaatctgagctcggattttgcaaaatcattgatttttgtctatgatttctcaatgtggataaaggactttttgagtaataggactttttgtgttaaaattggggatgatttatcctccagtaaaaaagttacctctggagtcccccagggatctgtccttggacctttattatttttgatttatattaacgatcttcctgatgctttgccatcaggagtgaaaataaaattatatcctgatgatgttaaattatatatttgttataaagcgagagttgacacagaaattatgcataaagcattgcataattaaattgcaattttccaatcatgtcgcacaaataataaagaatgcatatttacgtatgcgttctttatttcgggttattaaatcaaaatcttctaggatttggattattttgtacaaaactta

SEQ ID NO: 28603 - DNA, 1557 bp, Heterodera glycines
cttcgggaatagcttccctatagcctgtactttaattctgcgttggatttttgctccccataattgtttgagtaccccaaacggacacttgaaaaaatcgatttatttttgttttcggggcagtccccccgaaccgatgcgcccagatttatggggagaccgaatccttcgggaatagcttccctatagcctgtactttaattctgcgttggatttttgctccccataattgtttgagtaccccaaacggacacttgaaaaaatcgatttatttttgttttcggggcagtccccccgaaccgatgcgcccagatttatggggagaccgaatccttcgggaatagcttccctatagcctgtactttaattctgcgttggatttttgctccccataattgtttgagtaccccaaacggacacttgaaaaaatcgatttttttgtttcataaatatttttttcagaaagtgctctaaagcgcaccaaattttatttacaacttaattttagcactctgatgctttttctatcaaaaagggagatgaataaatttaaaaaaatttttaattcctttttaaacaggccaaaaattttaagcttgtgtggtaagtgtgaagaactgtgttcctccaggcaaaaaattctaagaaaatttataagcatttgaagggttctcagcagtttccctgcaaaatttggtgagcttctgatcagtctagaacgttgggtgataaaatgaaaaaaataattaaaaaaaaataatgctggtgtggtaagtgtgaagaactgtgttcctccaggcaaaaaattctaagaaaatttataagcatttgtagggttctcagcagtttccctgcaaaatttggtgagcttctgatcagtctagaacgttgggtgataaatgaaaaaaataattaaaaaaaaataatacttgtgtggtattaattcataaatattttttttcagaaaatgctctgaaacgcaccaaattttatttacatgttagtttaggcactctgatgctttttctatcaaaaagggagatgaataaattttaaaaaatttttaattcctttttaaacaggccaaaaagtttaggcttaacttttttttcagaaactgatcagaagcgcaccaaacttagcagggatactgaaaggaagagaaataacctattttaaatattatctagtcagttcatttaaataatttttatccaaaaaaaatttttttttggatttcggggcagtaccctgaaccgatgcgcccagatttatggggagaccgaatccttcgggaatagcttccctatagcctgtactttaattctgcgttggatttttgctccccataattgtttgagtaccccaaacggacacttgaaaaaatcgatttttttgttttcggggcagtccccccgaaccgatgcgcccagatttatggggagaccgaatccttcgggaatagcttcgatatacctctactttatttttaccttggatttttgctccccataattgtttgagtaccccaacggacacttgaaaaatcgatttttt

SEQ ID NO: 28604 - DNA, 1482 bp, Heterodera glycines
  unsure (1)..(1482): unsure at all n locations
ataaataaaaacgaaagactcagattttcgaaaattttcttttgccagctagctcggcgctcatttcagtgtaagttagtcctttaccggggagtatccctgcaaagtttggtacgcttctgctcaattagcaaaaaatatgagtgatcgaattttcactaaaaaagttaagcctacattttttggcatatttaaaaagcaattaaaaaatttttaaaatttaataattttcctgcaccgaaggtactcactcggcctcttcgcggcctcgtgngtgggccttcgccccccccccctcccacgcccttccgagcacgacaaatatttcaacaaaaattttgaaaaattgactagagcaatcgaacgctaacggacgacctaatggaaaaaaatccccgaaggagagaatttaattaaatccattccttcgggggaccgtgccgggtgccgcggggtaagcagtgctggttcgtttcatcacggcaccgaaccttttggctagtcagcaatcgttgcttaacttgccagatcggacgggtgcgcatgactttctgaaaaaaatatttatgaaacaaaaaaatcgattttttcaagtgtccgtttggggtactcaaacatttatggggagcaaaaatccaacgcagaattaaagtacaggctatagggaagctattcccgaaggattctgtctccccataaatctgggcgcatcggttcggggggactgccccgaaaacaaaaaaatcgattttttcaagtgtccgtttggggtactcaaacaattatggggagcaaaaatccaacgcagaattaaagtacaggctatagggaagctattccggaaggattcggtctccccataaatctgggcgcatcggttcggggggactgccccgaaaacaaaaaaatcgattttttcaagtgtccgtttggggtactcaaacaattatggggagcaaaaatccaacgcagaattaaagtacaggctatagggaagctattcccgaaggattcggtctccccataaatctgggcgcatcggttcggggggactgccccgaaaacaaaaaaatcgattttttcaagtgtccgtttggggtactcaaacaattatggggagcaaaaatccaacgcagaattaaagtacaggctatagggaagctattcccgaaggattcggtctccccataaatctgggcgcatcggttcggggggactgccccgaaaacaaaaaaatcgattttttcaagtgtccgtttggggtactcaaacaattatggggagcaaaaatccaacgcagaattaaagtacaggctatagtgaagctattccggaaggattcggtctccccataaatctgggcgcatcggttcagggggactgccccgaaaacccaaaaaaaaattttttggataaaaattatttaaatgaactgactagataatatttaaaataggtttttctcttcctttcagtatccct

SEQ ID NO: 28605 - DNA, 2092 bp, Heterodera glycines
tttttcaaaaattctacccaaagaatcgacctgaaaattttcataaatgcacccctaagaaatgataaatttttcaaaaatcatcactaaaattaatttaattattttattgacgataattttttgattgtaaaaattatgtatctcattaatggtttggcataatatttttgctttttgaagaaaattttcgattttacaccccctaaaattcggaactttttagcaactatttaccaatttttagcaactattttgggtttttttagaaacaaaactaattattttggtagtttttagcaactataaatattagccctataaatcaggtttatttacgaatttaactttaaaaaaaaattcttaaacttcaaatgtttatctacaaaaatttatggaaaacaattattctaatccgtgtataatcaattatttgcaccttagacaattaattatgcccttcaagcaccttgctttaattttcctaatttgcttgtgctatattcattttgtggtcaactttttctatgattaattttgttttaattattttaaatagcaaataacaattaattaattttttccatctaccttaatgaccagttcgaacttgagctgatccacttcgtcagcgagcagtgccatctcattgtcgcgcttgcgcttccgttcaaaacgtgcactgacgagcttttggcgtttcaattcggcacattctctttgtaatcgttgacgtcccgttgccaaaaacttttcaaactgatcagtcgcaccaaattggcggttgtccatgatcaaaagacaatcgatcagataaattggtgaaaattgagtcacaggcgacaattaacctaaattgaatgttaataagttcaaatcaatctttttttatagggctaggaaaagcagacacttttttgtaccaaaacaatacctctcatataaatctaaaaaagtttacaaaaaaaaaaaaaaaatggccatttcagtgccgggtttttacaaaaccatgcttgtttttttagcttattcgatagaaaatttgtgatacttgctaaagttatgcgggaattccgaattatgatttttgggagaaattttcaaattttcatttattcttttcaaattatttaaaataaatatgttttttggtataatttttggcgctgaatatgacaaattgtttaccaatgtcatacatagcgacgtttttatattaaattgaacagttcatacaccattcattgccgatcaaattcagtcacagataattattttatttatttatttttgcattttatattaatctttttgaatttattctttgctcattagtcttagatgttcagcgcctcaaattaatcaagtaaaaattaaaagaaaaattcagaggacatgatctaacgagccttgtatacacccaggtgggaaataaattttatataattaaaaaatcttctataaaattttcaagtatttttaaattagaaataaaattttaaaaataatttgtatgagtcatctcttctgtgagtggtaatgggaaagaccaaccgaagaccaaataaatagagtgagtgagataaaaccaatagataaatatgtaaatagagagagagtgtaatggaagaggaagagaaggaaggcttggcatctttttggtttggcttccaatctgtgccccgccgttttgtccccaaatgccaataatagattgaattgttttttaaaaaattgtcgtagatatttataaacttattaaagaactattgtggatttcttatgttcttctacatcagggctctcattcgtccttgaatggcaaggacgtccttgaaattgggcctttccgcttgaaaatttaaaagtatccttgaattcaagaagttcttgaaaatgagcatttggaaaagttttaaaaaaattcaaagaaatttgagaaatttttgtaattttaacaatattttgattaaattatggcattatgtcaataaaaatgtgtaatttttttttcatggttgagaaattttttaattatatggcataaagtcactatttttcttaaagaaatagcccaaaaatcgcaaatttt

SEQ ID NO: 28606 - DNA, 966 bp, Heterodera glycines
gcagaatgccatccaattggcctggctcccgccccatcccgaaacttctccggtggtcgcttatcgtctccgttacggccccgccgcaggcacttaccggccgcaggaagtgattctgcagggcgacgaactcagctgtgccgactacgagtcgcgcattttgactggcgaacacttgtgcacttcggccacgggtctgaagccggccacgatgtaccgcttcgcggtgcaggcgcagtcttcgtctggcaattggggcccgttcacctcggacagtttcggcaccactgaacccgaactgaaggcggtggaggggggacagttgcgactgatcggcgcagggcacgactttttgcgagtgcggtggacggcaccgccggtgattgttgcgcacatcgaacaatacgaggtggacaaggcggaggacgagattcgcaactgtacctatttgtttaaagttgcacatccaaccgaccgaacgacttgtccaagcgccacaacggcacgaagtgccggacagtcagacggacttccaattcaaagggttggtgccggtgacagtgtacaacgtaacggtacaaggactggcacagcaggggaagagcctgtggaggattagcgacaacttcgccaccactgacatatccgtgagaaaggggaggggtaagggacagtaatgccattcccgaataaacgaacattcccgagagttgggaccaaatgcaaaccgagttgaaaatggcatttgaatttgcttccccttaggagccgtccctcgcctggctgtcttcgtggtgttctccgcttaccctggtggaaaagtcggactccatgctgcacgtgacttggactccacctgacgtgtacgagccggagtaccgcgaccttgctgacgcattaccgcgttaccattgcaccgctcctagaagagacgatgaaggcgggcgggcgcaaaaattacacagt

SEQ ID NO: 28607 - DNA, 1375 bp, Heterodera glycines
gctaaaagagaagctcgtaacggagttcactcacttgcgcaacaattctctggagcctcttgcgacttttcttgattatataacgtacgcgaaccgacggaaatatttattagaagcgtgatttttaagttattcatacatgatcgacaacatcattctgctgatcactggcactctccatcaacggccaatcaacgagctgatctccaagtgccatcccctcggctcatttgagcaaatggaggccattcacattgcatcaaacccggctgaactgtacaacgctgtgctcgtcgacactcccctcggttggtcgttggagaagggctttgattcgttggcctcgaaatcttcttgcttttatttacttagcattttctttagccccatatttcgtggattgcataagtgagcaagaccttgacgaactcaatgtggagattatccggaacacactgtacaaggcgtacattgaggacttttataatttatgcaaaaagatgggcgggaaaactgctgaggtgatgtgcgaaattttagctgtgagtttcctttttctctatttcatcttttttatcggtgtattaagttcgaggctgatcgacgagcaattatcatcacaatcaacagttttgacacggagttaaataaagaggaccgcgctaatttgtaccctcggtgtggaaaactgttcccagagggattggctgggctagccaaggccgatgattatgagcaagtgaagcaagtttgcgagtactactccgactataagcaactcttcgagaacagtggcctcaatccaggcgaaaaaacgcttgaagacaagtttttcgaacatgaggtgatccattccagcgggattgagttcttaggcgactccaaaatcatttatttaaaatgggtcaaatcagtgttctgtcgtttccaggtaaagctgaacgtccaggcctacctccaccaatttcattttggcgttttctacgcgttcataaaactgaaagaacaggaaatgagaaacattatttggatcgcagaatgcatagcacagcgtcaccggaccaaaattgacaattacatacccatcctgtaaatcttataattccacaattgtctaacgtaagtaattccacacgcttccttttagtttctgataatgtctgatgattcatcgtttaaaatgctattttgtgataaagaatgtttacagtcatttaataaggtctagtgcagaattcgcgtcccatggagttacgatatcccttggcttttatgcaaccgttaggatttttatgttgacggttttacgtgtcctaattaattcgaaatttattcgactttctgtggaatttcgtgtcggaattgatgtcatatg

SEQ ID NO: 28608 - DNA, 1644 bp, Heterodera glycines
tttaaaagtaatacataaatacttttattaatttaatactaataataattttagttaatttagaaaaataatgttcgaagaaaatattatataagaaataaaggattctattaacaaatctcactcaaattctcggtctcgagtctcggtgtctttccaggtctcggttctcgaaaaatttcgactctcaagcagccctagattcgggttttcccttcccttcccactctctctcctctctctctcttcccgctttctctctctatccatctctccttcctctctctccatgtcgctctcttttctctctctttccttttttacccactctatctctttcttttccctctctctcttaaactgaccatgctctgtacattgccgtggccaacatttcgctggtcagattttccggcatcaccgatattgaattgtcaatgccgacattggaaagcattcggcgatgaagtgcggtaaggggctgaggagtgccgtagccgccaattgagccgccattcaattcaatcttaaacagagaacaagttcgttttcaaatttttactggcggcacttcgaaatagccgaaaattttaaaaattgaccgaacattggcaatttttggtgaaaatttattaacaaattataacttttttccggcaaaaaaaattaaaaatagaatttcgattccacattcttgttgatagtgttgatattaattaaataaatatcaaaataagagttgattcttaggaaaacaaataaaagagtgttcatttgctaattattatttacctgttttagcgcatattttttctcattgcttttttcatcaatttcttcgctggccatataatcctaaaaaataaaataaatatacaaaatttgaaaaaatgaaatcaattattatcatatccttatatcataagaattaattatcccaccatttaagaaaacaacaaaattagttaattattaattatcccaccgctcttatgcaaatcaacatcaatggctgtcgaatgccctccttatgctttctttcgattagatcagcagtatatcggagtgatggactcacagccagaacacttttatgcaattctttcaaaaattcaaaattggacggtaacgacgcacggaaatacatcaaaagaagggtctaaaaattaattagagaaattaaaacatttttaaaattaaaaattgttaattaaatttataaaattgtccgtatattatagtcactttgttgacatccatcgcctggtcgaacaattcgcgtgggaatggcgaagggtaaagtgtaaagggcacaaactgtgccatgtcgtccaaaacaacattctaagcaaaggaattgaccacttttggcatttaaatcaaaaaattgaatttaatataactcgagcccatggtaacaattaccctaattaatggcctatggcatttgccaagttttaagggatttgtgccgtatttatatatatccacctcattgattttgtcacatgcgtcacatttcagtttccttcttggcatcggaaaagtcagcccattagtcagtgcccaatctttcgcgtcgcgaattcgttccattaaaactttttcgtccctttcaatgttttccacacaatatttctcttc

SEQ ID NO: 28609 - DNA, 1344 bp, Heterodera glycines
  unsure (1)..(1344): unsure at all n locations
aagatgtgattaagatgacgaaattgggggggggggagtggacaattgagcgtattcatttgagtccaaccatcgcgggggtggccaactgagcaccatacaaaaaagaatatttttgtggacaaaagcattttattgctgggccaaaagcanacaaatgatagtgcagtgggtattattggtgcgcaaaatttcctgtttaacctttcggcgtttccaactaaacacaatacggaaatttagaaattaaagaaaaaataaataaataaaaaagcatatggccgatattcagaatattttatttaaattgctttacaaacataaataagacattttttatgaattacggaacatttaaaagtctcttcattcattggttatttcttcacaacttaggcgatgccacaacgttgttctgttcggcatttgtttcggttttgttcggtgccacgatgttgttctgttcggcatttgtttcggttttgttgggtgccacgatgttgttctgttcggcatttgttgcggttttgttcggtgccacgatgttgctctgttcggcatttgttgcggttttgttcggtgccacgatgttgctctgttcaacatttgttgcggttttgttaggtgccacaatgttgctctgttcggcatttgttgcggtttttttcggtgccacaatgttgctctgttcgacatttgttgcggtttttttcggtgccacaatgttgctctgttcggcatttgttgcggttttgttgggtgccacgatgttgttctgttcggcatttgttgcggttttgttgggtgccacgatgttgttctgttcggcatttgtttgagttttgttcggtgccacgatgttgttctgttcgacatttgttgcggttttgttgggtgccacgatgttgttctgttcggcatttgtttgagttttgttcggtgccacgatgttgttctgttcgacatttgttgcggttttgttgggtgccacgatgttgttctgttcggcatttgtttgagttttgttcggtgccacgatgttgttctgttcgacatttgttgcggttttgttgggtgccacgatgttgctctgttcgacatttgttgcggttttgttgggtgtcacgatgttgctctgttcggcatttgtcacggttttgttcggtgccacgatcttgttctgttcggcatttgttgcggttttgttggcattttctaatgccaaaatgttgctctgttcggcattttccccagtggcattgggtggagccgtaatgttactctgcttggcatgtttggcttagaggtcgtgccattggttttggatgaaccccgcatgctttt

SEQ ID NO: 28610 - DNA, 1679 bp, Heterodera glycines
ttatcctagtcaaataattttttgttttttttaatgatatgtgacgatgcagcagttacggtataacactttatattcaaagtattttgcttaaatttttatatttttttatgtttgtaaaataatttacattcaaatatgaaatgcccattcgacctaggaggtacgacgaagctggcctttatgtaagtattttgatatcgctaatattgcttgcttttatatattaataatagaaaataaattttattcgtctttttttgaatattatttttttcataattcctttttcatctgtctttcctagttttagataataaattatatgtttgcataactattattaatgcctttgtaataatgatttttagcttacttgttgacatttaataattctgtcctttttgtgtttataccggaggaatttttaaaaaattatttaattttttcactaatgatataatttttttaattttaataataaaataatgattaaattaaatttacttttagtttaaagaattggtggctggacgtttcgccaatgaccgtttcgccaatgaccgtttcgacaataccttttcgacaatgccgtttcgacaatgaccatttacgactatatcatatcgccaaaatttaaaatatcaaattaaatataataaaatgaatataaaaaataataaattaatttaaaaaaatattgatgaaatttaaagagaaaaatttaattaggtagttatattttttaaatttaatgaatgcattatctatcgcctattgtgtatgattattaatagttaggagtcggatttttaggtttttacctatttctagattttttcaatttttaacacctattttcgcacctattttggccttttttggggtttttagcacctattttgcacttttttagcacctattttagtacctatttagggatttttagcacctaaaaatccgagccctattaatagtgaagaaagaagacaaaatgagacggacctataatataaatccgaaatgaaaccatttatttaacttaatgtagtgtcctctttttacccaggcggcaatcctgaagaatggttgtccctaattttcatttttttttaattttgtgctcaaaaccagtttttaggcgtttttgagggtgctgataacggatcttaactcgggtttgcccaattccgaactccagacccgaattcgaacaaaaaaaaattgtttttttaatcaagaatagttttttcagggtaaaagcttctaattcattatcaactatttaggtgtaaaacaatgtttcaatttttaattaaaaaaaataagcaatttgcgccgaaaattgaaaaactaaagccattctcataatgctattttgaaaaaaacgaaaaaaaacttttttatattgatcccaaatccgcaccgtccatataattttgcagaaatttgaattttattttaaaaaatatatttaattttattgtcgaaacggcattgtcgaaaaggtattgtcgaaacggtcattggcgaaacggtcattgtcgaaatgtccgggagcccattaagctagctatttttgcccacccttagcgatttttgcccaaccgatttcgaaacggcttagtgggcttgggcactattgagtagtaggcttaaacttttgaatatagctctgc

SEQ ID NO: 28611 - DNA, 1745 bp, Heterodera glycines
  unsure (1)..(1745): unsure at all n locations
actgtccccccgaacgtgcgacacttttgacgatgcctacggcggtggctcatcatcaattgacggacattcggtgggagggaaggggaaaatattgccgtaatggcacagggggacagagcggtggtccactattaaaaacggaaacgcacacaaatttggctttatcttgttgactcggttagagacaatgtgaaaaaacgcaaaaaattggccattatacaaataacgaacgaccaaaacggcacagatgaccacaatgcattcttcgtcaaattggcactttgtcaccctttctcatacagatcagggatggcattccgaggccccaattaacaaaatttgtaaaaaattgttaattttttgaaaaaaaaatcaaaaaaatttccgaaaatttccgactttttatcaaaaatttcgaaaatcggaagtcggatggccgacgtccaaaattttttcggaaatcggaattccgaccccaaaaatgtcggaattcggtgccatccctgatacagacccgtaaccgaatggcgaggggggcgggggaggaatccctctccaaagcaaatttttctaaattcttcaatttactaaaacacttcagccgctttgatttttttgaaaataaatttaaaaaaaaataagaaatgttttcgaattaccccatttcttttttgttacgggcctgattactttcgacattttttcactggaatttgcattactcaattcttaccatgttccgatgtcaaataattgtcctttcttttgttttttccaaattttagtgatttttatgcataagtcttctttctcttcgtttcatttcattttaaaatttctttggcgaataattttttttccctcttatgcaatttccagaggctgtcctccctaaagacaaacaccataaattgtttttatggtataaattagtgctttcaggcttaattgggtgcttatagggactgtctctctcattggataattttcttttgtctgttttccatttcctgtttatgtgctttttgcgtatttttatttctattcatcagctttttgctttttctcgctgcttggtatattcgtcttatgaataaaaatgtgttttaaatatttattacactgtagttgggacttggatggtcggaattttctaaatgacactctttggagttagattttagaagaaaaaaaaattgttgaacaggctttgccaaaaagcaccaattccgaagatgacttggacaaatttttatttatttttgtctatctcttaaccaaaaaaaacttagtcagctacatattgtcagaatgagccatgggataaacaataatgtttgcttgtcctggatttttgtccagaaaatacaggttaaaatcccacattctttggttctgagacttgcctttaagtgactaaaaaatattttttcgatctaaatttgttttagtctagcaaattaattacggaaatgcggtaattgggtaaaaaatattgccgccctttgtgactgaaagcaggcggatgaaaaattggcaccaaaaagaattaagtttatccataagacacaaagcaaaacgtaagcgaacaagcaaaaaatgagaataaagaataaaaacgaaaataaaacaggcagattaagtttanaatttaaagcgaaaattcatgccaatgactcatcacgtggcgaaaacgatggaattcagaaaggctgtggtgacttcactgcccgncccatgct

SEQ ID NO: 28612 - DNA, 2195 bp, Heterodera glycines
aaggcaaagtgtcgcggcgatcgcttattctccacaagttctttagggatcagatccaaaaggactgcgcgaggctgctgaaataagggggaacagtgatcaggacgaaacaaagcaaaaaaaaaaaacaatacaaaagggaaaagaagagagtgaaagtgatcagaagagagaaaagcaatgacagagataaagggaaaagaagagagaaagcaatgacagagataaagggaaaagaagagagtgaaagtgatcagaagagagaaaagcaatgacagagataaagggaaaagaagagagaaagcaatgacagagataaagggaaaagaagagagaaagcaatgacagagataaagggaaaagaagagagtgaaagtgatcagaagagagaaaagcaatgacagagataaagggaaaagaagagagaaaagcaatgacagagataaagggaaaagaagagagtgaaagtgatcagaagagagaaaagcaatgacagagataaagggaaaagaagagagtgaaagtgatcagaagagagaaaagcaatgacagagataaagggaaaagaagagagaaaagcaatgacagagataaagggaaaagaagagagtgaaagtgatcagaagagagaaaagcaatgacagagataaaagggaaaagaagagagtcagagataagggaaaagaagagggaaaagaagagaatgaaagtgatcagaagagagaaaagcaatgaaagagataaaagggaaaagaagagagtcagagataagggaaacaaagagtcagagataagggaaaagaagagagtgaaagtgatcagaagggagggagagaaaacgaataagagactagcaaaggaaggaaagaaaaatgttccaaaaatcatgatcataaataaattctgctaaattgtgatggcttacctcggcggatggctgctgcccctccacagaaacacaaagtgcgacgaggacagcaaagagcgtcagaaacaacggcagaagacggacccctttggacaaggcggaaccaaaaaaggaatgggagggaaactgaaaggggatgaaaaaaggaaaaaagggaaaaaatggtcaaaatggggaaagggaaaaattgccaaaaagggaaaacaaaaaaaaagggcccaaaaaaaaagggggggggaaaaaatttgtgaagaaaaaaaaaaaaaaaaaaaaaaaaaaaaaaaaaaggggggggggggggaaaaaaaaaaaaggtcctttactagtgtcattgtcatgtgtagtagagtgtgccaggggggtggggatttaaagtgccattagtttcttattttttttgtctcttgcgtgtcgggttctctttacggggggcgtcgcagtaatgatgttgatttttattttttatcgcatttctgttcttcttttgtgtttctgagtttgtagtgcttgttcgattagggtcattttactaagtcgtcacaaattgatttctaaatttcagtttccatacgtgatacctgcctgattggggcactgattattggatttgggtttccgtattattagaatctgttctgatttgagattttattttgtactcgcggtttcagtactagtttggggaacggacgatttagtcggattaccagttcgatttgtggctatctgctctgtgttatttagttgcgatcgggatacacattatgagtgggggcagttctaagttgggataaattactacgactcggcgtaccagtgcaatttgagaaaaaaagtcttattcggggtaccagcaccattcggtgtatcagtacgagacggaaaacttagtgatgattcggggtgtcgcttcgatttggggtacctactaagtttcggtgtaccacaacgagtagcggtatacaatacgaatagagaacgtagtatcattgcagggcccactatgatatctgtctgtacgatattggaaaacagtcgaacgagtagtggtaccagtatgagttcggtaccttagtaccatacgtgcttccagttcgagcggtgagatttaggaagcgtaggtgtaccagtgcatattggggctgtccgcaaagggtacagcagttgatgtccgcgtatccatggtaaggggggtcccttaaggcctcccctcccctcccctccctaacgcgattcggctttttcttccctcttctcatgcatcctt

SEQ ID NO: 28613 - DNA, 1305 bp, Heterodera glycines
caacagcatcacatcttcctgatcacttaggttgttttcgcttgttgtactgctccatcttctcgccctgtccgatcaccgctgccgctttctctcgtcgctccgtcgccattgagcacagcgacctgatcaacccaccggtgccggtctccggatatccgcaacgtggggcatttgcttttactcacggccaattctcggcactcaatttcgatcaattctcgagaattaagccatgaccatcccgattgtatatggcaaaaccctgatcacaagattagaatcgattctgtcattcttcaagctcctccttagcctcgaaagtttctcagtgatcaaatccttgtcaaatttcggcatttatttctcgacatggtgatcggtgctgatcacaaaaacgaattatgggggcctgatcaaatccttttatacttaattgatcaaatttgatcagataagtttatcaggatttgatcaggccccaataaacccgggttccaaccgtctaaatacaatcccgacaccaattcccgagttgtatctttcccattcagtggtccctttcttcggttcgcctccgtccgtcgcttcgtccgcctcctcttccgcgtcatcgtcgacgacggatccgcaccagcagcagcagcactcgcccattttccactcgcaccagcgccatttgaccccactgggaagcagcagcagcaacaagcagcaacaacagcagcaccaaagtgtgatttgattgggagagtgatccgatccgtgatcgttttttaggcagggaaatccatcggataataaaaaggggcgagggataaatcatgagaaatcattgtcagtaggactgaccaccccgccgatcacaacaaaaaactgatcaggttgaaaagatgaacggaggaactcagcgatctttcagtcataaaaaagtgatttttgatcagaggggcaatatttcttgacttgagttctcgaaactgatcagcagcattcaaaaactgataaatgtttaatgaaaaaagtgatcgggagatatatttcgtttgatcaatttgtgaaattggatcgaggacttccctgatcagtttcagaaagtcaaaaatagtggcgacttacaaattatagcttcttcaccctactgatctcgatcccgcattgagggcaattgatcactcactgtcactgagatccataattaattcccttttttctcagccgcccatccgcaacagcgtcgcccgtacgcgtccccttccggcgcagggagcgcaggaggaggagtcgccttcttcgaccagttca

SEQ ID NO: 28614 - DNA, 799 bp, Heterodera glycines
ctaatgcaattaaattatgcaattgcttttttgagtaattattctttacacaatgtaaacgtttgagtaaaattaaaatttcataaattttatttcttttttctattaatttgattaatttttgaattgtgcacaattcgcttttagtaataaaaattttgaattactatagtaaaaatagctaaaacgaaaatcggtttttttaaagaactttggctttaaaatgcaaaaattatctgcctatttcgtacatttcaaattattcaaaatgacgaaaatgcctaccattttgctgctgtgctcaattttaatcatttatcctctgccatctttcactccttttcttctccctctcgctcttccccttcctctttccgcttctcttcgttttcttcccccttcttcccttctttgtcttatacacttttctgtctcttccgcttttcttccctctttgtcttccctcctctttcgctatttcttcctcttttcatctcttcttcctctttccctttctctttatcttcttccatcttctctctaccattctctcgccttccctctaccccctttctcctcttctcttagttctactcttaggaaatttgtatgtcataacgatttgccgtataccgtatatactctaattatcccactgtctccattacataaaatcactttcttcaccgggatccgaacctgacccacctccccctcagaatgatgcctcagaatccccatatatgcagggattcggaggccttaacgaagtcctaaccaatatctaattccaaattct

SEQ ID NO: 28615 - DNA, 1179 bp, Heterodera glycines
  unsure (1)..(1179): unsure at all n locations
tgtttcttatcctatcactttccctttttccttccgtccctctacgtctcatatttttcagntcccctttttcccacctccccccccccccatttacaccaactgctggcggaatcacaataatatataaagggcattaactggcaaattcggccaattctttcacgggcgtactttgagtttgcttcttttcttaaattgctaatcaattcatcagctgccaattgcatcattctcatcgttgaagctgtcgtgggcagaaggggggggggggaaatggtaatcggtagaaaaatgcgcagaaacggaaaaagagacagaccaaatgtgcaaaggcccaccctttgaaaaaataaattttattttgttaaagaatttgccgtgtaaaatacggtattacttatctttgtcttttttttcgaaaaataattaataaaaaagtttatttaaaaaaagtaaagtcagctaaatttattcaattacgatttttcctgctcaatgtcagaattaccccccccccctaacatttattggatgatgtaaaaataacacataataatattggcatcgtttagaaggctttcccccatggtaaaacatgggatgagaattgattgaggttggaagtgtaaagttgtggaaaaaattcgcccttttttgctgttattcttctcactcgacggaaatcacatacaatgccatttttaatctgaaaaagtaacgaatttttgttgccttggagcggtggggcgatggcctcccccccccccccccccggaagcgcccctcagtctccgcccctttccacttccaattttcccgtgacccatcacgggaccgaccatttccattgggaataatgggcattggagcagcattcgtaaacactaaacagcctttcccctccctttcccccccccccgctcatttactgtgataatggcaatggatgtgcaagcactacaccaagcagaagagaaaagaggaggaggagtagtatcattcattcactttctgattcacattggcctcgccattccccaccctttttctgccatttttcctttcctcgacattttcccctcccattgcccccctcgccttttccggtttcataccctcaagggatgtgtgtgatcgccaaatcaaacgtaataagggacatgactcatgaatcat

SEQ ID NO: 28616 - DNA, 245 bp, Heterodera glycines
ttcattttctatggcatttctttccgcagttttatactgctgccttttatttcattttgattattgttagctcgtcactgttgccattacaaccgacgcgatgagatgagtgagtgcgtttatttttcgggccaattattaaataccatccctcccctccttttctcccctccccctgagtttggtctcccccgcgctccctttgtcgtgtccgccgtccgccaccccattccgcttcatccctc

SEQ ID NO: 28617 - DNA, 729 bp, Heterodera glycines
gggcgtcaacgattgggggcggaagcgcggaagtgccggagcaggacgcctgcggcatcagtgtgccgtacggcgtcgacgcgggtcgctggtggagcaggtggtgggaggcgtgcgggtggccaccgctcaaaccgccgccgccaccggtcatcgggcttgacctacggcacacaaatggtggaaaaattaaccgacaaaaaccaaacaaatgccttttaagcctaattaggacacggaaatggcacccaccctgattagtcggctaattgctattttcggcccacctttgatgctccaatccgccggtgccggcagtgatcgatgcgacaccgccgccgccagcggttgtggtggtgaccattgaggcggaggcgcccgagttgggcgagtaggcgccagtgttggccaacacggaactgttgaacacggacggaacgccgcttgggcccacgggcgaagacgaagcgaattcctggggaaaggtggcacaaatttatggaaatgtggacacattccaattcaatcccacaaaatgtttcgttaattattctaacattgtaaaaaagctcgtcgactgtttgtttcattttgtggcataattcccgcctcttagcaaactatttcccatttctctaatgccttatttgttagggatttaatgccgtttttttcttggcctttttaccaaaaaaaatttttgggctaagggtttggttgggtttggga

SEQ ID NO: 28618 - DNA, 1241 bp, Heterodera glycines
  unsure (1)..(1241): unsure at all n locations
gatccgtttcaaaaaattaaaacgaaggggagcctttaggtggtggtgttttttggcacatacaatgttttttaggacataaaacctgctgttgatcaataggaaaaacacccctaaaattggaaaattttctcaaaaattcatccctcaaattttttttcttgcaaaattttggattaaaaaatgtcgatattttctaagaaatattagaaggaagtgtaacctaatttgcaacagcaaccagtgaattaaaaaaaattttttgctcaatttttggctgaaaattatgccaccactattcgtcactatttcaaacttatcgccactattttggcatttttttttgtcactatttagttaattattttgggtttttgaccactaaaaatccgggccctaatgatcaatgatctcaccaataaatctttttcaaaagaaaagtcttttgccaactttggatccgcatcaaatcgttcgtcccaaaggaattttgcccgtgccgtttttcccgttttttccacctttcccatgacccctcccccttaatctccgccttcgcccttttatcccataaaaaagtattctccgatctcccgcccctcgcctgaatttctgaaaaaattactctttttgttaagaaatttcattaaaatctctagtttgcccctggcggtgcctaccggcccggccccaaaattcaccaaaaatcgcaaatttatggtcaaaatttgttaacaagttcggcccaaaattccctaaaatttcctgcgttgcatacctacatcgcctctttacccgtgtactgctttggctaaaaatttaaccataatcttaaagagatgggcgtgggatttgcccagcagtccgctttaagtttttgagcaatttcacatattcatttttatgttttgctaagcaaattttaaatccgtcgagaattgtcttaataattttcactcaacaaaatgtcagacaatggaaaagaagcggatgaagagatggcaaaagcaatgtaaaaattaaaattaaaatgcccattttcaatttcaattttaatttttttcctttttcttcagttttatctccgccgattgttggctcaaagtgtttgaattgctcccgccttctcaacttggccttggaattgcactgatcagccaccgatttgacgtttacgtggacgaacacttcaaaacgcgcaaaaggacattgngaaatattcgaattcaacgcaaaattgg

SEQ ID NO: 28619 - DNA, 558 bp, Heterodera glycines
aaaaattggtgttttggaatttgttgcggacaggcggcaagaaacactgtttccactgctccaaaaatgtgtcaggggtggctcaattatccattccgattccgcctcaatgtgtgtcaatctgcgcgcaaacccgccatgcagccaaatagtcaatatctcaaccgtgccaataccgacttatcagcatatatgggttaaccatacggaaaactatcgaccccgcgacgggtgcttgcacaaatatgtgcacataattaatgggccaacaaatttaattcatctcgcaacagcatcagtaatattcccattctgttttggtcattccattcattttcaacattcgcgggtcgttcattgcctttccgcgggttggggtcagttccatactgccgtttccatgccgccgtttccataccaaggtatttaggccatttccataccaaaagtttaaaagacattgaaattaaaaatccaagaaaaaataacattttatctgtttcaaatcacggtctcatttcataatttcgagaaattccgatcaaaaaagcaataata

SEQ ID NO: 28620 - DNA, 841 bp, Heterodera glycines
cataatagcaaattaatcttccgcttcggccttttccttcgcctccaattgcttcaaatcctccttgttcttcgtgactatttcattggctaattctgcgaagcatttcttctggtcctgaattaaacaattaataatttgtgaagactaaagcaaaaaaaaatctctcattcaatgagaaaccgaacaataccaactgttttctgctctttttttacctcgatctgctgaaagtggtcgcagagtttcgtgactttctccagcaccgccgacaacaattcgttgtattgtgtgtccaaacgatttttgtagtccaaatactgttattaaaattcgaaacatttaatagtctatcactgcgaatgcattttacatttttgtgcttctcggccaattcgtcatggagtttgcccaatctcaggtcaattttgcccagttcgtcgacggtggcctggtgtttctgtctgatcacgtccaaactgtgcttcgcgtcgaccaatgaacgctgattgtccccaaacttgcgcttggccctctccagttcaagtttgtgctttgacagaagctaaaccaaaagtcaaatattaagggatttcgtcgcccgaaatttgcggactccaaatcgaattaaaaactaagtttttttcaatccccgatcgcctaaacagcattatatatgtgaagaaagtgattgtgtctaataatttgatagtcagtaaatttttgaaaaaatcatcaattattcaaacaataaatagaattaatgatcctaataaactagaagattgtgttttcttaattttaataccgcttaggccatacatgcaaaaaaaaggggggg

SEQ ID NO: 28621 - DNA, 1323 bp, Heterodera glycines
aaaatttggggcgattgaaatgagaatagaaagagccaggttcgatgaagttttgtaaaccaaaaaaaaatccaaacatttttataaaaaattaaaaatgagaattcatgcgagattttctggaaataagcttaatagggcctagttaagctgtaaaaaaaatttggagcgatttgaatgagaatataaagagccaggttcgatgaagttttgtaagtcccaaaaaaaaatccaaacatttaaaaatctataaaaaatttaaaaatgagaattcatgcgagattttctggaaataagcttaatagggcctagttaagctgtaaaaaaatttggggcgatttgaatgagaatagaaagagccaggttcgatgaagttttggtaagccaaaaaaaaatccaaacattttttataaaaaatttaaaaatgagaattcatgcgagattttctggaaataagcttaatatggcctagttaagctgtaaaaaaaatttggggcgatttgaatgagaatagaaagagccaggttcgatgaagttttggtaagccaaaaaaaaatccaaacatttaaaaatctataaaaaatttaaaaatgagaattcatgcgagattttctggaaataagcttaatagggcctagttaagctgtaaaaaaatttggggcgatttgaatgagaatagaaagagccaggttcgatgaagttttggtaagccaaaaaaaaatccaaacattttttataaaaaatttaaaaatgagaattcatgcgagattttctggaaataagcttaatatggcctagttaagctgtaaaaaaaatttggggcgatttgaatgagaatagaaagagccaggttcgatgaagttttggtaagccaaaaaaaaatccaaacatttaaaaatctataaaaaatttaaaaatgagaattcatgcgagattttctggaaataagcttaatagggcctagttaagctgtaaaaaaaatttggggcgatttgaatgagaatagaaagagccaggttcgatgaagttttggtaagccaaaaaaaatatccaaacatttaaaaatctataaaaaatttaaaaatgaagaattcatgcgagatttttctggaaataagcttaatatggcctaattaagctgaaaaaaaaatttggggcgatttgaatgaaaataaaaaaagccaggttcaatgagtttttggtaacccaaaaaaaacccaaccttttaaaatctataaaaatttaaaaaggaaaattcctggcagatttttctggaaataaatttaaaaagggcccaagttaaattggaaaaaaaatttgggg

SEQ ID NO: 28622 - DNA, 1441 bp, Heterodera glycines
tgcctgatgaattattgctcgtccatcgttcaccgtcccctgccgattcctatcatagccaatctcttaaaaatacatccacttcttctcattgcacttctgctgcgccttcaaattcttcacccataggtacagtaacatttcgtacgaatttgaattaatccaatgagaatgataccgtcactttccagatgctttttgaatgtgattatgatttctccatttaaatttcacacttatttcaaattaatttgtagtcactcgtcaaaagtttgacctgccttcgttgtccgttgaccagttggtctctgagcagaaccagcaaatcattgggcccgactttgaacttcatcagaatgtcagtgtcactgtcagaggagggaaaagcaacaatggagaccaatatttgatcaggtgaaagcagcatttagatgaagttaacttcattttagctcattccaagaggcaaatttgtcccaacaaattctccaaaatttggcccaaattcgtttcatccgtcccacagttgtgcaaagtcgcatcattccacttattatgcggacaaatggttggccaatttgaagcaaaagttgaagcaaattctgtccatttttagaggatttgctgtgtttggcgtccaccggcacgggaaagaccggcgcctttctcattccgttgctaaacattttgcacatgttttgctccatcaaagagcttgggaatcttctctttccagtcaatcggcactttccgaaggcgattatcgttgcgcacacaaaggaattggtgctccaaatcgacaaaatggcgcgaatcctcgcagacggtgaattttgaaccattcattccaaatcaaattgcgtcgtctttgtttatccttttccgtcgatttgcagggactggcgttggcattgttctaatgatgggcgagctgagctacgcttcgatcaacagccgaatcaaccgggacggatgcgatgttttggtcgccacccccggccgactaaaggaatttctcctgaagaatcggatcgaattggattgtctgcagtttttggtgatcgacgagatggacaaattcttttcggtgtttttgcctttgtttttgatccgattaattgcttcttcatttttaggactttgaatttctgcaattgtttcacgaattgaacgaaaaaaagagacaatgcaaagtgacaaatgttttgtccgcttttatttttccactttttcagagcaccgtttggccctttcgtacttttttgttcagtgccacttccgattccctcgacggcgtcgttccgttccttcgccccgatttcttccatgtcatcgctgggccggtcaaccaaagtgttgcgcacgtgcgacaacgcatcatttcgacaaacattttcatgcgaatccatcaacttgagcttatcttgcaaagagaaggtaa

SEQ ID NO: 28623 - DNA, 1543 bp, Heterodera glycines
gtccattttcctaaatgtgctcttgctgtgacagaaaaaaagtaacatttggaaatggtaagcccatcaacagtccaagcatggcataatggtcaatggatgttcaattttgaaacaaaaaaagacaacaacgggatactgtataagaatattaacacaagacgattggacgggattggatgataatgcttcaatcgatttcgtagataaaaatggaacggtaagcatttaaataactataaatacccaaaggccctgaaatagaatttttttttttatgtttaaatgtagaaaaaaaaagattcaatataattgaaaatttttcgaaaaatgcaaaatttattattcaaaaaccccaaaaaaataagtgggtgaattttgagataatatttagaggtggaggtgtattttttttttgttaattaggaatatgcgttgtatctttttgcatatttttctgcacatatgttatgaaaaaacggctcaatattagcatttctgcgtgaaaatttttttgatgctttggtttaacttttttattacatatgtataaatgtgcatatttttacattatttggttttaaagtatgtatgttttttcttagttctaaaaatattgttattttacagattaaaactatagaagtaagacagctgcgcgtaaaaaaagaaagtatattttacaccaaaccctaaaactcatatggaatttctgtctatttcaatgaacaattcattgttcgactactaataaattatgatgactcggtggataagaattatttggagatattgatccaaagcaatggctacaacgaaatcccaatgatatgattacattcaaacgcaatggaccttatggaatacagacagacaggtaggtagtaaatgaaaattataaaagtttttaaaaataaaattgaattgtgaaaaaaatgaggcaaattttctgttcatattttcgatgaaccctcttaaaacgtaatcaatgttgctaaaaataatgctgatttttcgtgctacttacctgggcaaatttctgttccatattacagacccacctcaaatttccaccaatgctagaaaataagagttttttggttgttgttgttgttgttgttgctgttgttgtttttttttttggcttaacacatttaatttgaaaattttgaactaaactaagcttaagatgtagcttattgaccaaaataaatgaaaaaaagccccgttttggcgctatgcgtcattttatcaaaccgaataatgaccagggatggtttaaaattccggtatggaattttttggttgaaaattttggaaaactggaatttttaatattaaattaaaagcaataactttggatgtgttaatttgacacacttaatgcaaattgtttcttaaatatagtaagaaaaccagagcttctttcccccagaattatgaattattcctgaatttttcattaagcctcaggaaccattgaccaattttgtataattgtcatttattaatttttttatgtgctgggcacagctaccgtagc

SEQ ID NO: 28624 - DNA, 1246 bp, Heterodera glycines
aaaatttttaaattaagaaaggaaaagggttattaaatattttttttaaggcaggatcaaaaaatgggtttatccaaaaaggaatagagagggttaaagcagctaattccaatatttttataaaaacaagatttatttattttttggtaataaaccaagtaattatcgatcccacatcaacaagtttattatacaaggctgttgagctcttatgttaactgcaaagataagaaattcaataaataaatattaaaaacagtaaaaatttgaataaagataataaaataagaattatcatttagaacttattaagcatctgttgagaagaatcgctgcaataaacaaaagaattgagtgtctaaaggtaaccaaagcaataaattattaaacaataaacctaaaaaataattattaaattttatggtcgattcagttcattaattaatatggccacttatgcattttaaaagtgaaacttaaatattatacaatgataaattatcagcctttaattattggtaaaatttaatatttcaataattaaattttgaattttttaaaatcaaattatgagtggtttttgtgattataaaattatttcaaagaataaaaagaaggttaattttaattggtttgacgatggctgagttgaacacggtctgtgaattggaatggcgaattttcgatttttctcaaatggttgaaggccgagtgcgccacccgaaaagttacgcgtggaaaattttggccatggcggtaaattaaatttaaaaaattcaaaaaaccactgcaattctaaagaagttttgtcggaagatgacacggtcggttggctggacacatcagttgtatttggcagtgacaatttggcgtcaattttaacacaaattcaaaatggcaaaattggcccagttcaactgcttagcagtgagtgtgaaaatggacaaatttttaattgttttattttttgaaaaatcgttgttaaccttaagatacttggcacggcaaaaacattgcgacacatccgagtacttattttaataaaataatttgaattaaaacgcataacaaatcacaattttgcccagggatgtacgattatttgccaatggtcgccaattttgggcccacaaaacaaacaaatgatttgtcagggaaagacccgccacaattcgagtccaactttgtcatccttcataaaacggaaaatacgcggcaactgatgaaatggttggtatttattctc

SEQ ID NO: 28625 - DNA, 938 bp, Heterodera glycines
  unsure (1)..(938): unsure at all n locations
aattatatatanctgacaagttttcgtcattgtcatgcacatataaattaaaaagattaacaatgttcatttcttcgtttattatattcatttcttntaaaatcaattaataaaatagtaattgccaatactattatcatttaaaaatattcgaattttttcactattcttctacatatatatatattaaacagaattaatttataattaaaatctttaatggacttatgcaaaaaattgatagaagaaatttatatttaattttgattatgttctaaaccttctgggtattatttttataatttgaaataaagttctcgaccatcttcgatttaattattactagaaaaattttaatgttgttattgcataaatttttattattataaaaatgaattaaatttatatatttttataaaaatgtaatgtcgtttaaataaaaacttttgaatttatataaatttatttctgccttttcttaaagaaatgtttctagataaaaactataaatttatttttttaaattaattaatttattctcgaacatttttattttgaatttcaaagagaatcaagagatttagaatacatagctgctatgttcgacgaattaaaactgatttaaaaatacaaaagcataatagtttttaaaatataaaatcaattaaaattactttatacgactttaaacatctaccaattataactagtgatacgatttaggtgctaaaaactgccaaaattggtaggtttttggttctaaaaaacccccaaataggtgctaaaaatgggaaaataggtgccaaaaagttagaaaagttgaaaagtaagacctctagcaaaggaaaactttcgtaagaaaagcttgatgtagtagaaatattatttttaattgaattagtattttttgaagaaattgctttgaggtctggtacaat

SEQ ID NO: 28626 - DNA, 1021 bp, Heterodera glycines
cctctgctcgtcgatccttcgcttcgcgtccatttgtcttggccattatctcagcgctccatcgccaataaaattgctgctttaagtgccatcggaagaaaaggaatttgcatcttttctcttcccctcctgatgtccctccggccctcttctgctcttcatttcctacaattggatgactgcgtctcttccgcccgttttcccttctctcctgctgatcatgtcgaacattaggcttcacttcaaccaaacccctattataccccacccaattagggaaatgaattctattttgttaattatttccctatcaatcgttttagcccatttgaaatccaaatttgcttctgatcaccagccaatcacccgccattcttcgaaaaaacaaaaaaccgcgcacgcccattcaggtttaggcgtaaacccccaatttcctgccaatcctcacatgcaaacccaaagtcatttttccagttccccaacttcgcactgtcccctgaccacgcactgttccctgcccaccaatcaaacaagcttcgaaaagccccgtcgactgccctccccaaagtgccattcaggaattgtcttctgcccaaaggtcagagaaacataacaatgtttggcgaattttggtacaactaattttctgcctcagttaaactcacatcagcaggttttgcaccccatctcatttatgtctgtttgatcactatcacttgatcttccaatggtttctatcgtacattttcggcctcacaaatttgttcctcgttttctatcatacaatttttccatcgcaaattcattcatcgttctcctcgtttattttcgtacatttcagcaacactattagtacatttttggcatcataaattcgttttgcgttcgtttcgcatattttcagcaaaaaactaattcgttcctatttttcgtatcaattcaaaaacaatttgttattttctttctccacatttttgtactaattcaaatcaattcgccaattcgcactacattttcggac

SEQ ID NO: 28627 - DNA, 958 bp, Heterodera glycines
  unsure (1)..(958): unsure at all n locations
aaatcagcagagaaagaaaagaaaaaaatttggccatctttccctcttaaggcataaaagcacaaatgacaagcaataattgtaaaagcccaaattgattaataaaaacattttcccaccaatttgccgctttttcgcccgccaatcgagtgcagttcagccgcgtctgttgccccgcgccgatcccaataacctgaacatgaaactggtcaactgctaattcaatgataaaagcattttcgggcattttcactaatggcactttgccaatgccattcttttcgcgccctttcaaattgcttttgtttgactgatcattgacctgtcctcggtgcgcaaagcacaccgcgttgctttgtgcgtattttaccgcaacacaggcgacctgaaaaagcgtagaaaaatttttgacggttattggcattttgattcactttccctaaaaattcaccagcaaatcgtccaccgtcgaagcagtgatttcgtcgccgtctccgaccgcaacatcggcgaatgattctgcggagagaggcgccgcgttgcgcttttgcttcagcttcagaccaaaaactgtgcgaacttcgtcctctgccggcaaatatttggggtcaatctgaggagggggcggggagagaaacatatcgccaaagggcgccaatttaaaaaaaagaacggacggaggaaaattggcaagagaatgaatgaatgcacgcacaccttcagcaccacgtagttgccgttcttcttcttggccaacatggacagcgccgcatcgtcaaagtctggcgcaatgactccgtcgctgacttcgcggttgataatgcgcgcggtcagctcatcacagcgttgngacagagcgatgaaatcgctgaaggtggacatccgatcggcgcctgggggaaaacgcgcaaaaataataaacggaagaaaacggcacaatcaaaaacaaacaacaaaa

SEQ ID NO: 28628 - DNA, 186 bp, Heterodera glycines
tgccggccgcgccgccccagaagaagtcgcccgtgctgccgggaatcaacgtggcggcttgcgagatcgtggtcgcgaaccccagtccgaatccgacgccgtcatacgcggcctcgctaaacatcgaaggtgacgacaggctggacatgtcgcgcccgcccggcaggtggttggcggtcatcagcg

SEQ ID NO: 28629 - DNA, 196 bp, Heterodera glycines
aaggaggtaatatggttatatagagaataaggggataaagaaggaaagaagatgtgagtaaaaggttaggaaaaggggaggaaatgtaaaaaggaagtgttgatggggttttttgataggttgtgttttgatgatgagaataagaaaaattgatgattaagtaagaggtggagaaatgtgataggagtataaagat

SEQ ID NO: 28630 - DNA, 952 bp, Heterodera glycines
ttaaaaaattgaaatttcaacaaaaatggcaataatttggggggggggggaattcctccctcccgaaaagtttaggctagtttttgaaaaatttaagaaattttcttctcaaattgcttaaattttccaaaaaaaaaattttttccctgcggccttaacagcattgcaggacctccattttacaaaatttttagcaaatttaattgcaattttggcattaattctcgagaaatatgtaactgtaggtagagatttttccctgaacatgttttttcaatacaaaatatcttagaaaaactgaaaatttttttgagtttgagaattttcagtaaatttactattggaaattttttttttattaaataataaattcgaaaaaatttttaattattttagaaaaagaaataggcgttatttttccgctaccaaacaaattatttgtgaattaaaaaatttttcatataattatttattactctttgataaattttcttttaaaaaataatgaataaaattaattttttttattaaaaaattcgtaattagctgtaaatgcttttgttcatttattaaaccaaaccatcaacagtttttctcctcatttttacaaattacacattaatccaattaattgttgttctccattaattccgcgacatacattatcccgtccaatactttacgaattacacaaaaaacttccaattttcccccgattaatttgttttgccaattaattagagtaattagtaactattttgtcgccaaatgttcgttccaaaaattggttttaaatgattccgacagctttcatttccccgttctcattttttgcttttcaaatttatttttatagacattatttaacatcatcattttaagaaccgagtgctgatttgtgagcacatcagctgtttatggccacttttcatctcgcattttttctgcatca

SEQ ID NO: 28631 - DNA, 862 bp, Heterodera glycines
tagactttacaagttgagcagccatagaatgaattgatgatcattggtcaccggccagtgataaaaaatttttaaattagtttaaaaaaaacagttaactttttatttataaaagctcaaagaaattttctaagcttcagagattttttgaaaatttttgtagaaaattcagtggtaatagtgttctttgtccccaccccatccaccgtttttggtaataccggagaatctgtactcgatataagaaagctatttctgaaatattcagtatccccataaatctgggcgtatcgattcggggggactgccccgaaaacaaaaataaatcgattttttcaagtgtccgtttggggtactcaaacaaatatggggagcaacaatccatcgcataattaaagtacaggctatagggaatctattccggaatgattcggtctccccataaatctgggcgcatcggttcggggggactgccccgaaaacaaaaaaatcgattttttcaagtgtccgtttggggtactcaaacatttatggggagcaaaaatccaacgcagaattaaagtacagactatagggaagctattcccgaaggattcggtctccccataaatatgggagcatcgattcagggggactgcccctaaaacccaaaaaaaaattttttgtataaaaattatttaaatgaactgactatataatatttaaaataggttatttctcttcctttcagtatccctgcaaagctaggcgcgcttctgatcagattctgaaaaaaaagttaagactaaactttatgtcctgtttacaatggaattaaaaatttttaaaaattttattcatctttcgaggggactgccccgaa

SEQ ID NO: 28632 - DNA, 1391 bp, Heterodera glycines
cgtttttgggtttttcatctggttacgcggcttttttttggaaagaatttctccagcaattaggacgatcttaattcttcgccttaatcagctattacgaacaattaagtgggacacgagcgaagtccgttctttctatatctttttccgggttataatttattaattcagttccctccgtccgaccttctcgacgagattaaacaacgctcggattttctcgccaactcgccaaaaatactcgcaaaacaacgagccgaatacatttccctttcccggcctgctgaccttcgcgtcgtgcttaacagactcttgcgcactttcaatatccgtcagattttgagttttaaaattttaagtgggcctttgattgaaatcgttttctaaattacacaatttatttactttactataatcattcactttaaaataaaaattatagcggaggaatatgtcaaattatgcttcgaactgagcaattgtgcggcacaaagtttgggcgccgattggctaaaatcgtcggataagcaattcctgcgtctgttggccagtctctccagtggtcgtcttcgcattttgttggataaacctgaggaggtctctttttatactacgattctttaattgtcgacgtttaatttctcagattgacatggctcagctcatcgcctgtcttcagctccaggaatatttttgcggctgtgttgaggatgaacagatttggatgagcgacgatgagcaagtttttctgtcatttatgaagcgagttgataaaactgtcgaaagtagtcccccacctttcttcgtaaaaaaacaacatataaaacagaaaaattcagttttcaataaaatttcacatttatgctgcaaagcaattcaatgattattggcactaacaaaattgagaaatatgcaaccgaaaggggtgggggctacaccataggcactgttaccgaacataggtgaacaaggggtgcaccagggcgaggccgattggcgcagggtgtgtgtgccaggaccaatttttcgtacgaaggcccccaattttctccagcggcgacctttttttttttgctattcaaaccaccttttttgcggcgcgctttttccaagaaacttttggggaagggggtggcccccttacaacgaacgagggggggggggggggagtgtgccaggcctcttacgacgaggggttgtgtgccggcacaccccttgttcacctatgttaccgaaagttcaattaattcttatggttattctttttcagtgccactttcgtttccaaatgctgtcaagaagcagcagcctttgtctgttcttacacagccgcttgtgcccatcaattgtccgacatcacttcgcaaatggatcttttctttgtcctttat

SEQ ID NO: 28633 - DNA, 1330 bp, Heterodera glycines
aaattaaataaacaattcgaaatagggtttgggaatttgacctcaaacatacgggaataagataaagcttcagaatcaaagccctgaaagtggttactgaaacaaaagcgccggtttttctaaaagtcaaaaagcccgagatttttactagccgagactctcgagcacgaaggtcttataataaagtctttcatttttattttcaattttcctttttgttctctaggtttagtatgactataataaattcaaaagtcattaaattaatacaaatgccacttttttcgtggagtggcttctggcattctttgatgaaaccattaatacggcacagacgcgtgaatgttcatattggggttgtcatcctcttccctaagcatatgataaagtgcatttattgttatattccaaacaaaaatttaaaaaaaaaaatttcggcggcgaaattaagtcccggcaaaatttttggatgcaccagagtggacataggaaaaacaaaattctttagaatttcaaaaaaaaattttaacaggcagcgccgaacccccaaattccctagatattactagatcgaaacataaaaattgtggtttttgtcttgaaaacggcttaaaatttttgtctttattcaatgtaattttgactaattttctactgtaaaaacgacaagcttcactataaattggtttttaaattcgattacccattttatccaaaatgtttataatttttttttaatttttcggggggaaccgtaatgcaccccaaaatatttgctaaaaataaacaaaaatgttttttaatttaaaaaatatgataatttatttaaaaaaatgttttgttaaaattaagaatttctcttttactttattttcatgatctcatcaaaaaaaaatttgaaacttttttcttcaacaaacttttttaaatttttttgttttaagacatttttctttacaaatttttatggaataagcaaaaacatatgccaaaactaccaaatcgaaaattttagcggtgaaaataaaggttatctgcaaaaaaatatactaaaaaataacaataaccccccccccccccacattgtcagatgactacgacgagttggactttagcgtgttctctctgctatttgatataattgtatgcgcctaaaattttataaaaaattcatatgcatttcccacttctctccgctatcctccccctcatgtatttcctgaaaaatccttccgtattgtcaacttaattaataacaaatcttaaaaataacgacaaatgcacaacccatgggattatttatcattagggtatggaatatatattacat

SEQ ID NO: 28634 - DNA, 982 bp, Heterodera glycines
ccttaaaagatttcaactttaaaagtttcaaaaaatattcggcaattgtttggaaattaccaaaaaatttggtaatgcacaataaattttgaagaaattgatagaaaaatactttttttttaaaaaaaaattttcgacggggggagtttcccgaaacaggaaaatgaaagattccagccaatattgttcgagtttttttttgccgtgttctttagtgtttttcccccatggggaaggcgtatgttccccgagtgcgttgtgcaccctccttttcaattaatttggatcagattttcaccaaaaaaggccgattttgggattttgagccaattgactacgaccatttttgacaaaaattttttggttttaaaatttataatttttaagaaaaaaaaaatggattttaagggtccggcggcagtgtctgtaggcaccgtcgtggaaatttttttttgttattttaaataatttgcgctaaggaaatttgttcaaattttgaaattatgtttagcctatgtcggtatgacatgagtaagagaattgagcattcaaaaatttagccattttacttttaaaatttcatttttttgggggggggggggaggaggaggtgaaattcgctgccctttcccccagtgattattggtgtgttctgtgtccacaaagtgccaacctccaaaaagtcgggatggctttgcgcgagcagccgattttgcctgccccgcaacttgtccgccttgctcaggggccttggttctgaaaacaatattaatgtagaaccatgggtacttatatggttcgtacgccacaaattttaaattttttttaatcatcttagattgcttagagtcatttatatggttttcagggtcgctgaacacgattataacatatatttagaccaatttcgaaccccggaaacggattcgacctaaagtcgaaatcccccaagaagtcgaaaattcaaactttttcaacaata

SEQ ID NO: 28635 - DNA, 953 bp, Heterodera glycines
  unsure (1)..(953): unsure at all n locations
atttttttcatttcaattgggacaacaaaaaaaacttattttcattttaaatgtctgataagaatcacttaatattagcccttttaattcatatttcagttgatatgaatatttcattgtgtattcttcagaatcagcaatcggtttgagcattctttcttcgtcatattttaccaattttaataattctaagtttttttcaattaattattaaaattaaattaattgctttttaaataaattctagtttgaattgttttgtttttttgttttctaattttgattcagcctcctttttagatgaagttccttctacaattactttatgtaataaaaataattacattttatgactgttgagccggttaattgctcaaacaataatttagaaaagtcgaacaccaaataaatttattaacacaaaaatggaaaataaataaaacaatatttgtcggaggaatggagcagaactgggaacatagaaggaaggaaaacacaatgaatgatggactaagggaagggaatgcaataaaggggaacaatcaataattggggtcaaagatccaaagagagggaattacaaatatttgaataatttgcctctctaacaatgacgaattaagaaaaatcttttattatcattttaattttaaattaaatgtgaaaaaacgttttttctattttttcattctattcttgtaatatttcttcaatttattccggtcccgtacgggtcaaattatctaagcccggtcccggttcttttcaaaattccgggctctattaggtatttcaaagggattgatattgaatttttgtatatatttataaatagaattttatcttgatttttctttttgtggcagtggaattgaataatggacgtaattgattctatttccatgacttncactatctttttcattataattntatatggcatttactgatgg

SEQ ID NO: 28636 - DNA, 1177 bp, Heterodera glycines
  unsure (1)..(1177): unsure at all n locations
aataattttgaaatttgatgcaattaaagaaaagttgaaggaaaaaataaaatacaaaaagaaagattatgacaaaattgaaagaaaaattgcaaaattattaggagcaaatctgcaattaatacaaaaatggaaaaatgaattaaatttaaataaaaacaaaattaaaaaacaattatatgatgagaaaaagagtgaattcattgaacgatttgatgaatttaaaagtttatatgcccatggcaaacagaaagaatttgcgaaggaattgggcatttctgaagtgacattttggaaatggaaaaaacaaatgctgccaaatgatcataaaagtaagggtttttctttttaaacatataataattttctattcagaagagaacaaattaagaaagttgaagcaatattacgaaattaaagaatcaaatccgaaaatgagcgacgaaataattgccaaaaaattgggaattggaagtgcaactctgaaaaaatggaaaaaggaatttgtttaaaaactgatcttttgttcttggaaaaaaatgttcgaaattttgtcatttggagaaaatctatataaaaattattctttgtttcgaaaacattttgcacttttcgtataaataaagaatgttgcataaagacgtgtcttctgttgtttagggatgtgcgagaaatgatttatttgatgagtttcgcccggttatgatctgtgccgtggacctctccatcattctgtagagaaaaactaaaaaatatacttaggaaaaaatcttattcgaacaaaaattgttgtgttttttgcagttttttttttaaacttttgcaccgcgtttttggttttggatgtaaactgaaactttaatttcactgcaaattttcttctttcattttataaggattatacctatttgcacacatcaacaaatgaaaacaagaaacaaataatatatatttaatgtttgagatgaaatttcttacattttacgaccgatatttctcaattattattatttttataatttagagaaattagaaaattggtttgccttanaatcgggttatctttataaaaaaacaagatatttttgtttttctttttgacaaaaaattgaaatatataaaaatggatacgacaaaatcaaaccaaattttgatggaatatttggccggggatggg

SEQ ID NO: 28637 - DNA, 1257 bp, Heterodera glycines
  unsure (1)..(1257): unsure at all n locations
gctccctnntatgaacatcccttgccatcgacccacttgcccgcgccgccctccattcttnggggtttaatcgattcaaatttttgactcttcncctcccattttttgacgcatggaaatacggaaaataataacgaaaaaaaagattcatataattttcctttaattttatttgaacctatttttttcctatcgtactctattttttatttaatttcacaaattttaaacgttgcttaggatagggctttctctttcaaataaattattattgtttttgttggctatttcctcccgcctccgcgctgctgcgcaatgattgcgcaaagagattaatgatgaacgaatcattagtataacgtactcaaatttaaataccacatacagatccaattttttgtttaatttccaccgtataattcgtcaatccccttttccctccaccatataatcgattcgtcattaaccagcccccactccctcccgcccagcaggtctcgcctcggcgaaaaaatgcatacattgattactaacaaaattaaactacctaaattgtttaccataatgaaaggtcaccatttctggtaggtttttcggtcaaatagttgttattttttcgattgagcataaaatggatgtaattttatgcaagttacctgaaagtccttcatagaaatggatgaaaaatatccaaaggctgtgataataaaacaggaaagaaaatatttgaaagctgtgaaaaagaggcgaaaatatatctcgaggtaatgaaaaaatgagaatttgtgtaatgctcaaaaggcatgatagtaacaggaattatgggtgaaaatggatgaaaaaatgtgaaatctgtatcattgtataatgagataattaacgatattatgtttaccaattgtgataataaggtaatgaaattaagtgaaaatgctgtcaaaacaggtgaaaaagtcaacatgtcaatgtgaaaaaacataagaactcaaaaaaactcaaagcaggtgaaaaaagggcagaacaggtgaaaaatattgtcatagcaggtgaaaaaaaagggcagaacatgtgaaaaaatgtcatagcaagtgaaaaaagggcagaacagttgaaaaatattgtcatagcaggtgaaaaaagggcagaacaggtgaaaaatattgtcatagcaggtgaaaaaaagggcagaacaggtgaaaaatattgtcatagccggtgaaaaagggcagaacaggtgaaaaataatatgcaacatgt

SEQ ID NO: 28638 - DNA, 1372 bp, Heterodera glycines
cacagaacagtgcggccgggggagccaactttttggtctttttgggtcacgcttttgatcgactttttggcagccttcggtttttggtcgtccgccgattggcgttccgcccaattgttcttcggccctctcccaaatggcttcttccggtgcttctcctctgtcctactccaaccctgacgagtcgctaactccgtcctccaccaatgcgtccacaccaacggccacaaatggggcgacaacaattgtagggggacaaccgcacaacggcacaagcagcaacatgggcaatggaacagcaatgcttcaggggaatttcgaagtaattggcagtgccggcggaattgcgcactttgcgagcagtgccggcggagagtcgaactgctcgagcagttcaagttcagtggttgtgcacaagggaaagaaaagcaaaaaggacaagtcggtgagaaaagggagggaagggatccatgggaaaggcattccccggggacaaaatcgaaatgcaatcagtgagtgatttggcaggcacagcgagtgcggacagtgcttaaccagaatcagctgaggatactgaagcagacataccaagggaaccaaaggccggacacgaacaccaaagagcagttggtggagatgaccggactaaacgcgcgagtgatccgcgtttggtttcagaacaaacgctgcaaggacaaaaagtgagtaggcgaaaagtgccgagaatttccatggcattggcacttttaaaccgttgggccaacaaatgctgttaatgaaattctattccaagggttttcagaaggcaaattgaacagcgcgagaagcagcaaagtcaggaaaaggttggtgaaagtgtctccccccccccccaattgaggcggcggtcggtcggctcatttttctctcgcgcccgacgattgttttgttttcttttcctttgtttttgactgtccgccgccccgtgccaattccatcgcatttcattcattcatctcctctcaattctctcattcattctctcatcccattcattttcattggttcggttcactgattccttcggccattggtgaatttctgcgataatttgattattaatggacggcggtggaagcccaatttctcccactcttccgcctttaccctttcatcggcgccaccaattaggcgccatttgcgccgcccaaaaattatgtccgaattggaggagggggggggggggtgagaggaggtgtaatgggagcggagaggaaggaaatgggaacaagaatacatccaggatgaggagaagaaggaggaggaggaaaaaatgagttggtaagagggagaggagaagaaatgcaggggatggatgtaagtgaaagaggag

SEQ ID NO: 28639 - DNA, 2192 bp, Heterodera glycines
  unsure (1)..(2192): unsure at all n locations
aattctgaaatagttaaacggaaacggttttaaataccaacgtaaattctgaaaatagtcggtataaaaatattaacaaaattctggaagcaattaacgaaaaccgttttaaaattttaacgaaatttttggaaatagtaaaatgaaacggtttgaaatattaaaaaaattctggaatagttaaacggaaacggtattaaaatatttacgaaaattctgaaaattgttaaatgaaaacggtttaaaatattaacgaaaattctggaacagttaaatgtaacgttttaaaacattaacaaaattctggaaacagttagaaacgtttttaacgaaaattctggaaattgttaaatgaaaacggtttaaaatattaacaaaattcttaaatagttaaaaggaaacggtttaaaactttaaatattaacaaacttctggagcaattaaacgaaaaccgttttaaattttaacgaaatttctggaaatagtaaattggaacggtttgaaatattaacaaagttctggaatagttaaggtattaaaatatacgaaaattctggaaatagttaaatggaaacggtttaaaacttcaacgaaaattctggaaatagttatcagaacataggtcccaaaaaagcagtttgccacaaattttattttttcttgtanaatggtgacattaatctataaaatttncaaattatgagtatttttatganatcagaaacanatttggtcactattttattgattcatattattctgacattaatcctataattatatttatccattcaatttttacagtaaattattattcttgtatcaatgaggtatttcatcaattgctctccttcaccgaatttttgcaattcgttaatcctaaatttgcgaatagttttagcataaatatgaaaaaatcttaaaaaatcatattgtataatatgaagtaaacgaattaaaagaaatcttcaaaaaattttaaaaaaattaacatttttattattttctattaacaagtaaatttaaatttcttttctatgaaatacaaacaatcaaagtatttaaattttaaatatttatgaatattttcataccaaaaaattaatatcatcaatttaaatgcaatattttacccataagctctataattcaaaaagtagtcatggagcaacaaacgggatgagacgatcgaaaatctgcacggaataaagcgcgcgaccgcaataggcaccacacgatagcaaaacgacagagttgaatatataaataaatgaaatttttaacgattaaaaattcattatcaggaaaatgagtgtgaaacttacaactttaaattaaattaatcctatttttgatataaattatgatacaaaaagaatttttgttacaccgacacggtctcaaataaaacaattttgttttatttttcgaattaaaaatttcaaaacgttatcgtaataaaaaaatatttaaagttaaaccacattggtactattgaatataagaattgttgtttagtctttaaaaacttcaaagatactttaaaatttattatgcaataaagaaagaaaagataatttatatgtattttttatgcgttacatcaaattaaataaaaattactttgatgaaaataaagataatctaatatcttcacttatttagatgcattaatattcatgatgtttaatactgcgagattatataaaatagaataaaatcactaactaataattttatcctaaactcaaaatttattttaaattaattttccaaattttctaataaaaagcatctttttcttatattaaaaaatgtagcataaatatcatttatcgcgttaatgatattaccgtttcttactgctgaagaaatttataagtcagttaaaagatacaaacattttttcctaaaaataatgaaatatttatttaaacaaaaatgcgatagacaatcattaactatataaattaggctagaagacgaatgattgtagaaaatgaagttattattcattattaatcgatataaaaatattttttaaaataactaataatttatcaaaagcttcaaatttaattttaaactatagtttttaacgcttacagctcagaacgaacagctcaataaaaatagatataaacgctttaaaggtaaattatttatagaaaatatcggttaatgttttctta

SEQ ID NO: 28640 - DNA, 1301 bp, Heterodera glycines
ctgtgcatgagtgcgggaagtgggagggaattgttcattgtcagtctcagttggtggtgaagaaatggaaaaatgaatgggggggggggggggaaagaaaagcacggggggaatgattcatcttcaacactttcccacaccattcactcatccagcacccacaacaaacgtgaataatatgcgggaggagatgaatggcgatgataggagagggtaaaatgtacgaatgaacaaggaatttgtggtctgatggggtacaggttggacatgtgcaaattagggaagggggaaaggaggagtccttaaggaaaatgccaaaaaaagaagccaaaaatggcattctctccccccccccttgctcggccaattttacgtagtacgagcggaaggtgatcatttggtcggacaattggataagtggactgttcatggtcaaaagtgcaacatatgtccatgggcatggacaaaggcgaagcgactcaatgaccgaccaactcattaatataattgcagaaaaaaattctattgagcacctgaacaataccaattggtggacagcagcaggacaacacattgttcaatgtgtgtgaattggaatggaataatggagaatcggcaattggttgttgggtgggtaaatgaataaatgaatgaatgaaaagaatggggaatatgtaatgattgatgacgacgatgcactcactgaactgagagggaaatggacgagaaaaaagttaacaaacatttaatgaaaatgatttaactgtggttcgcaaaagatatccagaaatagagagtgatttccttcagctaactgcatacgacagagaagctgattccaaatgttattgttgtacagtagccgtcaatattctgactattctagctctccgtagcaaatgtcacaataatttgttgcatattgcctattgacattgcatgatcgcaatggcaataagtgatgtgttattgccttgccctcttgcagataattgacatatatgcagcagcgttccgcttgattggcgggttcgtgcactcaatacaacttggagcgaatatcccactttcatatgacacatctccagtctgagttatgagtaatgcttctctcaatccaataggcagaaaggcttacaggtgtgcggtaaacagcgggatgaaaacaggagagcgcgagagggaagttacagagagaagcacactggtgatggatatagtcatatgagatatagacgcatatgagaggagcgtggatttttgagagagtcatcagagggagagagcgaaaggaaaaacga

SEQ ID NO: 28641 - DNA, 992 bp, Heterodera glycines
tattatctagtcagttcatttaaataatttttatccaaaaaatttttttttgggttttcggggcagtccccctgaaccgatgcgcccagatttatggggagaccgaatccttcgggaatagcttccctatagtctgtactttaattctgcgttggatttttgctccccataaatgtttgagtaccccaaacggacacttgaaaaaatcgatttttttgttttcggggcagtccccccgaaccgatgcgcccagatttatggggagaccgaatccttccggaatagcttccctatagcctgtactttaattctgcgttggatttttgctccccataattgtttgagtaccccaaacggacacttgaaaaaatcgatttttttgttttcggggcagtccccccgaaccgatgcgcccagatttatggggagaccgaatccttcgggaatagcttccctatagcctgtactttaattctgcgttggatttttgctccccataattgtttgagtaccccaaacggacacttgaaaaaatcgatttttttgttttcggggcagtccccccgaaccgatgcgcccagatttatggggagaccgaatccttccggaatagcttccctatagcctgtactttaattctgcgttggatttttgctccccataattgtttgagtaccccaaacggacacttgaaaaaatcgatttttttgttttcggggcagtccccccgaaccgatgcgcccagatttatggggagaccgaatccttccggaatagcttccctatagcctgtactttaattctgcgttggatttttgctccccataattgtttgagtaccccaaacggacacttgaaaaaatcgatttttttgttttttgggcagtcccccccaaccgatgcgcccagatttatgggggggaccgaatccttcccggaatagtttccctatagcctgtacttttattctgcggtggattttttgctccccc

SEQ ID NO: 28642 - DNA, 2251 bp, Heterodera glycines
  unsure (1)..(2251): unsure at all n locations
gtgagtcgcgagcccatgaaccgccaatagggcaattagatgctcgatgcccagctaagccacaccgccagcagcaaaaaacttcatcactctgggggtttggaggcaccccttgcggttgctgtgcaatcagctccacaattcctggcgcaattggatattcctcatcagactaaagacgtcaagaattgtcgcaaaattttaactaagacctcctgatcttggtgcgccccctcttcaaaatagacgtcccacaaacccaataaatccatatcttaatttacgtttcttatcaaataaatatttaataaaaacctcccaaatattcttggagtgaaaactccgcagaaccactgccaaaagcaatgttccaaatcgcggcgatcagctgcgctctccgcagaattcgcccttgctcatcttcgccaagaatgttgaagtctggaaaacagttggagcaggtcgatcggtcagtccggtcaggnttcnaatcnttttaccaaggggnnacgggtccccaagggaattttgggncttgggngggggggggggaaaccttccccccccgggtggggaacgaaaccctttttttttttttttttttttttttttggcctttttttccccaacccccgggtttttttttttaatggggggggccggcggggggttttttttttccccaaaaaaaaaaaaaaaaaattttttttgggggggggaaaaaaggggggggggggcccccccccgggcgggggtggcccccactaaaaaaaaaatggagggcccccccccccccccccccgggggagaaaaaaaaaaaaaaatatttttttttttttgggggggggggggggttttttttataaaaaaaaaaggggggggcggggggtggtttgtttgttgttaaaaaaaaaacaaaaaataatatttttttttttttttttccccccaaaaaaaaaaaaaaaaaaaaaaagaggcacaacccaccaaaaaaaatttttttttttttttgggggggggggttttttttttttttttttggggggggcgccccccacttcttttttttttttttttttttttattgagaaaaaaaaaaaaaaattatttttttttttttttttttttttaattttaaaataaaaaaaaaaaaaaaaaaaaaaaaaaaaaaataattttttttttttttttttttttttgggtggagaaaaaattgtttttgggggtgttgttcccaaaaaaaaaaaaaaaaaaatattttttttttttttaaaaaaaaaaatttttttttttgtggaaggtgtgtataaaaaaaaaaaaaaaaaaaattaataaaaaaaatttttttttttttttttttttttttttttttttttaaagaaaaatttttttattattttttttttaaaaaaaaaaagggccccttttttttttttttttttctttttttcccccatttttttggttaaaaaaaatattatatttaaaggggaaaaaaaaattttttttttttttttttggtttttaacaagaaattttttttatttgccccttttggccaaaaggtttataaaaaattttttaaaaaaatatttcgccaaaaaaaataaaatttttttgggggggaaaaattttcaatttttttaaaataaacccaaaaaaagccatttttttataaatttaaaaggaaaaatttttttttttttttataatggatagaatttattttaattggttttttttaaaccccatcaaaattttagttaattaaaaaatttcaagtttaaatagttaataaaatccaaaaaattgcataaaagaaaaagcaaaaaaattgtaatattatttcattttaaaaatttttatatagagagtatccgcatagaaaaaccaatatcatggaaatattattgaaatattttaggatattaatgttacaaatttattttatagattttttcctttataaattgttataaattcattaggttattttaaataagctattttaattttctatatttataaagggtagaattagaatttctcttaataaaaaaactaataaaccctaagtttggtctttttatattaatgatgatttatatatttaaatatatttatttaacagattttttggtatatataaaaacatgaatatagattatagataaattgaaaaaatatataatattgatttttggaatataaatttaaaaaaattaaaaacttaataaaaacctaattcctc

SEQ ID NO: 28643 - DNA, 795 bp, Heterodera glycines
atagaagccaagaattttttttttttgttgattttttgggtctcgaactgggctgtgcgcaatcggattttgactgcgcgcaagccgcaattgcagcccttgaaaaaatccgcaacacgcaatggcgtgaagccttgctggttttcgaatcacaaccctcagtccgcttcctggaggtgatatttttactaacgagcagagcaattaacctctaacaaaagccatagatgcaatcggccgaacactttaaaattttttaaaaaattttcagggggcggaaacgataagagtagaaacggcgggggcgggaatggtaatttttttcaatttttcttgaagttatgaaaaattttagtttttggaaaacgatacggggggggagaacaagctgcttcaataaaatgtaaattgaaatttaaaaaaaaatagacgctggaattgcttacaatttgtacatattacacttaatgggatggatgatgtgatgaataaatgagtgttttgagtagtgatcagcggcggatgggcgaagaaaatggccggcggtggaagaagggggggggcggaaatgatcggccggcagcagaacaacggacacaataaattgaattaggtaaagtatgtctgtcttccgcccatccggacgtccattttttcgcgacgacgatttgctgaatttatgttgttgttgtactgctcccgacggtgttctcgcggcggcggcgcatgggaatgacgcccgtcgcgcccaccgcacacccgccgcggtggcggtggcggtggcgcgggcacccc

SEQ ID NO: 28644 - DNA, 1389 bp, Heterodera glycines
  unsure (1)..(1389): unsure at all n locations
tttttttttttttttttcccccccccgggggggggggggggggggggggggggggggggggggggtgttcttttttttttaaaaaaaaaaaaaaaaaaaaaaaaaaaaaaaaacaacacccacccccccccccccccccccccccccccccccccccccccccccccccccccccaccaccaaatatattttttttttngtactttttttaattttttcaccgggttgggaaaaaacgcttttaaaaaaaccactgcaaaaaagagcttggatagagttggggatttttttttttttttttaaaccccgcggggcggaaaaaaaaaaaaaaaatatcccccccccccccccccccctctattgaggccggaaaaaaaaaaaaaaaaaaccccccccccccgccccccccagatncngttatggatgannccngacanngaatttngatnnaaaaaccatggacctccagcccctgtgtnttaaccatatatgaaccgaatcctaacaggctcttggtcctccattcgggtccaccattcccactgaaaaggggttgaaaaaattggtgcctttaattactatgcaaattgatgagaagaaatgccagatccgcctaccactaccctcccccctcccctctctttcccgtgaacnttgaatgtttgaagtgttaattatctctttcaatttttttttttttgtatctgctgaaaacccatttgtcttctcttcttctctagttcatttgtaacacacgcacaacaaaagtcaaagtgaaaaaatatatatgtaattattttattatgtctcaacatttttcatctgaattatttatggcaataaaaaatgtttgttttttttttttgtctgattttttcgttgaaaataattcttttttttattgccattcattgttcaccaaaagctgtattttcttataaatgttcgtttgaaattttttttattgactaaagaacaaatattatacattttttcattaatcgattagtgaatttgttaaatggtcgtagaaaactttttatttgttagttagcggacagtgccgtttctgcgccaagaattctttttgctagaccatcaaattttcataaatctgtatcattcgaacgagaggttgattgttcggtaatagttcagtttgtcccctccccctttttcgaaattttttttttgtgtgtttcaaaagtcatgaaaacatgtttccaaggcttttcggggtcgttgatcacgaatccggcacccatttcgactaatttcgaacctcagacccgaattcgaacaaaaagtcaaaaattcaaatttcgattttcacatatttggtctaaaagtggctcaaatgatcttttattgaagctaatgtcgaatttc

SEQ ID NO: 28645 - DNA, 1349 bp, Heterodera glycines
caatccattcgccccatcaccatcacatcccaatctgctgtctccctcccttttgccgttcaattcgcctcgtcatctcgtcccaatgccgcttcacgttcctgcttcctttccgcgcccacctctccaaacattttttccacgtccaccccccccattgccatgtcctcagccgttctccacgtcaaatcagcaattttcaaatgtttgtccgacgccattaatcagccatacctttagcgccgataaattcacgtaatttcaatgattcacatattttttataatataattatttcaatttaagcaccatcaaaaaaacgacaaataattgaggacagagcgggtaatctattaatggaaagaaattgctaacaaataattttgataaaaaaagcaaactaattccttatatttagaacgctggcgctgcggaacttatcgaagcatacgccgggatgaacgacgaccggacaaacagcactacggagttttggctgaccgaaatgggcgctgtgttgaataccgagcatcctcaagacgcatgaccgacgacaaaaacaaggccgaccgggaccgacgttcaagaaaaggtccgttgaaaattcgcaaaatttttttgtatttaataattttaaaaatttttgaataacctaattaatctcaatcgtttttttcccattttaataggaccgatcggaaatgctgatgacaaaaacaaggccgaccgggacgaacgtttaagaaaaggtccgttgaaaatatgcaaataaatttgaattggataataattttaaaaattttttaataaacaaattaatctgttgtttttttcaccttttaataggaccgaccggaaatttcgaggacaaaaacatgaccgatcaaaacaaggatggacgttcgaaaaaaggtccaccgaaaatatgcaaaaaaatttgaatttgataataatttaaaaattttttaataaacaaattaatctgttgtttttttcaccttttaataggaccgaccggaaatttcgaggacaaaaacaaggccgatcataatcgggacgtacgatcacaaaaaggtcgctgaaaatttgcaaatctgtatttaataattttaaattttttggataaactaattaatttcaatcgttttttcccattttagtaggagcgatcggaaattctgaggacaaaaataagtctgatcataatcgggacgtacgatcacaaaaaggtcgctgaaaatttgcaaatctgtatttaataattttaaatttttcggataaactaattaatttcaatcgttttttccaaaagttagtaggagcgatcggaaattctgaggacaaaaaca

SEQ ID NO: 28646 - DNA, 1191 bp, Heterodera glycines
cgcaattcgtccgacactttcggtcgtgccagggaaacacctcctgcacagtcctccttggccacgtggtgggcacactttttgtggcaattgtatttgcaatctgtcggggacaattcgaatgatcggatgaacgatcgaaaaaacgaacgaacggcgaaggaacgccaattaatcacctcggcattggagtccttgccggatcagtcccttcagcagctttttgcagtgttggcacaccgtcggccgtttgtaactgtgcacttggaaagtgtggggcacctgagaaagaaaaaataaatcaaataaattaagaatttaaaactaaaaaagaaaaattatttaattaaggatttaatgcaaaaagtgagaaaaagcagggccattaaagtgttctgctacggatggccaagttttgttctgctgctggcagtgtttgcctttattctgatggcctccgccacttccatccaaaggggcctcccactccaactgctgctgcgatccttccgcggcatttgcagaaactgaaattggaaaacattcaatgaaaatttgaaaaaatgggagaataaaaaaggagggggaagaggaagaggaggaattcaaaggaaccccaattacgaaaggatggcgaatgcaaaatgaaaaagagaaaaataacggcacatgggttggggcagtccaagggagcaaaaaatggcgagagagagaaaagggagggaaaggggggggggggggggggcattcaccggttgcaatataaatcagtagggctgctaatatgtaaatacatatttttttcctggcttctccatggtctaaatagtaggaaaaacactttcttttctttgtttgcaaacaaaaatcgggacttttatttacatattttgggatttttctacatattacatatgtaaatattttatacatattttgactttttagtacatatttagcaattttttcgtacatatttatttttttttacatattttgggaatttttgagaatttataaaatttcttaagaaaattttgataattttttttgaaaatgtacctgaaatagaatatttttagtatttaaatttgtcatttttaacgtttttttattttatttgaagaaattatttttttgggtaaatattaaaaaatcgggtttttccaaaaacagaaatcaaaaattaat

SEQ ID NO: 28647 - DNA, 980 bp, Heterodera glycines
aaaatatttttttcattttttttttactttttgtcagccgccatttcagtcccatcactgctattgctaatgtttccgccgctgctgttgttatacggctgctgaacaaattgagcaactggccagaacaggtataaggcctgcatattttggatggcaaaattaaatataaatcgaaaaagaatatttaacttttaccaatgatcggccagccattccgatcagtgcgatggtgtatactatgtataggcatagcacattagcaatcagcagctgaaaccagttcaatatttttgtttaattgttacgaaaaaatgccaaaaaaatatattattaaaaatgcagaaaatttggaaataaactgaattaattagcaaacaaatttaattcaaatgtcattcattatttttattttttaataaaaaaattaaaaatgaaactttattgttttttttcaaaaaattgtctgattggaaaacagtaaatcgaacttttatgaacttttgtgctcaccatcaaattgccgtggaagataaagcgcgatcgttggcattgtcggatcagtgccgcaacaccgatcagaatggcaacgccgagggcacaatggacaaatcggatgatgttactcaacgggtccaaaatgatcgatgctccgtggttgcacacttgagcaattgaatattgggacatccttgaaatttttttgactattcggaggtatatgtaaactaaaaagaaaaaagtcatagattttctcatttccgatttacaaaacaaatttaagtgcactgggtttccagtttttagttgaaaaatttgtgcaaaattctcacaatgtgcaagaaaagcaaaaatgaaattatataatgccatttttactataaaatgttactttaaattgaggaaattaaggaaaattattggagggggcggggaggggggggaggtaagtttaaaaaaatccaagaacaaaaaaaaga

SEQ ID NO: 28648 - DNA, 1302 bp, Heterodera glycines
caaatctcaaagtgatgccaacttttggagggcgtcgcactgatcgcaatgaattgcgtcgcatttggccacactttgcgcaaaatgtcgtcgcaacgcatcgcgcggtcgccttccaacgtacatttggaacagcagccgaaaaacgactgccgggtgaggcgcgacggcaccgcgccgcacagtttgctgacagtgcccgacggcggtgccatcgcttcggatgaaagtgccgtggggcagcaaaacgcaacggcactttgggagggggacggagtggcgaagtcgaagacgaaaaagaacagtgttggcacaaacggcaccagtggaggcacccaaatcatcaaaaaatggggtaggaaaaatgggggggggggggagggcgcatccaaggacaaacttgggaattaatgaacccgttttcaattgctacaattaatagcgctgacaaattttgccaattcttccaaaatttttataaaattttgttattcggggcaaatgtaaacataaaatatggacaaatggacaatggacgaattgtcctaataaattttttgtttagaaaacacaaagaaaaggggcaaaagtgtcggaagtgaagtcaattcgaaagaaaatgaccaatgttcgaaggcggagactgaacgttttttcacgagacaaattcataaaataagtgcgaaaacagcgagaatttagtcattgaaaatatttattaaaaaagtgattaaattaacgggcgaaagaaaattcgtaaaaacaaaattccgtattgaatttggcaaataatcatcagaaatagaatagaaatgggaatttatttacaacaaaccaaaataattaaagaatttaaagcaacttaaaaattgaaaattatacatcctaatcataatgacttttatgatcaaccaaatcaacattatttttgtcatttgatcgaagtctaagtgttctctattaaatgctcaaaaattattaattttgaaaaaattacagataaaaatgttaagaaaaaagattttttaatcttacttaatttattttagttattttcttagctttgattttattcatagctcctcaacactttctttactcattttgtgctttttttattaattgtataaatataaatctttgtcggcatttgctttgaaatgcaaatgcttttcctttggcactgttttttcccatttatggcattcttttcttttttggcatttttgttttctaccctttgaagcacattcgctaaaaatggtttgggcatttttgcttctcccgcgctaattgtttttg

SEQ ID NO: 28649 - DNA, 893 bp, Heterodera glycines
cactttggcactgacaatgctttccgcaatccttggcattgtggtcaacgcggtgatggacttctcgtcgttgctgccaatcttctcgctgatggaacggcgtcttgattggtattccattttttggctctactacagttcatgtttctaagtgacttttacacttccaataaatcattatccgcagtttattaggccgtaaaattttttcttagttcgtcaatgccttagttcttgatatcaaattgaaagcttaaagtctataaaaagtttatggaattctttaggaaaaaagtcatggcctgagaaactgagcatggtcatttattggacgagtatattttgttttttcttgctttacatgtatacacttactaattgtaagatgtcaaagtattattcaaattggaggtgttttgcgagggacaacagaacagctcccctatctggtccttatttttaagtttttccttattcgcggggtaaaatttgttggaaaaattgggtaattaagaaaattagttttcggtcggggtggaagcgttgtgcaccattaagctttggctgcgctatcaattgcttttagaatgagaataacgcatgttttgttggttcattcattcgctcatatttcagcccttatggtcaccagtccgtcgcaccaaaatgagaacaaacgtttgggcttcatgtacgcttttgcctttttggtatctttttgttgatggactgtcgtaattttcgttttttccgaatgatgatttactgtttttccctttttttagtttggttgggaggttagttgattgagtatgtggggatcgatgatccgaccattgtatttcacgcgatcttcgtcaccatggtattggtttttttgttttatcaaaaaa

SEQ ID NO: 28650 - DNA, 1122 bp, Heterodera glycines
  unsure (1)..(1122): unsure at all n locations
gtatggattntaagacgttaatagttggcccagttgggacttgctccattcggaaatggaatcaaacaaaggctgtccgaattctctcttcgaaattctcaactgttgtctcacccgtggagggacgaggacactgcgcacttaccttctgcaaccgtcggcttccgtggaaataatcaactcacgtctggacatagtgcaagaattggtcaaaaaccaagcggtgaattcttttttttgagtaattaaatcaaatttcaccgtttttttttaatcgtttttagatgtgcgacagaatacggtcaatcctttcgaatttgcacgaccttcagcaattggtttccttctgcacttacacaaacgttgaacaaagtgccaccaatcgtgaggaatcgaagcgagtaattcgcaacaaaataatccaagtcatttacggcctaatgtttttagcttaataataaatttgtttttaggttattgaacttaagcgacttttggaagcagtcaaaaaaatttcagaagtgataagccattcaaaatcaccattttttatccaaaacaaaaaggtaaattaaatttgctttcatttctgtcgatttcattttcatccaaatttaattggaaaaagttaatcaaaaatatgtacgcactttttaaaccttcagaaattggatgactgccgacttgatgcaatcgctgaatttgtaaacgataaaatttcatcggaattgaccacacgcaaaaggaagggtttggtcgcttcctcgtccaaagatcaaattctttttgccatcgccgagtcgcaacatgtgctgctcgacgtggccaggcgcacttaccaggaattggtcgcccgaatcgtcggtcaatgaatggcatttaaatccttttcattttatttcgaccttcagaatttggcacggctcatcagaaggaaatccctggcgcacagctgtgctattcgcagtcccgaggttaccacttcgcattgcacgccaacgacccgtacagcatcaatttaccatcgcattgtatccaagtcgtgttcaacaaggcatcgctgacattcaccaccagagacctgatcaaatacaacggtgggattattgaggtcctttggat

SEQ ID NO: 28651 - DNA, 1090 bp, Heterodera glycines
aaaaaattgattttttttttttcgggggccatcccccccgaacccgatccccctaaatttatggggaaccggaatccttggggaatagcttccctttaacctgttctttattttgcgtgggattttgaaagcttcactattttatttttttagcaaaattaattcataaaaatttttcacaaactgctctgaaacgcaccaaattttatttacaagttattttaggcactcagatgctttcactatcaaaaagggagatgaataaaaatctaaaaatttttaataattgtttgagtaccccaaacggacacttgaaaaaatcgatttttttgttttcggggcagtccccccgaaccgatgcgcccagatttatggggagaccgaatccttcgggaatagcttccctatagcctgtactttaattctgcgttggatttttgctccccataattgtttgagtaccccaaacggacacttgaaaaaatcgatttttttgttttcggggcagtccccccgaaccgatgcgcccagatttatggggagaccgaatccttcgggaatagcttccctatagcctgtactttaattctgcgttggatttttgctccccataattgtttgagtaccccaaacggacacttgaaaaaatcgatttttttgttttcggggcagtccccccgaaccgatgcgcccagatttatggggagaccgaatccttcgggaatagcttccctatagcctgtactttaattctgcgttggatttttgctccccataattgtttgagtaccccaaacggacacttgaaaaaatcgattttttgttttcggggcattccccccgaaccgatgcgcccagatttatggggagaccgaatccctcgggaatagcttccctatagcctgtactttaattctgcgttggatttttgctccccataaatgtttgagtaccccaaacggacacttgaaaaaatcgatttttttgttttcggggcagtccccccgaaccgatgcgcccagatttatggggagaccgaatccttcgggaatagcttccctatagcctgtactttaattctgcgttggat

SEQ ID NO: 28652 - DNA, 1596 bp, Heterodera glycines
  unsure (1)..(1596): unsure at all n locations
aatttacttnttgccaatttcaatgccaaattcctttttccatttgcttaatgttgctctgttaatgcccaattctttcgcaaattgcttctgttttccatatttggacattcttttaatctcttcgattcgttcaataaattcctgttttttctttttataataataaattccaaattcttttttccattcgtaaatttttggtcgattaattcccaattttttcgcaattttttgctcggttttaacccaaaattttgccgaatattttccctttttcttaattccttctctaattgcatgaaatttgtgaataatttcgtttttttgttgaacatccaattgatctgtctgatcagttaattcattttgatcattttgatgaaaatttgcattttgatcagtctcattttcattttcatctcctccaattattatttcattttgccattcttcgccaaatatttcagcaaaagttggccgacattttttacacagattaactgacaatgttttgtcagttgaattgtttatgattaagaacacaaatataaaaaggagaaaaagcatcactaaaaaaagtataataaataattaattaataagtttttaatatttttaatatatatatttgtattaaaattaagctaatttatcgaaaaatatatttaaattttaatgaatgtggagaagcattgccaaaaaggcgatcaatagtaaataagattaaataattgtaagccatgaatttcatcataatttcacatgaaacaaataatatagtgaataaaattaaattatactaaaaaatttagacaaaagtcagcagttgaacagcaatacacaaataagaaaaacgaaaaatttaagaattatttctttttcccatatttctaaagtggtaattccaattttcaataatccgggcaatttttttgtcattttaaagaaggatttacttattcatttcataataatcattcattttgctccttttttcatcatgataaatcgaattggacgtatgaataataaaatttgaaataaaaaaggtacttttcgagttatcagggcctatgttgtatgtaggtttttattaagagctaaaaaagtaaaaaattttgaaaaatcatatttctgcctattttggcgtttcgaccaaaattattaagaaaaatgcaataaataagaaaaatccaccactcagtagctcaaaactttctgaaaatgtattaaaaactcgcaaaagttcccccccccattctccccccccccctccgccaattgcccaaactttctttaatccgaaaatgccaaaaaaagacaataaaaaagagagaaattggcggatgaatcactcattcctttcctttctctcttcttctcttttggtttgtttaatttcgttttttcattctttttgcttctcaattcattgcaaatttggcctcaattggcgtgccaatttcattttctttccatccgttgaaaatccctccgcccaaaaacggacattaaaaagttttttatttattttgtgatttgctccccattctggtttctngtttttgtcatttattcttttttgactctaga

SEQ ID NO: 28653 - DNA, 991 bp, Heterodera glycines
tcttattttgaaaaattttcgatacgcgccctgcattgttggtgtaccccttccaagagctttatcgtccaaattttccaaaaaatttcgctaaatgtttccaaattttttttaaattccacaaaattagctttttttggtgaaaattgttaaaactggtaaaatttcgaaaaagttttttgtttcggcaccgccggaccccttccgttttaaaaagttttttgaaaaaagcacgccacaaaataaagtgtcataaaaagcaaaagattgtcgcccgggggtagtctccctcaaagcggaaattatggtcattctcggaccctttgggtgatgacaatgcaaaaattgggccatcagttttttgttttccgttggcagatccgcccaccgccaatctgttcctaatcgactcgcacacgggccaaattcggatgggtcgtcgcccgttggattcggaacggggccgggaatgggtgctgaatgtgctggcggtggaaggccatggggacagggcgagcagtgcacgcactacggtagagttacagtatgaaaacagaaccgagtgatcggagcgatttcttatcagtgcaattatttttgactattgctaagcgcatgtgataataggaattggcttataatgttgtgatcagattgtagtgattaattttcttctagtgatcgaaattttctctgttctgaacataatggatcaaatcatttaattactaatcgtgatccgagaaattttcagatggaattttctcattttaattgatacataacagaatatttgcttgctaatgatcagagagcactcattggctgattataaattagaccttttttttttttgaaaattagtgaaattttttagaaaatttgggtgagaggctaggtctggggggaggtaccaccaaggaaaatctaaaattttcagcaaaaatactattttttcttcaaatttcgggtgcggaggggccctgggggg

SEQ ID NO: 28654 - DNA, 906 bp, Heterodera glycines
tttttctagtctaatctactcaaaacggttcagaattcaataaaaataacattcacggtgcgaaaaatggggtatgaaacgtttattggggaaaaaaagactttacaaaataatacccctgggagaagggagtgggaaacatgatttcaaaattttcaattttttctagtctaatctactcaaaacggctcagaattcaataaaaataacattcacggtgcgaaaaatggggtttgacaagtttattggggaaaaaagactttacaaaataatacccctgggagaagggagtgggaaacatgatttcaaaattttcaattttttctagtctaatctactcaaaccggttcagaattcaataaaaataacattcacggtgcgaaaaatggggtttgacaagtttattggggaaaaaagactttacaaaataatacccctgggagaagggagtgggaaacatgatttcaaaattttcaattttttatagtctaatctactcaaaacggttcagaattcaataaaaataacattcacggtgcgaaaaatggggtttgacaagtttattggggaaaaaaagactttacaaaataatacccctgggagaagggagtgggaaacatgatttcaaaattttcaattttttctagtctaatctactcaaaacggttcagaattcaataaaaataacattcacggtgcgaaaaatggggtttgaaaagtttattttgaaaaaaagactttacaaaataatacccctgggagaagggagtgggaaacatgatttcaaaattttcaattttttctagtctaatctactcaaaacggttcagaattcgataaaaataacattcacggtgcgaaaaatggggtttgaaaagtttattggggaaaaaaagactttacaaa

SEQ ID NO: 28655 - DNA, 1146 bp, Heterodera glycines
  unsure (1)..(1146): unsure at all n locations
gcgacgaattttaaccccaaaaagttttttcttgaatttcctagtttaagcagttaggtaatttttccagtcccatttcaaatttaacttccatttttattttattttccaatttttaattcgtcacattttaatatttcccccccccccaatttggccacccgttccgctgacaaagcatgcccccagcgctctgttcgcgcacttctgctgtgcccgttgatgagaagtgccaattgtctccaccgttgggggcaattctcggcgcatttcacccgcattgtgtccattttcacgcgtcaccatcaatttgcctgcggtgtaaaagtaaattggcacaaaatgccgccgaaccgtcgtgaagtgccctcaggcgatacgaaaggtccgaactgctgccgtaaatgaacgaggcgtccaagaagctggtagcctaattagcgtaatgagcttgccatttgcgttttcaattctgttgctgtcacttggtttgcctgttccctggtgcccaaagagcagtttttggtccgcggggccaccatcgaccgcgaataatcaagacaattgacctaattacatgatttaaatcattaaatttatatttttttgaacaatttgaccgttccccgaaagcgtgggtcgtccccggacacggaaatgggaaagcattcggggtgccccggacgaccactgctgggcggcgtgaaaaagtgctgctccatggcacagcagggcaacggatgggtgtggtggggaaactctgaaaggggcgaaaaatgcagagatttcaaaagattgctaaattgcgctaattacccccccccctccggcactaacccgaggccatcatttgagtgctgccgatctgtgccagatcggtgtggatcagtgcagcccaatgggctgtgatggcactgatgccgactgcgtccaacggctgggcccgcggctcgcggaacaacaaattggagagcagtcgcgcgttcggcagctgcggggaacggtcgtccgacgaatgggacggagcggaggagcgacgcggctcagaaacgcctgggggaagggcggacagactgatcagttgnggtgatcaatgaattatttgcacaaactttcattgatcagtttgtatgatatggttttcag

SEQ ID NO: 28656 - DNA, 1887 bp, Heterodera glycines
aaaattttaactaaaaaatatattaaaaattttatttttttaaatatatattaattaggtgtaaaaaaaaaaattattttaataaaataaaaataaaacaaaaaattataaattcttaaataaaaataaaaatcaaaaagaccgaatcatgcaaatccactcacgacccgcggaacccgacatgttgaaaaaacttggccccgtttctgaacccgatttttggattttagcattacaaagatcgatttttgtcaaatgccagtgccaacactacaataaacaaaaagactaacacatcgctctttgtctttagcaaccggaaacaacaaaatgtgtaaataaaaatgatgttcaagttactgatgttgattcttttggtgctctgctgctgggcttaaacccaaccatttgctttgcttatgcgattttgctgatttgtccgccgacggtgatttggtgatgacgtcaacccaaacgtccatatcaatcatggcacccattaatcccggcgattctgtgtaatgtgtcccactcccatcccccccccccccccccccccccctccactgccattttgattgtgtgctgttggctgaactgagctttatgggagaagaagcattgaaagtgtgtgagtgtgtgattggtttcttgtgattttggggccacgtttttcggacacttcctgtgaaaatattttcaataaaatttggcttttaaaattgaaagttttaaagtgcattttttattttaaaaatatttggtttaatttaaaaatttttaggtagtagaatgaattttttaagcatattatttaaattcaattggctcaatccttgcaacaatttgtaaaaaatattttcaattttcttagctttctaatgcatttacatttcaacgaatcttcttttctttttcttattttactaattgctttaaatgccatttttagttgggctttaattgcttgctcgatgtaatgccatttgataatggcagaaagggaagtaatttttccgttaataccttttcaatttgtgagtttgtgagttcagccataaaaattaaatctaatgaggacaggaagtgtccatgggtggttcttgaagaaatgctcgagtgccatcccaaacaattatcttttactaatttttgtttttgttattttctatttaaatgtttttaggcttttcctaaaaataaaatttataagcataactgaaattttcttaaaaaacaaaatcaccatgaattttccagtttaaaatttttccaatttttaaaatacataaaatttaaaaataaatcacatattttttactttctaattttttttcatttggcattttctacgtagggatgagggttaaaagtgcgtcgtcttcttctcaaattacctttccaatttgccgtttccaccattaagaaaaaaaatcaagtctaatgagcttcgaaagcccccgcgggtacaattttcggtaaatgccgccaccaccaccacttttcctattacattcaatgaatgaatgaatggcatacttctccgcctcctactcccattttctttggcattttgactggtgccgcggctgcttgtgcctctcattttctcatttacggccaaatttccggccaaaatgtgtgtgctgtgtgaatgtaaattttcaaattgagaggcagaaattgttttttcaaacgtaataatcgctatgacctcacaatcatgcaaaatttgacattcaaattatctggaaattgaaaatttgagggattttcagtgttttaaattcaagagaaaggattattttttcgtttggcccctctaaaaaaattttttattttgtttttttctttaattttttttgtcatttttccactgattttttt

SEQ ID NO: 28657 - DNA, 1710 bp, Heterodera glycines
cccctgatggctaagtgttggacgggccaaacaaaggtcaggaattgtgttccccatcccaaattctcgcgggatactgattttcagaccatttggatgaatatgaaaatttcgattttccttatcatcatatagaaaaaaaatggggggggctccctgcaaatgtggtcgggacattgcgaattctgcacctatcgacccaattctttttgcgttagccatctgatctcccgctacacctttctaaccaggccaaagacaacaaaaaaatttgggaactgagatatgctaacttttttctgctagacttttagacaatcgtctcatagcgcctggcggcgcacctgtagcgtttcggtttttcttgggaaaagttgagccatggtatggggaccattctaaaaaaaaatttggcgagatttgacaagtctgaagggtcgaaatgggcgtgcgcccgagccctttttcccacatagtcagcgatcttctgatccttcaatgatagggagtctctaatttttttccccgctgctgtccattgatctgttaggcttccaaaaaaaactgctgtctctcacggggacgattttccctgagattcaatattcactgcgctggtgaccggcaccacctaattacaatggccaagtccgggatccggcacctcggaggaccgggaattcccggcccggtcccggtcccggtcccgctctactctagttttatttgagctaaaaatatctcaaaataacggattgtttaaagccctgtgctatctcttctaaagatgtcactgtttttcaatgtgtttatttagaaaactcccgcggcttattgaaaataattttcattaatattttagatgaaaaataaaactcagaaaccgatgaatagtcaccctatccgaaattgtgtgatttttatttttgacaaaatctattcaagaccatctacggaagatattataaagaatagtttagaaatactcagactagaaaaatgaaccattagagaatgcttcgaataaagggctcatgatatgatgcaaacagaaagcaaataaatatattttaaaccaattagactcgcatctttcagcagaaatttcttcagttttatttgagctgaaaatatctcaaaataacggattgtttaaagccctgtgctatctcttctaaaaatgacacttttttcaatgtgtttatttagaaaactcccgcggcttattgaaaataattttcattaatattttagttgaaaaataaaactcagaaaccgatgaatagtcaccctatccgaaattgtgtgatttttatttttgacaaaatctattcaagaccatctacggaagatattataaagaatagtttagaaatattcagactagaaaaatgaaccattagagaatgctttcgaataaagggctcatgatatgatgcaaacagaaagcaaataaatatattttaaaccaattagactcgcatctttcagcagaaatttcttaagttttatttgagctgaaaatatctcaaaataacggattgtttaaagccctgtgctatctcttctaaaaatgacacttttttcaatgtgtttatttagaaaactcccgcggcttattgaaaataaatttcattaatattttagttgaaaaataaaactcagaaaccgatgaatagtcaccctatccgaaattgtgtgatttttatt

SEQ ID NO: 28658 - DNA, 1109 bp, Heterodera glycines
ggaggaggggaacagagtaaaggaaatgagtaagcaaaagaaagcaaaagatacagaccatttcgaagactgtccgataaacgtcgaaactgaatttgtcctttctgatagccaagaaatcgatgcattcattcagtgacactcttttttcctcaataaatgtatgtgagacaattggaatttgtaaatgcataaatcttaaaatttaagttttccataacagcccacttctttcaaccgcaattccgacaaagggtcattggcaaaatcaaaaaccacggcacactgttttagcttctcgacgagcagaagttgtgctccccgttcgtccttaacctctaaaatggctgtcttatagaaacaaaaatggggacggaccgtcgaaatttgccaaattcggcccgccttctatcgaatgaatttccttctcctggggagattcgtccgtcctttccttcgccgatttaaaaggttgacaaagtgtacctgaagaaaaaggaacggttccaccatttgcggttatttttccaaactgaaacagacttgacacggggaccccctcatctgcagaaacacagccacagccaaagtccttcccgacattttcatcgtttaattccatcggaacaaatgttatttaatagacacgtattatttggtttaaagtaaagaattcgaaatagttatctttttgcaatttggtgaaaataaagaaaattattttatttataatttaaaaaaacattatcagatgaatgatattttctctttttattttgctttaaaatgactcgctttacaataatttgatcagtggaaaattgactcgttcagccggaaactcgaaacagacctttttctgaaaatgaatttttactcaataaagtcttttgaaacataacctccaaatttttgtttgccattaatttggccacgaccatattctgtttggccacccgaaaaagagaagacaatgaagcggaaatcgggttgtcttcgtttaagtccacatttttcatcagtgcgacagtctgaccaaagagttcagcggcattttcaaacattctccctcttttgtgtcccgtttcgattccgcaattctaaagcct

SEQ ID NO: 28659 - DNA, 1316 bp, Heterodera glycines
atattttcttggagattcatgcgtttttagacgttggacggttcagtcctaattgtaagccattttgccaattcagtcccgggtctgtaactctagggaattgtttccgccaaaaaattctttcggattcgttagttacagaccaagaggaatcgaatgatattattcaacaagaaaatcggagttgtcagtattcttcacttttaccctcttttatgacttataactattttttagggctttagtgagagtgaaatcacttcaaaagttaacgaatatcgtaaacttttgtttaccgagtttgagaacggtcgattggatatggacaccgaattggatcttcggaacactcattcgagggctaaagttgccaaaggtactaactattctagtttacaggtctaaacgtttcaattcttattttttttaaaacttattttagataacagagataagtggcgatcagcacttagaattgacgcagcttttgttgacggctcttcgctggaaaaattgaaaaaagccagcgaatcggtggttgaaatggcaaagaatgtcgataagaaggcgctggacaaagaaatggaaaaatcgcttatggaaaaattgatggaaaaagtataactttcccttacaaaataattctatcggtttttgaagattaaaaaggaaaaagaacaaaagaaagagagaaagaagatgaaacgcgcgatgcgcaaagagtcttcaagcgacagttccgactcgacttcctcgtcggacacttcctcgagttcgtctgaaagtgatgattcgtcgtcaacttcgtcctcatccgaaagttcggccgatgaaaaagccaaacgtaaaagaaaagccgatgagaaggaaaagcgcaaaagaaagagcaacagaaggcgcagtgaagagacgaaggtcaaaagagaaccgatcgaatcgcccgtcggaaagagaagtcgcaaatgaaagaggggatggaaatgtcggtttattacctatttatcatttcattgataaatgatggttttggcacttttcacgaaaattaaatgttgattcaacttacagtattatttttgaactgttaattgtaagcattatactttttagtagagtagagcgggaccgggaattttgagcaaaaccgggaccgggacctgaaaagccgggaccaaccgggacctcgatttttgtccggataccgggaccaactgggaaatttaaaaattcaaaaaattaaaaaaaatttaaattttatttatttcaagtaaaaataatacaaaattaaatttttattttgttttttatttaataaa

SEQ ID NO: 28660 - DNA, 1852 bp, Heterodera glycines
  unsure (1)..(1852): unsure at all n locations
ttttaatatattttaataaatatttaaataaaattaattattcgaaagaattcaaattgaattaatttatttgtattgcccatcattttttaaataaatcattgttaaaaactcaataacattgtatcattatcacttcagcatcctcaattatcaattagggatcaattagccaatcagttcattcaatgagtaagcaatgtcacgaggcaatttcaatgggtcgatgaaatattctcccaaataacgcgaatcggcactgtcctataagtaaaaaaaagcattatctaaatcagtttttattagtattgttcggcaacacgatttaccggtaatggttacggtaaaaacagtagcaattaccgttacatgttttccaaaaatcgactgatatgaaataaatttaccattactgcgataaattattaccatgacgaacactagtttttctaactacttcctacggaatgcacgtcaaaattcctcaattaatgggaagaaatttttcatttttttaacgccatctttttctaaaaaaagtatttctgcttttttgttcgctctcaaaaaaattaattttcatcccattaaattacctcgtttaataattcggcatcttcttgaccatgtccctcgttaacatcattaagcaaaaagatcgacgaccgttgtccttgcccattcagctgcttatgccatggatttcctgcaattttttttaaatgctcaatgactataagtcgtttttgaataagattttgggttcatttcgatttattcaaagcaaatattgtaataaaaaagttgaaaattcgattaacgaaaattttgataaagacttaaattgactcatcaaccgttggccacgggcccaataacacttacctatttgttgaaacccaaactttaggaaaattgaaattttattgtaaaaatatactttgctgcggcggttgttgcggttgtggttgattttttggttttcctgaaatttagaatgagggaagtggctgcctcacatggctaacaaataagcagagctcggccggacctggatccatgcatggatttttcttggacctggactttcctggattttattcagcaaatccaagtccagatcaatttggtaatccaggtctaggcatcaaaaacatggatttcggggataattttttttccgtctttttatggcgaaatatatttaaaatgggtattaaatctaaaaaaatttctcgacggccctaaaaattttaattctcttcaaaaaatggctcaaaatctcgaaattttgtcatttcttgaacaaaatcgttaataaatcgcattaaaattacaaaattttgcaaagcgggcgcctatctgcaccgcccgacctccccctcttattaaaaatttgtttgaaaaaactggccgtaaaaagtgttttgaaaagcaaaaaaagattgacatgaattgactggatttttcctggacctgaattttgtccaggaaatccgggtctagatcacatgaaacccagctccaggttctttttacaaaatactgagctttacaaataaggtatttgaaaccaagccaaaattattcgtaaaattaatattaattaatatattaattaattactatttgaacctatgccaaaattaatttagtaaaattaatagtagtaatatacatattaattaattaccctttgaaattgcctgcaccgaaaaagttttgaatttcttgccaatggtcagcgacctcaaatccgagagttncaagtccaaaagggagcgtcaaatcncgntcnccttccttnncatctttaacgaaaaatttttttttttttgtgtattttttaagc

SEQ ID NO: 28661 - DNA, 989 bp, Heterodera glycines
aaagtgaagtatttctcgaaacagtacattttgatgatgttgccactgctgagaacctgaattttgccaattaaatgcaatgggacaaaaacggggaaaaaggttggcatttcatagggcagcgaatgttaagccacgtcaaaacaaattagaattttgaaagtaaaacaatttgccatggaatggcacggcatttaccatcgaaaaggcccttttagaggagaaaatgatgtagtcaatctctcttccgggaaggtatttgccgttgtgacggatcatttcgtgccaccacacgcaacacctttcacaattgtccaagtcattcctttccaaatagcggaaaattagcagccaaagttccgacgaaagacgacgatacgacggaagagaatggggctaaaaaaagaaggaatatgaaattgaaaacatttgccaaatttaataagaccattgaatttgtagaagaagccaactcattgaaagagtcactgcttttgggcagacataacagagaaaggttctcactgatggaatcggacatatgaaaacagtagaaggaaaacccaaataaaatgctaaaaaacaaatttaaaatgaaaattatttttttaaaaataaagacatcagatgaaagacgactattatttttaaagtcatttctgaattacttagtttttacacgaccaattaacactttcatttggccatctattaagtgaatacatctatatattattaacaaaatttgaatacatcaataattcaggaatttattttatttttttaatgtatatacacaccgagtcaaaaaacgagacatgtgtcaataaagagagagtgcagagaaaaaaacatctctatttttggcgtactatttctttatctctgttaatagagaaaacccgaatttacttcgccacatataactttttttctactcatacaatttacaccaaattttgcataacgatagagaaaaagaaaattaa

SEQ ID NO: 28662 - DNA, 1284 bp, Heterodera glycines
attaaaataaagaactaatttcattaatgaaaccatttgcccacaccagccccgcacgcgagacacaccccatttaaaatgcacccacgttctcccctcttaaattcgataggaaaaattttatttttttaaattttttaaaatttcttcattcttaagcctttatatatattttttttagattaataacctaatcaatggtacgaaaaaaacaaagttttcagcctatcaatgcaaatgcaagttcttctatagaacaacaaaataaaaaagaaattgatcaaatgggttcaaagctcccagtaaaaagcggattgaacaagattgaatgggttctaagctcccagaaaaagcggtctgtaaaccttgataacactgaaatttataatgaattatcaacctcaaatgaaagcattgaaagacttaatttgaaagaatgtattaaaaaaagatgagattttgttcgtttttatcaagtgtctctattttaaattaacacccctttttcgggaaaaaattcataaaatttttttccgtcgtcatttcgccttctccttttcagaatcttaatattttcagaattgctacgtacagttaaaaattcagctcgatcggttcatgggaagtggtcaaactcccaaaaaacagggtgtctttattttaaattaacacagtgtatacgcaaacaattttttttttacaatttttgctgatatttataattattttttatacatttctattttgtttatgttaaagagcgtaattttataatgaattatttttttatttaaataaattttttaaattatttattagaatgagagaaccttgcaatggaaaaaagtgcagtatatttaatgaatgtgcatacgcatacctcgacatctctgcgaccatccattgtaataatagtcaaattttagtatcaaaatattattgtatataaataaactaacccttttcaaggagttcataagaattactacagtttagttaatttgaataattggatttaccatttaccaatattacaacttatttttatcaatttattcagtgaattgatcgaagaaaattcgacgataaaaatgattaattggcgggctttaaacacagcaaaaattacatagtcggactaaagaattgatatttcacttctcatattggcgaactatttctttaaggagggaaaattatttttatattttctaataaatttacggcgggtgtgggtgtgttgatgaccatagatatttcaagatattctcaatgacatctaga

SEQ ID NO: 28663 - DNA, 1620 bp, Heterodera glycines
aaatttttcaagtttttcttaataaattttttacaggcttaaaaaacttatcgtttttgataaggctaatagagcatgttgagctttcgaatgataccaagattgttggatttggatgccaaagaaaaaagcttaagtggaaaaacgagctggcgccgaacgcgagcgccgaaacgcgtggttccccccaaacatggcaaaagtgctttgatggattttgcgtgaatgcttaaaaaaggaaggagcaggaccttcgatcagagagagagcgattgatcatttctgatcagtggagcgttgaatgataaataatacacaaaaagggttaaatttcctaaaaccttgaaattaatcgtttaggagagaaagtcctgctgacgccagacaggacagacacacatacatacaaaaatgttggtcaaattactgctaatagacacaaatacacaaacaatcgataaaatcaatcaataaagggcagagagagaggggaaaaagaccaatcatcgcttaatgatcaaaaagccagccgaggcccatacaaaagcaccatcacaacaaaatctgccggacgctcacttgggccagaaagggtgtgatcagccaatgggtggcgaagaaaaatatgatgccggtgaaaatggagatcggcaacgccggcaacgccttgcggtacagcgccaacaacatcagcgtaaaagcgagaccctggaggaaatggggacacatttcacatgtaaatttatgaaaaaataaaatggcgaccaggaaaatgcatcaaatttactaaattttaattgggcaatttgtgtgacagttttaaaatttattcggtgaggtaattaattgttaattggttttttatttggttgttgaaaatttggcaaaaagctgtctgaaattcatcggaatttttgatcgtggaaattaagttttccgcaatttttttttttgtaattcatcataaaaattagaaaaatcgttaaaaaattttcaaaatttttttcctgaaaaactatttcacactttaacccataaatacggaatgcatcgggctttccgatatttttggactcggatttcagaggtacgaaattttttttttttttgggggacattttcttggaatgccatcaacactcactcaccaccaacacggacacatagcatgcaatggtcacgttccaatccccaaaactgctcgccttgccaaccagcacactgtaaaagatgaagtcgcccaggcccaacttgacgccacctgaacgtaaaaattgcaaataacagaaaaatcttcatccatccatcaaatggacaagttttcctagaatttccaactttctatggtcggaaggccctgcccgccggccctcttctgctcgccgcctgcggcattttttaagaaaaaactcttacaaagttttttcataagaaaattctaagaaaaaaagtttttttttaaaaatttgtcgagtgtggggatttttccagcatggccccctccaaaattttttcgtttttgaattttattattttttgcagatttttcccaggaaaacggagaccactttcaagcaaccgtttttcgagctctatcgattggaggcatttttgaaaaaa

SEQ ID NO: 28664 - DNA, 1306 bp, Heterodera glycines
  unsure (1)..(1306): unsure at all n locations
gcataaagcattgcataatttattcgaatgggcaaataaatggcaaataaaagtttcaatgcaaaaaacttttgtattatatttgggttcaaaaaccncnaaaagaaacatataaatttgatggaaatacaataaatgctgtggatacaattagggatttaggagtaaacattgataacaaattacaattttccgatcatattaaccaaataacaaggaatgcgtatttacgtatgcgttccttgtttagaataattaaatccaaatcgtctaagatttggattacgttatataaaacttatattaggcctttattggaatacgctccagaggtttggaatccgtctcttcaaaaaaatattaaaaaaatcgaaaagtgtcaaaaatatttcaccaaaagggtatttttaaaatgcagccttccgccaattccatacctaaatcggttagaataccgcaactgccaacacttgagaataggcgaaaactgtttgatctgttcatggcgcataaaattgtttatggccgaacagatctgaaactattttctatttttaatccctcaacgcgctttaacatccccttttacagatttaactcaaaatataaactgggcaaaaaattcattccctttgctgggagggtaacaaaattgtggaatcaactagataaagaactaatcaaaacaaattctttaaatcaatttaaaaccaaacttagaagttcactagggtaatgaaaccggaaagctagaattataacaaattcctaagtgatttggtatttttttatttttcgacctcatttgactttgacctcaatttatttattatttattttcacatatttttgtctttttttaattcctgtgatcatccatatattttgtcacttactctacgacacatttaccggaatagtcgtcagagtaagtggttttcgcccttctgatgacttttttatttttttatgaataaataaataaataaatataatatctattatttaattcaattttgaaaattttggtttggtataaattaaaattgtttttaaagataatcagaatctgaagtagttactatccagtcattgtcgcggtggtgattgatggcttttggtctttgatgtttgccgcgtgattaattacctatggggggtgattaattagtgcgcgagcctaagcctatgggtgattaattagtgcgcgagcctaagcctatgggggggggggtaattagtgcgggaatcctatggggggggggggtgattaattagtgcgcgagcctaagcctatggggggggg

SEQ ID NO: 28665 - DNA, 1524 bp, Heterodera glycines
  unsure (1)..(1524): unsure at all n locations
ggggacctctagagtcacaaaatattttgggcttgtgaacaatttttataaatgaaaaatgcaataaaaataaataaatatgcaccattaataatcgacctaaaaatttttcaaaataaattgggcggagttttacaccgaaaatctttaaatggtgtttaatttacattggtgcaacagaaatggataaaaatgagtcaatttttgaaaaatttcgcttttattgagcagttcaaggggcgactaggggggggattaccccccaacgaaaattcaagaaaatttcgtaacaaatagtactcaaattttcaaaaattttcccccggcgtattttcagttttttagcaactacatattctggcagttttttagtaactaaaaattccagcccttgttttgtaacaacaaaagacaacgggcaccttcatgagtttgtcttcgtcgatatcactcacaaaaagatcgaacttctcatacggaataaccattgcctctggatattcatagggatccatgagcaaaatcttaatgtaacagtcacaaattgtgcaaaaagaggatatttattacttaagaacattggtccccaaaaaaggttacagcaaagtaccctgaactattaccaaagtacgctttccttgtaatttatgaattggaatttttgtatgaattcggttcgggtttcggaattttgtaaatcaaaggtcatagtcgtgatcagcgccacaaattaccatataaatgagtttatttgaaagtttcaggtgggaatctcaaaacagaaaagtacccaaaaaaataaaaatatttttttcacatttaaaaattaaaaaacattaataaagcttgacaaaaatcatagattatatgacgtcgtaagtctgatgttagatttgtggcaacaccctaaaaaatccccgatcacatctcaaattgcataaaatcattttttcttatgggaccaatgttcgtaagtattgccaaaaagagaaatgccaaacctactttatcatgcgcggaacggacttggctgatgacggcctgatctgtcacaatcggaggcggacattcggtgctgaaaacacaatgggacaatcaatcaccaagacaataaacttcatggttttgccaaaaaaaaaacagatttttttaaattttaacatttttactaagatcggcctggacctggatccaggcctggatttttcctggatccaggtccaggtcatttttcggcaacctggattttttttcctgggcctggatttttgtccaggaaacccagctccaggtcaaggcatgaaaaaaactggaaaaatctctttaaaaagtggctcaaatcgtaaaatttgtcattgtttgaacaaaatcgttaagaaatcgcattaaatttttcacggcggcggctatcggcgtcgccagacccaccgtccagaaaattttttagaagcgcgccgcnaatagcatttttaaaactaaaaagtcgtcgtttggacactaatatgagtatttttaaatcaatat

SEQ ID NO: 28666 - DNA, 868 bp, Heterodera glycines
cataaatctaacaaaaaaggtaaaatattaaaatccgatccatgaaaaacatgaaaagaaaatacaaaataaataaacttttttttttacactttccaattttttcggctgcttctctatatttatagggtttgacgatatcattttgaaaccggagcatattgacttgtttaatgctaaaacaattaaaaaattaattaaatttccggaaaaacaacgaatattttccaacaacgataaacaatatgagtgagtatttgattttgtgaacacccactcatagaataaatcaatgcgcgtgccaatccggaactagtgccattttatatgcttgttttttgcatcaaaaaataataaaataaaattccattataatatatttaaaaggtgtctttaaacattttatacaatgttgcaaaactagcggtttttcatttaatatttaatttttacatttttagcttacaaattagaaatgttataaactaaatacgacggaattctttaattatccttaaacagatacaaatatttattttgtaaaatttataaatttttccaaaaatttggttaatgagtataaaatactctcttctctaaagcaaaatccccttgctgctagctaatatgtatttaataaaatataagttaattaattaaaatttatttatctcaggaattcatttattaatgctatttttaattttactatgcaaaagttttgtggattttattatcgcagttggcaatccatgccataatttatgtgacgaattatgggaaaaagccccaataaaaatggaaaatttggaagggaatgaaatggaaataaaaacactcatgcaaagtgaacaaatcatattcgatg

SEQ ID NO: 28667 - DNA, 1355 bp, Heterodera glycines
ttcaaataaaggtggttgttggcttaatgttttttttacatttaatcattgtaatatctgtttttcattgcttctgtatttgcgcacccgataaagcgccttaaaatcacaaaattgagttaaatttagtaaaaaaaaacaaatcggaagggtggtaattagcttgccttatcccagaataattggcacttttttttttgtacattttgtcaatggccaaaaaaacacctccaactccttgaccacgtactcgccccgtttgatcagctcgcgcactttggcctcttcctgcacattggcgttgcgtgcgaatgcgttttttagccgttcatggaaccaacgcgagccttgcggataaacgaatcattgtcatcatgttattttgagaaaaaaaatcatccaaaaatggcaatattgttttggagaaattgaatttctgcaacgctatggggctacaccataacaaagaattaaaggaaccaaaaaaaaaattttttttttttttgaaaattgccaaaccttcggtactttttcactttacgccacataaaaaaatatttttatttttctgggattttcggggtcgctgatcacgaatgtggcattcatttcgaacaatttcggaaccaggacccgaattcgaacaaaaaatctagtttaatttttcgaatttcgtttaaaaatggtttaatgatcttttattgcatgagtggatagctttcagtttgtttccatgtgtttagtcgtttttagacgaaaaagagaaattggataattaaatttttgattttttgttcgagtttgggtccggatttcggaattgttccgaaatgtcacaacatatttatgatgcacgacaccgaaacctccatatttaaaattataaagtattttatgagggagaaagtgcttcggaggctgtcgaataacgacgtaggaattgtcaccaaaaaaagcacaactctgtcttcacatttcgaaaaatttttatcaaaattattagtagagaccgaaattctctcaaatgcccggactgatttgatattttcacaagcaatcggcttcgggccggcctctcaaaaactggtgaaaccggattttcggaaccggtttggtaaaaatttaaattttcacatgtatttcaaccccaaaatcgacaaaaatcgtgtcaagtgtaaaatttcagctctatttcacttcaggcgtcaaaaatgacctcttcaattttaaatttcataaattttcaaaaaaattaaattttctaaaatttttgcgattttctaacaaaaacagtaagtaattcatcataaaattgaaaaatcacgtaaacattttttcttaagatattcttatgg

SEQ ID NO: 28668 - DNA, 953 bp, Heterodera glycines
tttgtgttttctttgctatttgtgtgttgtaatgtgcccccccagtttgtgagtttgtaaaatgtgttttggttttcgcgaatgtgttttcggttttatttagtcatattaggccattgtaataataaattgcgtttttagcgtgccattcagttttcggaatgttaaaaagggtgcaattgtgtgttatcatttgttgtttgtgcatgtgtttttgtgtgcttaaccttaacaccttgcggaagtgccgtaaaatacctgaaaaatacaaaaatataaaattatgtgtgtttgcgcattggtatgatactttccaagaccgccaagtgcagtgcccgccgcaggcggcggcgtcactgcttgctgcgctgcaccacctccagcaggtcgagatccgccttttttcttgaacaaatttaatataaaaaagattaatttttatcaaaataatataaatctattaattttttaattaccggtttcttgatgtatgcccaagaatggtctcctggtccgcctcttccgttgcaccgctgcgtgttgcacggtgccgatccggcaggctgcgcttttgtgcgtgtactcggcggtttcactgatggcggcgattgttcggccgccgtttgctcatattcgggaccaattgagcccctcgatttgctgacagatgcttaaatataaataaagaaatgttttttatcaacattttttgatatatacaataaaaaatatataaaattaattcaaatttcactcacaaattgatcgcgtcggtgcagcgtagggttgcgctgcatacactcgtggtgcatcagttcccgctggccgtggaccggacgcatattcagtgcttggtgcagtatgaccaataaccctgtgcgcgttttcagaatacggctaatatttttcaaaaaattcatttattaagtgcaagtggcgtggatatgagtatg

SEQ ID NO: 28669 - DNA, 1712 bp, Heterodera glycines
gaaggaaaagtgggagggacgggggtataaaagggaaaggaaaggggggaaggagggcatttgtgagacggaaaagcgacggatacggcacaatgggcgaaccaaattcaaaaactaatatttttcacatttcaagcaattaataataaattagtgcaattaaagaaatgtccaccatttttccccctcttccgtttgttgccatttttttgttcgcactttttgccaacagcgcaaatgcgtggaaaaaggaggcaaattcagtggagtccgccgacggacacacaaaggcattcatggacctgatcagattcattttgccaatggaagagcccgagggatcggaggaaagggaaggagcaaaagcagagacagaagaaggagcggaagaagcagggtgaagccaaaccaaaccaaatcagagcaatcaattaaataatttaattaatagatcatttggcatgggaggaatatttttatttttttgaaaatttaaagacaaaaattcaattttaaatttgtggaaagcaagtcattcttcccacgccgttcatcgccctttttagaaacacgcaaataccacaaagtaaaaagctcaataattcacagaaaaattgctcgcgggacaatgatggacgacgtaatgagacggaagagaagcaatgcgttgggcgccaaatcactcactcgggcataattaatgaattaattaactaattaatttggtgataattcatcggctcgtcatttcttttcaaatgtttgtaaatataaacaattcatttttcaatataaaataataatttaatcacaaataacaaaatgccaatagaatggcacccatggccaccatttgtggccatccaacggaatttggtcgtgcgccgaaattgccgttttcctcagccgatgtgccaagaatgaggttgtactgcgggtatttggccccaatttgctcccaaaagtgcattcttcgaaggtccatgtccaaaacgacttgcggcattggcaaatcgatggccaaatggcggaagggaaagtcgcgcgttgcgttgggccatcggacggtgtccgacaaagagggatcccttggggggattaagattaattacgcattttaaaattaattaggtatttaatgagcccgacaaagatgggtcccttggggggattaagattaattacgcattttaaaattaattaggtatttaatgagcccgacaaagatgggtcccttggggggattaagattaattacgcattttaaaattaattaggtatttaatgagcccgacaaagagggatcccttggggggactaagattaattacgcattttaaaattaattaggtatttaatgagcccgacaaagagggatcccttggggggattaagattaattacgcattttaaaattaattaggtatttaatgagcccgacaaagatgggtcccttggggggattaagattaattacgcattttaaaattaattaggtatttaatgagcccgacaaagaggatcccttggggggattaagattaattacgcattttaaaattaattaggtatttaatgagcccgacaaagatgggtcccttggggggattaagattaattacgcattttaaaattaattaagtatttaatgagcccgacaaagatgggtcccttggggggattaagattaattacgcattttaaaattaatt

SEQ ID NO: 28670 - DNA, 1382 bp, Heterodera glycines
gggcggcttttggggttgcctgacgttacttgcaaaagatggtcaacaaatttgtttctgttcatagattattaaagctttcctaattagttttttttttatctaaaattagtttttgaaaattcaatgcaaattttggaattaataataaaatttccaattaaataaaaaaatatttgtaggaaattatataaatacattttgcaaggaggattagaatttttgagggggggggggggggtaaaacatatttagggaataaatgcctgattttacttaaaaatggtcatttcttttcccataaaaaatcagggatccagattattcatgaccctgagttttgacagaatcctaatttttatttattttcccgaataaaatatataaattcaattatatattgtatgataatatttaaatgttaaatttccaatagcttcgagatagtgctgaaaaacaaatgtaattaattaagttttcatcttattttaaggaaatggtaaagacattttccgcgttaatggatgcgcacgagataatgagaaaaagtgcccgacagtgttctacacattctgccgggaatcgggtgggaatttgtttaactgtcgccattgtgacgagttggtcgacggcaaagtgtgcaacagctttgatcagttgatcaaccttgatcagtctgaggagcagatgaacagcatttacaagtcgcacagtcatcacagtaacagcagcagcagcaaagccgagaagcttggccctgtttccgccttcacttggatcagcagcaatttgttgctgctttttggtaatggggaaaaaaactaaaaaatatttcggcaaaaaaggatagaatttgaagaattaaatgaaaaaaaattataaaaaaataaaataataattaggacaggcgaaaaatcatttttgcattaaatgccaacaattcttacataaaaataaatttttaaacaaaataaatttattattttaattaaaatgtttagtgacgatgttgattttatggcattaatctgctgctggtgaagaacgaagctgatggatgagtaatgatggaacgaattgaagataatccaatgccccaaaaaagaaacatttcgacccaatgatcgatcaaagcaaaagtaaaacaaaaaaaaatatctttttttattaaatttaattcttttaaaaatgattaaaataaatttgtcgctgaatgattttaaatattagtaattgtgataataatttattttttaccaaattttttttaaatttctgttaaaaatttttctattaactaaaatcataaaaaatcaggaattataataaagtaatattcgaaaatttattatttaattacttaagccaaccaatttttcaat

SEQ ID NO: 28671 - DNA, 1131 bp, Heterodera glycines
aaaaaatgtacgctcaagtgcaagccttttgactaaacattacaaggattgaattatgttattgtaaattttaaatagttaattgttacacgttacatgtcaggcctctgaattctataaaagtgcatcaagtattgcaaaaagtgttcattttttattatgcaattcagttcttacatgttacatgttacatgttagtttactcatttctttttctaatcaaattgtatacgtacacaattattaaaatatgtacgattccttcagggtattaaacaaaaaaaaataaaatttgctatccgagggccggccagccagccatatgccacacgattgggacgcaattgtaagtgaaaatgtttatgtgtgtgttagctaaaaataaagcgcaaatagggttggagtccgagtgaagatgaagcgtccgatgatggtggaaccgagggccaagaagcagctgcaaagagtgcggttgtgcaaccaaagacaacaagcggacgaacgaaaaaagaaggtaatctgcaagccagcagcaacataggaattcattctatctataatgaacaattttttttctacttcacagcaccaaaagaaggctctgtgacagctgcaaagagtgcggttgtgcaaccaaagacaacaagcggacgaacgaaaaaagaaggtaatctgcaagccagcagcaacataggaattcattctatctataatgaacaattttttttctacttcacagcaccaaaagaaggctctgtgacagctgcaaagagtgtggttgtgcaacaaaaggcaacaagcggacgaacgaaaaaagaaggtaatctgcaagccagcagcaacataggaattcattctatctataatgaacaattttttttctacttcacagcaccaaaaaatgcctctgtgccagctgcaaagagtgcggttgtgcaaccaaagccaacaatgggaggcacgaaaaaagaaggtaatctgcacgccagcagcaacataggaattcattctatctataatgaacaattttttttctacttcacagcaccaaaaaatgtcattgttcttcctatcaacttcatcctccactgaagatggcaagcgtaaacgaccaagacaggtgcgccaaaa

SEQ ID NO: 28672 - DNA, 721 bp, Heterodera glycines
ggggggagaaaggtgttgttggttagttaatatagcggaagaagtgggcgaactttgtcgaacaccttttggctgactgaatgcaatttgggaaaattgccttgggcactgtgccattcgcccgcccctcggggctaacaatcagcagaaagtcagttggacggaccaactgaaaactgaaatgaaaggtcggacgaacgaagcgacgccatcaaatttgttatgcaatgggttggaaaagggcaaaatgataaacaatggcaaaactcaaaattgggggaaaagactttgtggattttgggggaggaaagagtgaaaaaacggagcagaaatcggagggactaaacaaacgcacaaaacgggcggagagcaacgcatttgggcaaagatttgggggataatgtgccattgtaaagggccgaaattgggaaatgccaaaaaaggaacaaaatggaaaggaaacggacaaaaaagtgtcgaaaatgacgacgaatttttggagccggggggaggggtaaattgcaggaacatcagcataaggagtgaaagaaacaattgagagaaaggaaaatttgggggattaaggcgattaaccctcgccggaggataagcgatgccttgcgtcgacggagggggggggggcaaagacggcactttcattggcggttaaatgatgcaaattattgaggtcattctttcctcaaagaatgttgaatggcct

SEQ ID NO: 28673 - DNA, 1404 bp, Heterodera glycines
  unsure (1)..(1404): unsure at all n locations
tcatgtttattgatgccggtgaagcttgagtcgctgaaagcgacatttaatttggactgtgaggacaagccctttttcccctattattacaacaagaaagaaaattatggaatacgattggaacatctgccaccgatggaggactattcgccgggatctatgaacaaggataaatttataaaattcgaaaaatggtaagaaaagaaggacaaaattaacaataaataatttttcaggtacaacgaaaacaaggagacacctttttatttggatgatgaattgaaaaattattgccgaaacgacacggagattttattcctgtcaattattgagtttcgaaggatattgattaacgacattactaagggatttgacccactaccgaggagttgtacgaatgcgggggttgcgatgaatatttttaaggcaatgtttttgttgacggagcagttatcgattgtgccggagaagggatatgagcggtgtgatcgcgccagtgtgatggcaataaagtatttggagtggcggagccagcgggatggaattgagatacggcgcgggcggggaacggacgagaggtcaaagttggaaaatataaattggatggatttattgcgaataacggagctagggacaaatgcatcgaggttatgggatgttacatacacggatgtttgaattgttatgacccggcggcggaactgattggaggaaggacggctcaggaattgaacgatgagacgcaggagagattgatggagctgcgtaagactttggacgtcgaagaagtttgggtaagtttatttgacatttgaatttataaattctactttttaggggtgccaaattgaaaaggaactgaaaaaggatgaggagatgcgggacttcttcgacgacagagggaatgagaaggggccgattgatccgcggatggcttatgcaggagggaggacgggaccgatgaaattgtttgcaaaatcggacgagaagaaaaaaaattagcgtttacgatattgtgagtctgtatccgtctgtgaattacggtacagcttacccgattggattgccagagattattatacctaagagcgatgagattaatgttaattggacgagaccggaggatttgaagtatatggggctgtataaagtgagggtcaacccgccgcgggggttgcggattccagttttgcagttgaagtgtgatgagagattattgtttccgttatgttggagatgtgcgtcaaattttaagaaggagacaacaagatgtaactacaagtgccctcatgatggggcacagcggagatacgtggcgacttacaccagccttgaattggtaacaaattatatataacattaaagtaaatttcgtttttaaggcaanaggcattggaatgtggt

SEQ ID NO: 28674 - DNA, 1014 bp, Heterodera glycines
tcataagatgaaataaatagtttggcttaccttttactatattaattatgtaaaagattttatattatacaaattatttttcattttaattttaaaataatgaaaatattattgctattaaaaagaatcaaacggacgctagcaaaataaagcaacaaataatttttgataaaatatttggccaaggatggggcagaagaaaattcatgcccaattggtcaaataattcacggacaaattgctgtcataataagcattatgatcataatggtcattaaaatgatttaatttttgatgaacatttggaagtgatataatcgcttacagaaaagacaggtgtgatttaaaaacagtttttgtttcgtttccattgataataatcataattttatgaaatcatacatgtatgatgaaattttaaatttgttttcaaaattttctaatgtaaaaatcgatgcacacgacgtgaggaaaagggcgaactttgcagctgcactcggcaacatataaagccattgtcttggcctgtgtacagacgacatgcagaattctctgggcaggccttaaaaattcaaaaattcttgatttaaaaacgcgttaaaataatgtgaagaaaataaataagaagaaaggaatcactgacctgtggggtaccggacctggcgtatggattacaggtacggtagttaccggccaattcaacgggaacaagatttgctggttgaggcggacatacatctgaaaattcactatgcattcaatttaaaatacttaatgagacagctttttttaatttttcgcgcattatttgcgccgcaggcacggacatttgcattgccaagcataatcaacatttgtaccaaacaatttacaggtaatttgaaaatattaagctttccaagaatacagcatatttttaaaaacaaaattaaatttctggtgacaacttgtttcagaaaaaaagatgtcctttcactagagatttctgttaaatttaaaaaattttaagtagaa

SEQ ID NO: 28675 - DNA, 1476 bp, Heterodera glycines
  unsure (1)..(1476): unsure at all n locations
aggtttttaatttactttattnataagtttctttataaagtcattgcanctgaagttcaatgttgatatttataaaaaatacaataaccacttagaatattgatacataaaagaataaagaaaatttacattgccaattggtaattaagagaagttttcaaaaatattgctattaagaaaaagttcatcgcaagggacatcaaataaaatttaaaatgaataacaaatttttgctttttaaatacctttagcatagttattccagaagcaaataaatgcataaaaacgatcatggtaaagttttttgatctgctgttggagggattcgatttgcctggttaaaaccattattataatctcaacgaattgaatttatggaacctaataatgaaaaaataaaacgtcattgacttcaaactgaaatcggatatcagatgaaggataatattaaatataaacagaagcctataggcaattcaagcagattcttaaaaaataaaaatgtaaaatcataattaaatttttgccaaatgcagcaattttatttcttaaaatacaaatattaaatgaaattttaaataattattaaataattaaaggtatgctatagtcagctttattaaattatttatcaaaacaaaaactgtattttaaaatttagttaaaaattgaatatttagaattctgttaacttatataaacaaaaagttggaaattaggcttagaaattcaaattgttgaccagaacttgagtaaaatattgaaatttaatataaaaatataacaagaaaaaggaatatttagaatattaacaaagacagcatttattttttttagtacatatgaatatgctagaatatttatattttaatttaataaataatctaattggagagagaaaaaatttattaatcacaaattactgtttaattaataacaaattaatattccgctaaataaattaaattttaatatttattccaaaaagtgaaatgcaatgctaattttatttaattaggctgaattttaatgaattgatcattgaatgttaagaacaaaaaataaataaaataaaagacttaatttaattaaaatgttgatcagcacaaatgacacttttattcgctgctcattactaagaaaacccatattatttaaaacaaaaaaaaactacaaattaatgagccttatgctataaaacctaaatttcaacaaataaattaaataaaaataaaaatatgaatatgaatactaaaattcaaaagactaataaaattaaaaattaagagaggttctaaagaagattattatcataatcagggttcccagattaaaattttcagaagccgaatttggtatataaaattctcatttttttaatgcgatttgttaacagatttgtccaaaaaatggccaaattttatgattttgagcaaatttttaagaagacgaaaagaatttatagggtccggntgg

SEQ ID NO: 28676 - DNA, 507 bp, Heterodera glycines
  unsure (1)..(507): unsure at all n locations
aattacaaaatttcaggaattcaattttttaaatttaattgcgaaaacaattttttttttcctaaaaagactattaaaaaatggtataaattttagtatttttgcatttattttggtaatttcaatttgttttgcctttctccataaattaatccaatttccccctcttcgcccccacttctcttcttctctccgtaacattcaattctttctttccgttcattttgttggtgccaattttttatgaccgtaatttttttcattttctctctccccccgccgtccgtcgcccgccaaagtgcggtagagtcggcgattggattgngcagtgataaagcagagaaaaacggggtgggaaaagagtgtgcaaagcacggagagtgggcgaggngaagccgagagtgagtctcgacctgtgaatttggtattattattttgctctttgcttctctgccctctcactattcctctccccccgcccccctccccaatgacagcgggcgcacg

SEQ ID NO: 28677 - DNA, 1012 bp, Heterodera glycines
  unsure (1)..(1012): unsure at all n locations
tggctgcattcaacaagcaatgtttgtaaaaaatggaatttaaaattttcaaaaaatgtttgaattcggttcggcgtccgaaattgagcctaaagaagaccagattcgtgctaagcacctcggattaccccctgaaanaacattttctcaaaacttatttaaaaaaagttttcgggaccaattctttaccattgcccattaaaatactataaaaatccgcaaatgatgaatttttttcgctttccgcacgtttttcttacaaacccttgtaacaaattgataattgctacttgttttatatgttgccaaaaatgggatggggtgggcattctcttaaatcaccatcaaattcaatgactttttcattacatttccatcccttagacttccatttgacttttgaccattttctccgtctttccttatgcccgccgtcccttccggctaccaagtggtgcagcagggccgtcaaggaccttcgtgcatggacaagctgaagttgggcttcgccatgggtgttctgatcggtggctcgaccggcgttctcatcggcactttcacatcactaaggtttttcggggaagagatgtgcggatttaattaacagccaattaaagacttttttgcgttcagaaaaataattgaaaatttttattaataatttttggtagtactgccgatggttcctcccccaacccattttttgcagaagtatttttgagtcgcaaaatcatttttcttggggttttggtgtcgctaataatgaaatggcattcattttggcggatccaccgaccctaattcaaattattcaaaatacaaattataaatggttattttagagctcgatattttgaaaaaaagcctggacttgggtttcctggataaaatccaggtttacgtcggctctagttattttatacagattcaaaaataaattcaatttcaaagattagaattttttgatcggatggattcaatataggcccanaataaatgccccagaaatatg

SEQ ID NO: 28678 - DNA, 993 bp, Heterodera glycines
gagagggagacgggggcgcaatcgccatttaatttctcagagaatttttaaattttatcttatatccaagaaaaatgactatctcttattttgagaaattttatacgttacaaacgctctcgagcgtgagagggagggcggtgcgcaatcgccatttaatttctcagagaatttttaaatttatcttatatccaagaaaaatgactatctcttattttgagaaattttatacgttacaaaagcgctcgagcgtgagagggagggcggtgcgcaatcgccatttaatttctcagagaatttttaaatttatcttatatccaagaaaaatgactatctcttattttgagaaattttatacgttataaatgctctcgagcatgataggaagtgcggtgcgcaatcgccatttaatttcacagagaatttttaaatttatcttatatccaagaaaaatgactatctcttattttgagaaattttatacgttacaaaagcgctcgagcgtgagagggagggcggtgcgcaatcgccatttaatttctcagagaatttttaaatttatcttatatccaagaaaaatgactatctcttattttgagaaattttatacgttacaaaagcgctcgagcgtgagagggagggcggtgcgcaatcgccatttaatttctcagagaatttttaaatttatcttatatccaagaaaaatgactatctcttattttgagaaattttatacgttacaaatgctctcgagcgtgataggaagggcggtgcgcaatcgccatttaatttcacagagaatttttaaatttatcttatatccaagaaaaatgactatctcttattttgagaaatttatacgttacaaatgctctcgagcatgagaggaagggcggtgcgccatcgccatttaatatcacagagaatttttaatttatcttatatccaagaaaaatgactatctcttattttgagaaatttatacgttacaaa

SEQ ID NO: 28679 - DNA, 927 bp, Heterodera glycines
ggtgatgagctgctccttcatcatgttaacgtaattgctgccgttgagcccgagccgatgggctatgaatttcccttcagcagtgccgaattgacctgggcaaaggtgaaattgggcgagaaggtcatggccgcggctgttgccgcacaggcattcgatgtgaaggctgatctgcggaagcacactctgttcgtcgagccggttgtcatcaacgagatctcaacccgaagcgttgtcatccaattcgtcatgccggtgacgagcattgaggagctcaccgaactgtgcaaaatctgggagatcgatttggcggtgggttgcaaagtcaatccggcagccaaggcaaagccttgtgcgcatgggtatgtgctaagcatcaaaaaaagggcgttatgtcgggggtacgaaattgatgttaaagtgatcctttcctaccaagaagcgaaggatcaggacgcgcaggaggaattcgatcagatgcgctgcggcgaactcgacggatgcgttgaactcatcccgcagacgtcagtcagggcactgcaggaacggatgttcactttgcggtccaatgactgctcgaaagtggcaacggacgaaggaaaggtgggccgaatcatgtcaattttattgggccgaccggtaaaaccggaaagcccaaaggccaataacccattatgacttttggggctctttcaaaattgaaagagggacaggttgacaccgcgctgtgcatgctcgacgaggtgccgcgcctggtcttccaacaggccgggcccggcaccggcaagacgttcagcgcggcatcgatcgtggccacggatcccacggcacgtgtgttggcgctggccccgccgaatgtcgccgtcgtcaagctggtgctggagatgcaggacgcactggccgccgggaaccacgtggagccgatgc

SEQ ID NO: 28680 - DNA, 1237 bp, Heterodera glycines
  unsure (1)..(1237): unsure at all n locations
aaaaaggcttatatgatcttttgttacaggaatgatgactttcagtttgttttcatgcatttaagtcgttttctagacattaaccaaaatttctaaaatttaactttcgattctttgttcgaaatcgggtccggttttaggaattggtcgaaatggatgccatattcgtgatcagcggcccaagtaacccccgagtgtgacaaagaatcgtaaaaaaccgccttatttattctttttttatgggaccagtaaaagtaaccattacccactttttgacagtaagttagtaaaatcaattatcccataacttttcaatttgaccattttaatattaacttgacctattaattgatgcagaatttttttctttcggttatatccagagttcccaagtgtccttatttctaagatttgtccttatttggaggggccggatcttagaaaatgaaaatgtccttatttctaagatttatcttatttttgactcgacgtgcatatttcgatcttattttggatttgaaaataaaaatctacaaaattgaatactttattttttttattgaagcgaatatttttaattaattcgattttcaaataaattatattttacttccttttcttgagtgtgaatgcccaagttgcccccaaaacgtaaaaatctctatttgaagagctacgaaaaggaatggcacataaagaaaagtcgaaaaggcgaaggatttgccctttgtgtcgtctgcaacagggatggcacggaattccgacttacgaaatttttgataaagtcggaattttttcaaaaaattaacaaattttgcacaatttctgttaatatattgcatagaaattttcaatttttttccggcggcgcctatcggtaccgccggactcaaaaaatactcaattttctttaaaaattgctcaaattttgatctcacttgcccagaaatgtatcaggtgctcatttccaatcacaaactgttggatcagatcggtggatgggaaaaatactttgaatgatacttttttgaaaaaaaatattattttcaataataaaaccgttgtaattgtgcaaatttgttgtattttgcttttataaaagccaagctttttaactggttttacaaggtaaaaatcgattttttcaaaaaatcttatttttggggtcaaaatcttagttttaacctcgtttgtccttattttgtttgaaaaaanaaaaacttgcgaaccctgcttt

SEQ ID NO: 28681 - DNA, 979 bp, Heterodera glycines
atcactgattcattcgttcatttattgtaaaacataaatggaacagaattaaataaataaataaaaaggaaatgacaagaaaatttttaataaataaataatttttttagtaaaaactcaagggcatagatttttaggggtatatttttcgggtacactcaaaaatctcgccgccgaaatcgcgccgcccaaaatctcgccgggacaaaatctcgccgcagaaaatgttgaccccaaaatggcaaaattagtcttttttttggcgaatgctgaaatttttaaataacacagagaaagttttgactcaaggagcaaaaaaaaaaaaaaaaatattcgcattccctccccgggagcaggagtaaacatcgccgccgaaacgtcgccgaggcaaacatcgccacaattttcgaagattttttttcttacttgtcgaaatttgaattaggcggaattttggggtgcacccattttttagttacatgcgcaagcataagcctagccgcccatcctttttccctaacagtttatttatttgtttttgtcccatttatccaaaacaattcctcacaaatattcaaaaaatccgtcaacgaaattttgtcccgacgaaattttgggttgcaccctatttttccgggcttaacttctcgaaacgaatcgattgttatatcatttgtgcccttttttttacgggcggttgacaaaagtgggtacaccccaaaacgtcgccgggacataacgtcgccgcaaaaaaaaataaaatttttcaaaatttcaagaaaattgtaaagtattttagattttttgaaaatctaagtcttaataaaaactaaatttagttgaatttccggaaaaaaccccaaaaaacttgaaaattgtttttatttccttaaattttcttaataaaactaattgttttttaaatttttctagaattttttcgtattagcctaaggagctaaaatttttgacaattttt

SEQ ID NO: 28682 - DNA, 1389 bp, Heterodera glycines
aacatttctgacacacttccgaactcggaaatcgtagaaaaagtcgggaatttagaaatcattgatcgcccctcaccattcatccattggcgtacatccggaatgtattcttcgttggtattgttgcagccctcgcctcggcagaaccaatggagagcaatatccatcattcaaattttgctaaatatttgtaaaaaaaatgcatcaaaaaatctagcgcaaaatcaatggcacaaagtgaaaaaactaagcaaatacttaaattcatcttcgtttttgagtatggatcatttgaaagcattgaattttaatggtttttgacattaaatctcaaaaattgccttatttcagacaaaatctagtttgcaaacaggtcggcatccgctaatttgttaaagtttaaagttgaaaaaatttggactgaaaactttggcttgtcagaggattttttccaccaataattttgtgtcaattacttagtgtttttcactttaaattttgttacctatatgtatgaactttcggaaaaagggcctttgggtttggggtcgtccaacgctaaaagtgctcatatgtactgtatataatgcgatgatttgattgatggttagcattttgtacaaaactcgcacaacgtcggtgattccgttcccaaacgacctttttgtttgtttttttgctttccgcatgacttttattcggcgcgcttttttcaaaatttttttgacaacacaggctgagagatccagcgctgtgcataactccctaattacagaaatccgtgatcctaatcagtagagacaaacaaatcagcaatatatatattatatatcttttttctgctaacttcctacatatgtacgaataaaaatgcaataactacgaaaaagcacccttaagaatcgacctaaattaaaaaaaacaccccttaaattggaaatttcacaaatcgaaaaaaccagtaaccccattcgtaattacccgggcctaaaaaggccgtaaaccttgatatagatacacattcattcggattagtacttttccttccatcgcaatataccggggtttttctactaaatcataccgggccgaaccggctaaaattgaaaaagcatgatattgtgttgcagagattttttttgttccacgcttttaattttggtgtcacattaatcactgcatttcttttttttagcgctcaaatactttcttttgtcgtagcacttttaaccgttgaaatatcgacaaatggctgaagaagcggtcgttgtgccggagatggaatcgcttgctctcacttcttcgtcaccgtgttcgccggtgctctctctgctcagcgaggaaatgcttcagaaagaggttttttgacacaatgccacttacattttc

SEQ ID NO: 28683 - DNA, 573 bp, Heterodera glycines
tgatgagggccaatttttttttttttttacttttggacaaattagcgaacaaatatttatttgagaggggagagatgctaatggagaatggccacggatggggggggggcaagtgcccgatggccaaatggccgggccagacacgaaaagcgattagagagggagtgggaggaggggggggggatgggcgagaaaaactaatcggctaaatgaaatgatctggctcttaaatctcaagaaaaagtaatgaacagtacaaatagaaatttttaacgggtctaggaatgagattgattcactatggctcagaaaaagtaatgaaattgaaaaaagagagtctaattaaaaagttattgaataattaaactttgtaaaaaaataatgaaatgtgaaaattcaaaaaaaaaaaaaattttttagaaaaatctaatggatgaaaattctggtaaattagaattaatattttcaaaatgaatattaaaaaaatgattggcaacaaaatatgtagtaaaatcaaaattgagttaaaaatgcaaaaaatgaaatgacagctaaatgttcacagaaatgagg

SEQ ID NO: 28684 - DNA, 541 bp, Heterodera glycines
ggggaggggtggggggtgcgtcgggaaaagtgggttcgggatggaggatggtgcgcgggacggtgtggggtcgggttttgggggtgtgggatgggggttgcgcgagattttggggtgtgggggttaaatgcgcgggagtttcgccgcgcgggattgaacccgagagtgtggttggcccaacgcgttaaccagtcggccaccagtgcagttggcggggccgtgatattttgcgttaaatagcgcggccccctccccgctggacaccgccgccctttcgccgggcagcgcggaccccctctcttccacggaccccctcttttcactgtcgcggggccctctccgtcggcgcggagcccctctcttccacggaccccttcccaccattctgtcgtccgtcggcacggacccccctctctctccgttgtcgcggatctttccccaccattccgccgtccgggcggcgcggaccccgctcttcgacgtacccctccccatcattccgacgtccgtcggcgcggaccccctctcttccacggacccc

SEQ ID NO: 28685 - DNA, 1538 bp, Heterodera glycines
  unsure (1)..(1538): unsure at all n locations
tataaaaatcaatattttntaataaatttatttgctaaaatgctttccagtttgttaacgaccagagctcgccaattttccggaacaaaaattcattgttcaaattttccaaattagttgactactcttcatctcccatggaaatttttatcgggaaaaaaacttttgtgctccttatctgaagtttagtgtctttattagatttttttagtttaatttcatttgcgaaatttttgttttttttaatattatcagtttattttatttcattaatttgaatatgttttcatacattccctccctgccattgaaaaaagccacaattaacccttccttatcttccgttcataatttttaatacaatagatttgagttttttaattgaactgcaatattaattataataaatttcattgtttgctaattttaaaaaatcaattaaaaaaatctgaaaattctctcatattccaggattcacttcttcataatttcatgtcacaaaaacttttttgccatattttattgtctaaagttggttcctttttttcttaatttactgtaggtgttgagacttaataaaaatattttattgtaatctttttaaacattaatttttaaatatttttaatgttgtttttttcgtgattcgatcaattttggaaaggtattcatttgttaatctatgttgatggacaacagctggtcatgaatagtcaatttcacagggaaaaaattccttaataaagcacatattttggcatttttgagtttttgcacaatttcagcattttttagaacataaaaatcccagctctagaaaaaatacatttttttttgtaaatttttggtcattttttaaattattgtaaaaaatttctttttgtatttttataaaaaaaatgtaaataaattgactcattttaaagattatttaataattaaataaaaatatttatttaactctgcgtgatgcagacgattctgagttctcaatgatatcttttcatttcaataattcttcagcgctcatctttctgtttaaattttcactaaattggcataaattttgttttcaatttttgcgaaatattttttatagtattatcatttttattactctatttttgttatttgagtgtttattttttttaaagtaatatttttacatttttactgaagattttatagaatttctacatttatttgtcgttttggaatgtttcttgtccactgaattcatttcagatccgccttttacaatagtcaatgggagaatatacgctatttgtcattttatatctttaatgttgttccactatttttcgaattttttgcaagaaagttccttcattcttgaatgcaacatgcaaatagtgcaatccttttttaaagatccttaataattgttttaaaatattagtttattttcgaaatcgacgtgccatataaatttgaatcactctgactgcaatattattatgataattggttttgacaaatagtaaattattttaatattaattgtgtctataatttaa

SEQ ID NO: 28686 - DNA, 1342 bp, Heterodera glycines
aatcaccgaagagaaaatttgctcatttttgggaaaatcgaaagccatgagaatcttccaacatcgtaagtttacgcatttattcttttttctttgcatgcaattgtttagatattggtgatgggatggtccttcacatggtcatccgaaatcaggcaaaaactttaaacacgcaaacatttgtaattacttaatgtaaactgtttacagccctcaacttcgacggcttccgccgcaacaactccctcagtttcgactgcgccgacgggtggcgctgcgccgaacttagctggaactccgccgtcgttaggcggaattggcgatcttttcaacaaccctgaacttgttcaaggcattctgaattcacctttcatggagaggtctgcgataatgtttgtttataagttcataaaccattttagtatgctggccaacccggacataattcgaacgatgctgagccaaaacccccagtttcagcaaattatccaagtaaagaatgggtcattttttgttgccttatcatgtgttgttattagaacaatcccgagctgggccacattatgaatgaccccggcactatgcgacaagccatggaaatgattcgcaatccaacggctcttaatgaggtgttttcaattaactaaaaacaattcattttattttagttgatgcgtaaccacgaccaagcaatcagaaatctgcaagttcggacaactcacatatatttaaccttttaaattcgtttacagggaattccaggcggcgaagcggcgcttcaacgcctttatgaacgcgttcaggagccgttgatgaacctaacacagcccggcgctgacaatgtcgccggttctggtgcacaaaatacaacagatgcttcaatggccggtacaaatattttggaaactattgagttaaggtaacatttactttcgtgcagcttctcggagtcagcatgccggagttgaaaatgcacaaccgttgccaaacccgtggagcagcatcgtgaaccaacaaaatcgtcaggctgcgggttccgctggcaatgcgccggcacagggcgcggcttctacaggcttaccatttgcaagtaaagtgaatgagtacagaattgtttatggattggacaaaggtctacaaatactcattgtttagacatgatgaacactccggggatgcaaagtttgttccgccagatttcttcgaaccaatcggcaatgcaacaactgatgagccaggacaacatgcgcaatttcacccaaatgatcggcagcaaccccgccttttttcagcaggtcaaaacaatttgtcttttgcaaacaccggcaatggtctataattg

SEQ ID NO: 28687 - DNA, 923 bp, Heterodera glycines
  unsure (1)..(923): unsure at all n locations
cgttttcgtaccgccattttcgtaccgccgttntcgtaccgccgttttcgtaccgccgttttcgtaccgcaattttcgtaccggggacattttcgtacgagttcttgtacaagcgtcagattcgattagaaaaacttaagaactaatagaaccaaaatttatcattttttgtttcccattcataaaattttgtagaaaattcataactttaacaaaaataacaaaatccgggacaataaggtcgcatctcatagtttcgggaaatacacacgaagaaaattgttaaggttttcgggactgacattggcattggcataattgtgctcattttgagggacaatattgttaagtccatctttactgaatttgtggaacacatagagtagagtgcaccatcatgcaccaatttatcattatttcgttttgttttaattatgtagttaataaaagcataaattctcaaaacattaaaagtaattacttaaagattaaaaaaattatttgaatgcaatttttttttgcaaatcaactcatacgaaaacggcggtacgaaaacgtcctggcccggaaaaaatgttttcttttgatggttttttgactaacgacaattttttttgagtaacatgatagcaccctgctgatcggcacaaaaatcaaagatggattggcccagctctgatgctaaaatgagtgatcagaatcaatgcaatagttttccacttctgttcttcgccttctcaggcgttaacactcgaatggacatgtcctgaccaaattaatccatttgtggtatcccaaattgcaaaatatgtcacatggaagcgtaaaaacatgcatattattttcccaaattgatggaaacatttctctaatccttaatttaagctaatgaaaatggctaagtaatacaatttttgaaattt

SEQ ID NO: 28688 - DNA, 1327 bp, Heterodera glycines
  unsure (1)..(1327): unsure at all n locations
atgaatgacttttntgttttccatttcgcattttcaccacttttatcgttctttcatacaaattattattcccttttcccattttcattttcacatgggaaaaatgcatttttaaactttgtttttgtgtattgattgtcacacgtgaagtaattaattaattaattgaatacaaataaatatttatgtgcgaactaaaaaagtgttttatccaatgttttttttaatcaattaaattgcgttgttggataaggaacgaagagattttaacatttggtgataataaaataaaacagataaagtacatataattgttaagatttttaactcagccatacaataaaaaattttacaaaataaagcctaagcttaagtaggcccaagcaagcctaaagcttaggcctagctattgtacgagttgtttgtgtacaacttgtcataatacccgaaagacaactgttaattttaaataagattaaaaaatattataatttattttatttacttaataaaaaatattatagtttattttatttatttaattaggtatttttatttttataattcttgtaaattgttgtaaaggcgaggtcccaacagctgatttgtctgtcagctgagatgtccacagctgactggttctgacgcgtttaaaagtaatgtattttttcatttttcatttttggtatttttatttttttgtaaatttttcaaaaaatcattttgccatcaaaataagcattttgaggtcaaaaaccatcattttgaaaaatgtattcaaaatgaaaaaaactgacaaaaatgttttttgcggcgtgctttctccagaaaacatttgaaagtggctgtcggtgtgccggtaagcgccgccaggaaaattttgaaaatttgaatgcaatattatttaatttctcaaaaatcgcatctcaaaaaaatcataagtgacaccccccatgacctgaaaacgtcctgacacgttttttatcaaaccaattaaattcagctttttctatctattttcctttagtactctgtccttcttttcgtactcttttttttgtgaccattcttttctttttattcatttttttcaaaaaagtatttgcagtttttcaccgtgtacattcataatttatttcctcgtcgtcacaaattatccttctgctgcttttattgtgttatattctttacttactcaatttaatcattcatatttctcttttgcacaatgccttttttgcacctaatctcacaattattttcatttaacatttagaaattactcaatgacccgtaaaaggaatcgtttaaaaggcaaaggcaaaag

SEQ ID NO: 28689 - DNA, 978 bp, Heterodera glycines
tactacatgaaactaacaaattaaagtggctttaaataaaagttaagccaaattcaaccataacaaaataccaattaaattctcatccatcagtgatttactgtatttcctaaaattgagccctctggggctcaatttttcaaccctgctcaaattatcaaaatttaacccagaaatactaaaaattggcacttttttgatgtaaaatcacatacctattttgaatgaatgtaatttttacttttcaactaatccttgcaaattgcacaatttttcaatattatttggggtttttatcccattttttatacattatttgtctcggataaaattctcatttaaaagcaatttcacgacgtcattttgaaaatgccggcgaatgttcgaggggccaataaaatgactaatcgaactttgaggaaaatgtgagagaaattaggttaaaaataaaaaataaaaatatgtggttacattattttccacaatttagctggatttgcactgatgtttggatggacattttccccctttttgaccatcctcaactcggactcaaattggcactgatttcgccgcgtttcgatgttttagtggacacgcatttcaatggcggcacaacaaaatttataattcgaaaaacaatcaaaattaaaaaagtctttggcgcggaagaacccaaactttgtgtgtttaccggcaatgcaaaatttgtggaattttcgctgccggaccgtccgttacccaacaaaattcgctttaatttactttgcattgagtaatttttcaaattataattattattaaattagggttcggatcccgcccccgtcacccccgcccccgccggggacgggacaggttttttggcctcaccctcgcaattcccgcccccgccggggacgggacaggttttttggcctcccctcgcaattcccgcccccgcgactctgacccccgcaatccccgcccccgcgagtc

SEQ ID NO: 28690 - DNA, 1574 bp, Heterodera glycines
  unsure (1)..(1574): unsure at all n locations
accaaaatcccccccccccaaataacaacaatttctcatcgattattccgtccatcgttaacgccgcaactttgggtctttacgttggcgtcgcaactgcctccaccagtcgcccctcctaaataacagcaatttttcatcgattctcttccgcccatcgccattatttccacaactttggatggcgtttaatttgaaaaaattattcatttgttttatgcgattaaagattttacaaatttaatatttaattctttaattttttacttatattcaaataaaaattaaatcccgaatcccgtaataaaaattaggaattattttctctcatgtgaggctttttttcattttattctaaaattatttaattttttaattaagcattcacaaatgattgaaataattattctttatgtattattttattcaatcatcatgcggctttgccaccgaataactgcaaagaaaactactttcatccaaatcttcgtcaagactcttggtggaatgacgctgactatttttgcccattccttggacaccatcgagaatgtgaaggcgaagatccaagacaaggaaggcatcccaccggatcaacatcgtctcattttttgcggtgggtttttagtgaaaatagttaaaaaacggcatttgtaattgttaaaaagaattactaaatcgaaaattttgaaactacaaattttatttgtttttattgtaataataaggaatgtaagtaagaattactaaaacatganaattagcgaaaactaatgcacttttcaggaaaaacgctcaaagatggtcaaactattgccgactacaacatccagaangagtccactctttacctgcgcttgagtctgataggaggagcgcggacgaggcggcagcaagcacaagaggtggcttaagggcactgtcttttgctcgcctgacggcgggcgctttgctcgcctgatggcgggctctctgctcgcctgacggcgggcgtatgctcgcttgacggcgggcgtatgctcgcttgacggcgggcgcttgctcgcctgacggcgggcgctttgctcgcctgacggcgggcgcttactcgcctgacggcgggcgctttgctcgcctgatggcgggcgctttgctcgcctgatggcgggcgcttttgctcgcctgacggcgggcgctttgctcgcctgatggcgggcgcttttgctcgcctgacggcgggcgctttgctcgcctgacggcgggctcttgctcacctgacggcgggcgctttgctcgcctgacggcgggcgctttgctcgcctgacggcgggctcttgctcacctgacggcgggcgctttgctcgcctgacggcgggcgctttgctcgcctgacggcgggcgcttgctcacctgacggcgggcgctttgctcgcctgatggcgggcgcttttgctcgcctgacggcgggcgctttgctcgcctgacggcgggcgctttgctcgcctgacggcgggcgcttgctcacctgacggcgggcgctttgctcgcctgacggcgggcgctttgctcgcctgacggcgggcgcattgctcgcc

SEQ ID NO: 28691 - DNA, 1610 bp, Heterodera glycines
  unsure (1)..(1610): unsure at all n locations
aaatgtgaccaactgtaacagtctaaaaatagaaaattttttctttgggcaattttgaattaaatcttagcaaaaattagtaaaaataattgagataattaattaatctgtaatttcttttgtaaaacattgagtacccaataaaaataataataaacaatggaattaatgctatttattcaaagtgttagaattaagtaattactttccgctcattaccgttctcatctgatgcgccgccgattgattcaattggtttatttatttgtttttccccttctctaattagtgccgtaatcgatggctattagatgcactatcatacaaaaatgatatcccccgacgcacatttcgcttgtccacaaggaatgtgtgcaggtctccgcccgccatgaactcgctgacaatgcgcacgtcgtcgaacgcgtcgcggtagaagccgacgtactccaccacgcgcgggtgccgcagctgcgcgttgatgcgcgtctcggcgatgatggactgcacgcggaacgcgtcctttgacggcactttgaccaccacccggcggaattccgcttctgcgaagcggaaacggccgtaatacacgcgcgagttggggcctactgataaatatggggtgaattgaaaaaataatttacatgtttaaatttgattataaccggaatagatcaatttctcaatgtcgatcactgttgggtccaattcatgcacttttattggattgaagtacaaatatgcttaatgtcaattaataaatgtaatgaatgcaaaaacttgtcatgacaagactcttgattaacatggctcttaaaattgcattaattggcggacgaaacctaattgagaaaattcaccaagaatgaccaaattgagctaagtaaactgattagttttgacaatgcaatgccaaaatggacattaatgagagccagattatttcaattaaaaattgtgcttaattaccttttatgtccatgaaaaagccggcagtgccataggaaaagcgacttcgtcgcattttgaacaggaaaaagatgaaaaagcaccttaaaagagagaaaaatgaattgaaattgttagaaattgctgacgaaagggaagcagaaaatgccaaaagaagaaaaatgccggcaaaaaacgtaaacaaaaatttggagaggcaaaagtgagtgtcaaaatcagcggaagaagcggacagacaatcgtttttctaaattataaattaaaataatgagttttctaattatattttgaaattgacttttttcattagttttgccactggcagcccaagtctgttcactccgccaagttctcgcgcaattgtgccaattagggggtaggggcctaattaattaagcaacaattagagaagataatgaaagcatatttcaaaaatgataaaccatcatttttgctgtttgggcacacttcgttaaagtcgtcgtaatcaatcgcccaaatgtaagtgccgcccaatcccttctgccggagccattccatcttaattanatttaatcacaatttanattgggaactaattgcttggctttgctaatagaaaaccttaatccgaatgctccgctggtcgtcataactgaacc

SEQ ID NO: 28692 - DNA, 855 bp, Heterodera glycines
tgtttcaccggtcgtttcccacaaaacaattaaagggcttttggcttcagttgcgttgccccgggggaatatcctttcggtaatcactcatccgtccgcccaaaacttccgcgccacattcttttcccttttgccgtgccgttctctcgtccgatgactttgctaatccgctggtccccccatttaaccccctcaagcataatccccccaattacaattacgtcttttcccgctttacctttacctgtctcttcttcggcttttccagtggtctctgcgctccttggttcattttttggtaaaggccacaagcgttgcacaaataatgcccctgggcgtcgcgcctccacaagggtgtgctagtgacaccgcaattaacgcattggcggtcctccaaaaagccttaaaacgggggggggggggggggggttgaattgaccaaagcactgatttgatcaaagctgctgaatgccataatcaaaacccactgggcttcttcgcctttgttcccccattgtttccgtcgtttgcgtttcgtcccccgtcgccccttcggtgacttttcttcttttgtgcctttgcttcgttctgatggttggccatggacagcatcaaattgttgcaaaagggctgctgcagaagagtgggcaattccacctgaacaaaagaaagtcactgagcagcagaagagggaagcggcggataaggatttggactaaatcctcccgaatttgagaaaataaaaaacaaaattcgctttggaatttcacttcgggcgagtcgacggtcggcaggggaagaggcgccgaaatggaggagacggcggaagaaaaaagcggaacacgaggcggagga

SEQ ID NO: 28693 - DNA, 1056 bp, Heterodera glycines
atttatcctttgttatacctagtgggaacaagagggtggaacttcgatatataaaaccaagatggaaaaagaatttcgtactgtgattttacaaaatttaagctatttttcagacaaaattattttttgccacatcattattcgaaaaaacttttccagcagtgggtcgttgatcaagcggcccgcgttgaatggggaaggttaaattttattagaactcatcaaaaagaattaagagcatgcagttataaaggattagaggattttctttttaataaagccgaacaaacaggatcaattattcgaaaacaagtaattttaccttcgtcttttttgggcggaccaaggaataaagaccaacattttattgattctatggctattgtgggagagaatggcaaacccgatttatttttgacatatactataaatcctgaggatcctgatataaaaaaatgtttattgaaaaaccaaaaaacagaagataggccagatattgttgcacgcgtttttaaattaaaatatgataaattgattgaagaagtcgtaaaaggtgaaatttttggtaaagtgattgcttattgttgggttgtagaatttcaaaaaaggggtttgccgcatttacattttttaattaccttgcatccaaaggacaaatttaaaaatacaaatgacattgaccgattcattcatgctaatctcccaaataaagaaaaagaaccatttttacgttcattagtaaaaaatttatgttgcatgggccatgtggagaataaataaaactgctccatgtatgagaaacggaaatatgcgaacggaaaatgaatcacaaaattttgcaaaccaaattcctagatgtttagaagatatttataagctatttctcagtgattaatcagctctcaaaaaagttgtcagtttaaaaccgcaaaaaaggcagaattttcaaagttttttatttctatctttttttatagttcgaaattttctgtaatttttagtaggctaatagaacctgtgaagagctttcgaatgatatcaagattgtttgattcg

SEQ ID NO: 28694 - DNA, 987 bp, Heterodera glycines
ggggggacttcccccgaaaacaaaaaaaattgatttttttcaagttttccgtttgggggtttccaaccaattatgggaagcaaaattccaccccagaattaagtacagggtatagggaagttattcccgaaggattcggtctccccataaatctgggcgcatcgggtcgggggggactgcccgaaaacaaaaataaaatggattttttcaagggtccgtttggggtactcaaacaattatggggagcaaaaatccaacgcagaattaaagtacaggctatagggaagctattccggaaggattcggtctccccataaatctgggcgcatcggttcggggggactgccccgaaaacaaaaaaatcgattttttcaagtgtccgtttggggtactcaaacaattatggggagcaaaaatccaacgcagaattaaagtacaggctatagggaagctattccggaaggattcggtctccccataaatctgggcgcatcggttcggggggactgccccgaaaacaaaaaaatcgattttttcaagtgtccgtttggggtactcaaacaattatggggagcaaaaatccaacgcagaattaaagtacaggctatagggaagctattccggaaggattcggtctccccataaatctgggcgcatcggttcggggggactgccccgaaaacaaaaaaatcgattttttcaagtgtccgtttggggtactcaaacaattatggggagcaaaaatccaacgcagaattaaagtacaggctatagggaagctattccggaaggattcggtctccccataaatctgggcgcatcggttcggggggactgccccgaaaacaaaaaaatcgattttttcaagtgtccgtttggggtactcaaacaattatggggagcaaaaatccaacgcagaattaaagtacaggctatagggaagctattcccgaaggattcggtctcccccataaatctgggcgcatc

SEQ ID NO: 28695 - DNA, 1245 bp, Heterodera glycines
  unsure (1)..(1245): unsure at all n locations
aggattatcccgattaattagctaaatgctttttaaatctgagtaatatttcagtaatatattttttcttttattaaaattatagtaatatgaatctaatatttatntagttaataatttacgggtgaagcgttattttctttttaatggattaaatataaatattgaattatttacacacaacataaatttttttgatataattcctctatttttccaaggtttagagtaagatttagtgctatatttgcctttattaataaaataataaaaatatctttctgctataagttcatattactaaattaaattatatctattaaatatttaattttcatttgattaatttaaagtattatttactaaataaatctatttcttgtataaatcattgctaattatatttaaataataataatttgagtattatttttggtattcatgatttgcattttaggttaatttgtaaattttataattgccttttttggattttattttttatcgaaaatatttttttacaatactttgaattttttatttttaatagattattttatgtgatatttttttatttatacaataaaaaaagatgtcttctttgcgatccgttgttgttaaaattatttgaaatttattttataaaatttatattttcttaattttttataaataattattttactttaattgccacatacatacattatttttaacgtggtgcgacatttgaggatttgacatttgaggactgacatttgaggacatacacattttcaaaaaaataaataaatggaaattttattttatataattataaaaagaagaaaatgcctttcccaaagggccagtggtaaatttggcaaaagtctttaaggacaaccgaataatcctaatcttctccacgtacagcatatagcatgaggatgccgagatcggcatttgaatttttctcgttggcagtttccaaaatcattggcattagtcggtaatgcaaagatctgagatattttaaagtggatttccgaacattcctgctttgggttcataacttttctccgcaaattccttccagataatcccaggcaattatcatgtttccattcctttcccatttcaatcattcacattaattacccaagttgaggtggaacaataaagatatcttggttaatatttggattactacgatcctgagaatggccagcccgtttcactatatgtaggaattgcagggaatttcag

SEQ ID NO: 28696 - DNA, 773 bp, Heterodera glycines
ccgttccttcgtggtcagagttttcagggtcggagtggtcatttcagtggggatttcaattgtgagatattcgttagagaagtcaatgtccttctcgccaaaatggcacaagcatttgtccttaaaattcttggcattaaatatacagtagttttatgcagaatcgtggacactgacatattactttttatcaaaaggcactgattgagcatttcaacaatctccccctctctcagtcgatgaacacttaattatcgcgctacggccgccatcatttctagccataccatttctcctccgtatccttaccccccccccccctataattaattaccaccccttccccgaaacctattaattaccagctgccccccatgattaattagggcggcaagatcaaagggaccccctcccccgaaaacccattaatcattttcacaccccacgatgagagtggtagggtaactactaattataaatgcagaatatgttatttacatcgcttataatttattttcattgaaagaagcaacagacctttcaatttatatccctttttaaaatttaaattttattttatcatatcaatttatgtaaaaattgtcattaatttttttaagcattttaaaaatccaattttttgtttgaaaatgtttttccttcgcgcttttatcatcattgccgccgcgtccacctttggttggtaaaaagcgaaaagggcgggggggggggctgtaaataaatgttatggaaaaattttactccagaaaatt

SEQ ID NO: 28697 - DNA, 1551 bp, Heterodera glycines
ttttgagttgaaaaattttttcaccaaaaatcttctaaaaacatgtctttaggggttatttgggccgctgatcacgaatacgtgatcagttttcacttttgacatcgctaagccctcagaatccctgtgtgattgggattctgggacatcttctgaagaggggggcggcaggttcgaatccggccggtgtaacattatttttctgtgcatttttacattattttcaatgattttaattaatttaaaatattttgttgagttaataaataaaaaaatttttacattaaagaatttaattatttattttttgaatttgtaaatttcatcttaaattattaaatattcaattgttaattttcaacgttattttcaattaataaatggaggatttaaaaatactacaaaagtccgcaattttttgctctataagataaattttaattcatatttttgtcaccttcttacaaattgctataaaaataaaagtgattttgtgctttgggtccaaaggggggtgcacatggtttttaagtggaaattttttttcaccaaaaatcctccaaaaatatgtctttaggggttatttgggccgctgatcacgaatacgtgatcagattttacttctgacatggttaagacctcaagaatccctgtgtgattggggattctgagacatcatttttggggagggtggcgaagttcgagtccggacggtgtaaattattttctttgtattttttgctgtttctacatattttaattaattgaaaatattttgtgttttattcgttaataatttataaatgttttacatttaaaatagttatatatatatatatctttttaaattaagttagtaccaattttttgaaaatttcaaacaaaatgacaaaaatcttctgattaagaatatttttttggatttttcgaatccggaattggtcgaaatagattcagaatgcggggggggggggagaaatttaatacatccaccaaaaacaaaatagtaataaatcgaaatttttgccgaggtttcaaaaaaaaattttttttttgtagttgaatttttcgtctggcactgacaacagctccaccggcgccgccactgcctcttcactgaacagttcaaattcatcaacaacaacaacaaaaacaagcgccaatgatggagatgaactgcgaaggattaaaaggaccaaaacaatggcaacgacgacgaccaccactgacagtggaaaaagtagcagcaaaagccgaacaacaacaaccaacacgacgacgacgacgtcgagcagtacaagcagcagcaaaaaattgttggtggtggatgaaaatgcaaaaacgtgtggtggtgttggcattggtgctgatgggtaagaagtggttgttacgaaaaaaatggaaaattggaaaaaaaaatttttttttgaattaaattttttttcgtaaaaaaacttaaaaagatttgaaaactaaaaaactttttaaaaaaaagttgaaggtggccatataaagctacgaccttctcccagaaaatttttttgaaccatc

SEQ ID NO: 28698 - DNA, 1272 bp, Heterodera glycines
  unsure (1)..(1272): unsure at all n locations
agcagcagccgatgngagatggtggagggnccgaccggaagaagaagcgaaagcggcgtgttcttttgtgagtttggccgacaaattcccaaccgaaggaataaataggaagaaattcattttgaaattgccgacgcattgggaagaaatattattaattaatttaatcaatcattgttttggaatttaactggcaatttgttcagttcaaaagcacaaacttttgctttggaagcacgcttcagcacacagcgctatttgtcagctgcggagcgggaaaaattggcgcaagaaatccaattggcaccaacgcaagtgaaaatatggtgagacagatttttattaaaattattatcaattgttaatttttatatatatatatatatatatattaaatattttaattatttcttgttaaatatttaattttaaattggactgtaattttttaatttattaaaataaaattaactctgaaattagtgacagaatataaacaaatatgctaaaatgactttcaatcaaatcattaatcattattaggttccaaaatcatcggtataaggcgaagaaatgtccgagtgcaagcgcaagtccaaccgtcgctgagcacaactttcatcatccacaacaacagaacgggaaaaagtgtgcagccgatttgacgacgatgagcaaattgttacagcagcaacagccgcaatcatccgcctcattagcattgtcgggtaattaatgaatggttcccataatataagccaaggatgggagccggtgccaaataagtcaggaacagaacaaactgcaaaaaaaaatcataaaccggaatgtaaaaaatggagattaggcttttggctatgttaatttttgaccgggtttatatgggattcaaatattttttaaatattcattttgacataaaatcaattaaatagcatttttagcttggtttggaaataattgggtttttcgctcaaacttgaaccgagtttttgtgaaatgttttgtccatattaatccggtatttaataatcataatacaaattggaaaccgtccatccttctccctctgataggtgatgatccgcaacagcttcaccagcaaattgccatgggcacaatggcgcaacaattgcagccaaatcgggcaccaatggcgcccaatgcggcggcactttactcaccgattggcacaactttaatggngccaaccgcaacaatgggcgctggtattgggaacattcgtccacatggcaccacaacgatgttgcc

SEQ ID NO: 28699 - DNA, 1107 bp, Heterodera glycines
  unsure (1)..(1107): unsure at all n locations
atttttaaatctggtgaaatttaaagtgaattanatactccaaattaaataataaaattaacaaaataaattaattnatggaattttttgtaaattagtaagattttttaatataaattatcattttttatagacaaacattctgcttcccttcattgcaagaacgacaacaataattcatcacaacaaattggcacatcaacaacaacgaaaccatccacaaattatgccattcaaaaggcacaatttttttaattgtgatttttcttttcatgggctaaaaaattctaaaactaacatttttaagcagataatcattaataataactaaaattctcatttttcaaatttttctttagtaaatttctcgggcatccagaaagaaattgcttggattgaaaactctttttttattccaatgaaattataatattttgatttaacaaataacttcattggtgtttcattaatttttgactcaaaaatgtaagaaatgacaaaattattgccaaaatcttatggaattagcttaatatgctttataatattaaaatgcccaaatgctttcatttacaaaattcgactgtattaacttttccaattttcatgataatttaattttaaaatgaaactaaattaattttccatttttaaaatccattttttcagctcagtgctataagcagcggaaagcggaaacgacggcaccgtacaattttcacggagtaccaactgtacacgttggaggaggtgttcaccgcctgtcagtacccggacgtacaaatgcgggagcatttggcggacaaattaaaattgcgcgaagaacgcgtggaagtacgtgaaactattttttaaaaatttaaaatattttcgtaaattctaaataacataataaatagtttttaaaggtattttatttttctaaaaatatttcgcaatttttaaaattttttttttgcatttgagtttttggacaaaatttattatgaaattgcattttgctgatttctcgattttttaatttttgtgctgattttggcattttgaagaattttctaaaaattttcagtgattttcaaaaatttattaacaaaaaagcaataaaaa

SEQ ID NO: 28700 - DNA, 833 bp, Heterodera glycines
  unsure (1)..(833): unsure at all n locations
tatacatttaaagtatntcgatgggatgatnntatcaattatctaataacattngnnatggctggaactaaaaattgtaagaattactaattttattcttttaaaattaaatggcaaaaaaaaaaggctggatgaagcagtttcactggatcgttcaaagcatcaggagagagagcgagagaaagtgggggtgaaacaaatttggtgatccaaaaaaatgagctgactctgatctgcctttcagacagattatgatgctgcccaggggatatgtgccgacgcccttaaaaatttcggcaatcgaaaatcggcattcggacggctgaaaaattgggcaatcggcaaccagccagaatgttgactcatccctggtgcatgtgatgcatgtatggtactgaatttcgaaatcgaaatttctgggacatatcccgaagttttggtccgcaatggcggtcatcaaacccgaggaaattcacagaattggggaagcagttttttcaaatttaaatttttttaatatgacaggtaaagtggctcattttagcagtaaaaaaaactataataggtaggccaaaatttggggtatgaaacaaactctgaacaaatccgtctacaatttcattttgatcgttccattaacatcgaacgatgaataactttcgatcaattccttcgcaattccgatggctcagcctttttgcgcggtttcttcggatttttggacctgcttctgcacttgcagcttggacaagtgggtgcattccgatggatcagctcctgacatgacgtgcacaccttgaacatgataaacaaattaggcaaaacttttgtgg

SEQ ID NO: 28701 - DNA, 978 bp, Heterodera glycines
  unsure (1)..(978): unsure at all n locations
acgcgaaatgagttgccaaatgaatgccaaagtgagcacaatttgcatcaagtgaagtagagacggtgacgcgaaatgagttgccaaatgaatgccaaagtgagcacaatttgcatcaagtgaagtagagacggtgacgcgaaatcagttgccaaatgaatgccaaagtgagcacaatttgcatcaagtgaagtagagacggtgacgcgaaatgagctgccaaatgaatgccaaagtgagcacaatttgcatcaagtgaagtagagacggtgacgcgaaatgagttgccaaatgaatgccaaagtgagcacaatttgcatcaagtgaagtagagacggtgacgagaaatgagctgccaaatgaatgccaaagtgagcacaatttgcatcaagtgaagtagagacggtgacgcgaaatgagttgccaaatgaatgccaaagtgagcacaatttgcatcaagtgaagtagagacggtgacgcgaaatgagttgccaaatgaatgccaaagtgagcacaatttgcatcaagtgaagtagagacggtgacgcgaaatgagttgccaaatgaatgccaaagtgagcacaatttgcatcaagtgaagtagagacggtgacgcgaaatcagttgccaaatgaatgccaaagtgagcacaatttgcatcaagtgaagtagagacggtgacgcgaaatgagttgccaaatgaatgccaaagtgagcacaatttgcatcaagtgaagtagagacggtgacgcgaaatcagttgccaaatgaatgccaaagtgagcacaatttgcatcaagtgaagtagagacggtgacgagaaatgagctgccaaatgaatgccaaagtgagcacaatttgcatncagtgaagtagagacggtgacgcgaaatgagttgccagatgaaatgccaagtgagcacaatttgcatncagtgaagtagagacggtgacgcgaaatgagctgccaaatgaatg

SEQ ID NO: 28702 - DNA, 1729 bp, Heterodera glycines
  unsure (1)..(1729): unsure at all n locations
ataaaaacnttttaactggtttaaatatntcggtatttattcatttatattgactaaatacaaaatttattttaatctcaattaataatgattatttttaaattacctttgaaaggtttacataaaaaaggaaataaaataattttgacaatttattattttccattaatgacataattaggtaatattcaattgacacttgctggcattgaaaaggcatatcgatgacatatgccatgcaaaattaattaaatttgcttattgctgcttctggtcacttcatttgataataacagcggtgacaaacaacactaaaatttaatactattttactacataaaaatttagttttattattttaaagaatatttaataaaaatataaaaaaaaattaaaatttaaatgcaaattcaaaaaaaaaataaaatatgagaaaaatggggacaaaaaattaaataaaatattattcttcgcataattttttttttcaaaaattttcttgcttttcaattttcgaatactttattaaagcaagtttaataaataaaaattttaaattttaaaaatgacgacaaaaaaatataaaatttttgaaaaaatcagtaaaataaaaccaaatttaatgattttatgttttatttctttttaaaagcaagcttcctatgcttttatttgtagttttatttgggcgtttctgtcgtcttccgcccgtccctgggtcgcctgctccctgttttgggcacaatgccaatcccatccggcacggaatatccggcacaacggggggcaggggtgggaggggctcagccaattatatggatttgtcggcgggaggttttggcattgatggaaaaccttgagaaagcaagaatccgacaatttttgtctggattttgtttggaatccaattgagtggaccgccccgagagcgaagggacgggaaattgggacacacacaatttatgccaaaaaaacggcacctggcggatgcctcatcgcgcgatgcgttgaattataggcgaaaagaggggggggggggggcaaaaagctctcctctaatgggatttattcattcatttttcatttattagtcccgctctgtaattaatgagaaaaattttaaaggaaaaatgccaaatttggaaaaaaaaatattaatcaatgggaattaaataggcgaaaagagaaaacaaaaaattgctcagtgagaggaaatttttaaatttatatctaaattagaacttaaatagaaaatcactttttcaaaagcattattttaatttgagtgggtgggggtgggtttagtctgagccaactttaaagcatcataatttattatcagcagctggccaaatttgaaaagcatcaaaatgttgatatgtaaatcagcagagtttggataactgattaaaacattttttttattacgatttatcttcatttccctctctccattaatctacactattttctctatttttgtgtgtcttcactaccattcattcgtgctgggtcgtttcctaaaaaccgccaccatgggcgtttcctaaatccgccagggcgtttcctaaaaaccgccaagtgggcgtttcctaaaaaccgccacttggggcgtttactaaaaaccgccaatgggtagaaaaacaaaaaatgtaagacatataaattcatatcttggcccaatcgcaaccaaattaatatttcaaagtttcattcaatagctctatgt

SEQ ID NO: 28703 - DNA, 2166 bp, Heterodera glycines
ccactggtaatgaaggccgggacactgtatgtgtcgcaatatgcacgaattgaagaggaaatgttggagtatcgttcccgactaaacactttgcccttagctaccttacgaactatacaaagaccaaacattacagaagtgattaagctgatcaaagctgaagctaatgagacacttggtgttgtgttcggaaatacgggatggattgaaatgatgaaaaatattccggaaaaggcacggaatattgtgaattacgtaaaagggatttcagtggtactgattgcagtcggaataattatacttacagtaattgtcatttacgtaattgtaaagtaccgatttattattatggcgggactcagagcaggcacaattatggcaagagtaattagagcaatattcggtgttaaaaggagaacacgagttgccgccgtgccaacggcaccagacctagactcagtggaccaagaagcatacattttggattatcttcccccaagagttgctgcaattacaaatgaccctcgaaaattaccatcaatacgagtttatttaaatggtttgccaacttcagcgttggtcgattcatgcgctagtgtttcttattgtcgccaaagaacagcaattaaagcgggactcgaaataaaggacttaggcagtgaaaacccaaatttaacagcagcaaataattcatcaatccaaattattggaaaagcaaatgctaaattacgagttggagatacagaaacaggaaaatgtgcagaatgggaggtaacgttattagtgtcaatcgataaagattgtcctggcccattattactcggactgccattgttaagtgatttaaagggtgtaatagcatttggggaacaaaaagtgcgtattggtgaaatttggacaaacattgtctctgttcttgaggccgataaacccaatcaaattaaagttagcctcgatcagactgaaacttttgagccaagaacggaaaatattattacggcaagagtaaatgagtgtttttcagcaaatcaaaattttttggtaaaaggaattaaacatcagtacccaagtataataatcggtagaactttggtcacaccaggggacagtaattgtgttacaatacaaattttgaacgctggaaaaatgccagtaaaagtatataaagggtcaaacatcgcggaattggaaatggtcaaaattaatgctttaccaggggatgaaattccaccgaaagattatattccccccgagacaaaatggcatgaaaaattaccgtatttaccgacagaagggaaaaaacgactaccatctgaaagaataaatctgacggggacaagattgagtacaaaatcacaaacggaactaaaaaatattgtggacaaacatgatgaagcttttgtgggcgatgatggcaaaattgggttatacaaaggaccaattgtccataaaattgatttagttcccggttctttaccatttcattttcgaccctacagatacccacccgaaacgcagaaagaaattgaaagacaaattaaaataatgttggaccagaatatcataagagagagcgaatctgagttcgcatcccctatcgtaatggtgcccaaggcagataagaaatcttggcgttttgccatcgattaccggtcgctaaataaaatgacaaaaaagcgagtattccatttaccaaatattcaagaattgttagacttaatgggctctaaaaaatattacacatcaatggacatgcaaagtggtttcatgcaaattccaatgtcaacagaagacatagacaaaacggcatttatttcacaccttggcatttatgaattcataacaatgccatttggtcttactgctgcccccgatacatttcaaagagtgatgaattcacttcggaggcgcctaacagcagcaatgttaatttatctggacgatattataatcggaagcgaaaccgaagagatgcatttgattgacattgaaaactttttaaaattattaaaagaagttggatttaaattgaaaatggacaaatgccattggggaatggcagaaattcgatatttgggatttttgctaagtgaaagaggtattcggatggacccaagacaagttcaaacggttcaaaattttaagccaccaaaaagtctaaccgaa

SEQ ID NO: 28704 - DNA, 2043 bp, Heterodera glycines
  unsure (1)..(2043): unsure at all n locations
agtttcaatgtcgtcattataaagacattcaatanccataatgaatagaccggatttatatgacaaaaaaatcgtaaattaaggacaaaacatggacaaaaaaaatacgaaaatataaacaaaaatttttgaaaattgatttgaatttttgaaaaaaaaaattcgtaaaaccataaaattttttgtcaagaagaaaaaatcattttaatattggaattatatgttgaattccataatgagaactccttctttattacttaaggaaaaatattaaaagtttgaaaaaaaaattgcaaaaattagaaattttctgtaaaaagtaattttaagcgaatgttgtcaatgaaatttttttcacaatttttgtttttttcaagagtttttgattttagtggtgtattttccataaatttccaaaaatttcccatctttttaggtatgtgtttttgaaattttcattaaaaatgccaaaatatggatgtaaaaaattgaaatatggataaaaacctgaaatatggaaaaacatgaaaataaaacgcatcctaaaagcatcaaactaaatttattcattgatatattgtgaattaaaacagtacattttttgtagtttttagcaaaataaatcaacagaaaaaagacaaaaaaatactgaataatgatcgaaagctaattagtagtgctgttcgagaccaaaaatttcccgagactcgagaccgagaccgagactcgaccccgagaccgagaccgaaaaccccgagaccgagacccaaaaaacccgagactcgagacttttttcaaaaaattttcctattcgcttaaaaatcgttaaaaacattttttgactctattcttaactaatttttggtttttttttaaattttgattcaatttggtacaatatttatcatttcaaaaacgcacaaaacaaaaattcattaaatttaagtgcaatttgttaactgatttagtccaaaaaatgaaaatattttacgaatttaattgttaaaattatgattgaattcccaccgaaaaatgaataattttgaaaaattagaagaaaaacaactacttggaggggaattactttttttttaaattttcttatttcttaaaaattatgaaaaattactattacgtttgaaataattgcatttattcaactgaaaaattatgaatcaaaattaaaatgcaaaaaaacagagctcccagatcaaaagtttcaaaagcctcatttggtatgcaaaaaagcctcatttttagtcaaaaacctcatttttacaactttattcaaaacacgcttattccaaaaaacttttggggaacaaggggggccggcggtgccgataggcgccgccgggggaaaaattaagaattttgaccatatttttagcagattttcattgaaaaaaattcttaattttgtgaactttggaaattggttattttatgaaaaatttaacaaatttttttggaaaatttgggtcagattttcgttttttccccaaaattttatgggtcctcaaaacctccgaaaatggctttgataagaaataataatttagggagaaaaaaacacctaaaatcactttcaagcactggaaagatatggggtatgatttgagtgaaaaattgtgaatgaaattggcgtaaagaaaattttattgaaagattcaaacaactaaatattaatatttttaaatttttattgggaaaattcccggtttgctttggttctcgtcccgtacgaaaatcgagttttccgtccctgtcccagcttctcaactcccggcaaatcccagtccaggaattgtccaaaatttccgcactactctagtttaaattcatcagagcttttggaaaagaacttcttactgaatgataaaggagaattaagctccttttaagtgtttttcaaacatatttttaatcattgagaaaattttgccggttcttttatttctttttttatcgttgaattaaatttttcatataaatttagtcattttttcaacaaaacaagttccaccatattttttataaaag

SEQ ID NO: 28705 - DNA, 1462 bp, Heterodera glycines
  unsure (1)..(1462): unsure at all n locations
catccaaatatacttattatttatattaatgaaaaaatttgatccggaaagcgaaacaaaaaatttcaatttacagagagagtcctttttaaatgtaaaaatggtaaataaccattaagtgcatggtgaagtttgccaaacattaataaatacatttaaaaaatttaaatcacactgctttttgctgctgaatttgttccgacaaagcaataagcattggcaaatttgccttttgtataaattcaaaggacgctgtaacttctgcaactttttgatttgattttggacattctaaaatgattataagcagaaataattttattattaaatatattttaattcattaaaactttagtgttaacgtgagaagctttttgcttttcgccattacttttgtttccttctcaattttggcaattctgccactgaatttggtcagttctttaataatatcaaagatggaggagacaatgctaaaacaaaatttttaaatttgggtgaaaattattttatttatatgtgaatttcagtatttattaccagttgtttgagcagttttcgtgaattaattttttgtccatttaaaatttgaaaataaagtgaaaaagacaggattaaaatcattttaacctttaaattagaaaattattaagctgataaacttaaaatatatatatcaaacaaagattttatttcccaaatgtatgatgattattacccaaaggagaattggctggagatgggatttggaaaaaccgagaccagcagcaggagttgggactaaacagaaagagaaagggagggaggggtccgtggtgtagacactcgcccaaggggagaattttgactaagacatgcaaagagatttgtacaacttaacgccacatgggcgtttaataaatccgtaaaaaatctaaaattgatgaaaaaactaaacagttattttaaatttattagctactcaaaagaactcaatcaatgtgccctagtcaaattaaaaaaaagtacagtaagaaactgttaaaccgtaaattcacgaccggacctgcccggaaccgggaccggccgccaaattactctctcaaaagaaattacaacaattaattcaaaaaatgattaatataaagaaaaaaatgttggttaattttaaataaataacgaaatgaacatgaaagaatcattaaccattcgtgaatgaaaatgggcatacaaaggcaaaaaaaaaagtgaaaaggcacggcaaaatcaaaaaacggaaactgtgcagaaagggattaaaaataaagaactttaattcgacaacgacactttattcgataatcattactagggatgcgatttttaggcacaaaaaatcgcgaaataggcacctaaaaaggcagaaaaaaatcgcaaaataggcattnaataggcacaaaaataggcaaaataaattntttattaacgctntttaggtaacaaa

SEQ ID NO: 28706 - DNA, 807 bp, Heterodera glycines
  unsure (1)..(807): unsure at all n locations
aataattatctcaacaatttgtcgggaaagctgaataaatttctgttgcaataggcatattggcacaagacataaatgtagagcaggcacaaaatagaggaaataccaaagattaaaaaattcttgtttatgccccactctgctttggctggccataccttgccagagagtggagatagaccctttgttgatacatttggaaatgtcgagcccgcctagcgcattcgaataacacaaaatttgtttgcatttgccaccaaacaatccgcttatgacgcgccgaatgaaaattcacaaaaatttggcaccggaaaaactgcattttttcatgggccagcataataaagtaaaccaaaatgtaaggaaatttaaattggtcatgagagatgtttagttttttatttgtcccatcctttttctgggaaaaaacttttcgagaaaagctgaaaaattttccacttgcatcagaagcagactcaaattcttcaacacacaatataaaaatattacgcaagaacttatttttacatcctttttagaaatgctacataaatttttattgtaaatagttacaaacaaactttttttcactgccaatttctaccagttgccaaacaaaaaggcgatagttaagcattgagatataaaaaaatcgtctagaataattatctcaacaatttgtcgggaaaagctgaataaaatttctgttgcaataggcatattggcacaagacataaatgtagagcaggcacaaaatagaggaaaataccaaagattanaaattcttgtttatgccccactctgctt

SEQ ID NO: 28707 - DNA, 961 bp, Heterodera glycines
gaagaaacacaagggcatcctccgatttttcgctcattttaggggggggggggcgcctctcccagcacttcgactgaattagttggattgtttgctccgccacccatcttttatccaactattttttcgcgttaatttgcgcgacttactgccgcataagtgccgacaacaaatgccaaggtttgatctccgtcctgctcttgccaaggcattctctgtgcttcgtcaccaatcgcgcgtttcttcgcctctccgtcggcccttttaagcggaggaccatttgcactcgttgccgcccccttgtacgagcagttgtgttcggtaaccgtcctaaacgcggaattcctttggtttacccctacaaatgccacgattggtctgaggtcccaaactcaaaatagtcccagattgaaacttcttttgacgttaataatctcaaatccatccaaattcacttgagaaatgtccgatttccgtccgctgtcgtgtgaattcgtccgctgcacttttcgccgccctttctcttccgaacgcagcgccaaaaaatccgactcccatctttgctgatggtttccctctcatacacaaaaccatcatgcacatgccttctcaattcactttttctttccctggagcaattagacatttcggactctaaatttgaggaatgcttaacaaatctcttaatatgaaaaagcaccaatgaaaaagataaatttaattgtaagaattcgtttatgaataggaaaaaaatgcaaataaaaaatatttcagatttattttcatttatttacaagaacaaacaatagaaacaaaaaacaataaaacagtacacacaatatcacttagttttcgagttcgtaagtttgtagtacaaaaggaacacttttttactctgaaaacaaagaaaaatttttgatatgttttctaagaatgaatagagcgaaattctcaccagtgg

SEQ ID NO: 28708 - DNA, 1865 bp, Heterodera glycines
ctgaaaatgccaaagaaaaagaatggcaccaccgaccaatagggttgccttctgatcacaaattatttcccaattcgtaggagcaagcgcataacaacgaaggaacttgaggtttgttttattgcagttttctcgttttttccgatattaaaaacatatatatggttttcttgtgaattatacaacaattttaaagaaatttaagatgtgggccttaataaatgtggaacattttaaattctccagcaattgggcatttcaaatggaggggttattcctaccaattgtttcaaaaaagataattaaataagcattttcgctgccatggtcaaaatcgacacaaattttgcctaaaataacaaattttatgacttttggggcatattttgtcaaaattaatgcaccggtcaaatatttgaaatttgttaaagtttggatcattttcaattacccaatttcttttttctcttaaaaaatcatttccctcctcctcccatttccaaggacatcaaattgaaggagctcaaggagttgatcgacacagggttcaacgaggaccatttggaggtgtttcggtgttcggtgaaggggcgaagtgtccgtgcgtcgaaatgctttcaaaggggcgaatttgttgtggagtacaaaggttttccgggcaaaaaaaatgcatttttatttccaagttttttgttcatttaggcgacttaatcagtgtgaagacggcccaactccgcgaacaacggtatgccaaagatgagaacgtgggctccttcatgtactactttcggcaccgggacaatggtacggattggatcattggtttaggagtcgatatttcgaacaatttcgaagtcgaacctaaattgaaagttcaaagaatttttgttcaaaattacatgaatcggaagtattaatgctgttataacgcacttttaactaatttattttctgctttttttgtcgaatttggctctacgtgaattttacgggtccaaatttgagtcacgaatccttcaattattttgatcaattccgatttcctaatctaaatttgaacaaaaaatcataatttgaaaaattcaaaatttcgatttttattcgagttcgggttagggattagaaattagtcaaaatacacgtcagattcgtgattagcgacctttaaaaccccggataaaaaattatcatggtttttatcttaaaaaaattttgcaaaacaaaagggtccccccccccttttgtttcaaaaactgtcactttccatatagtgcccaaaattttagggtagtttaggccgatccattatgaattttaaaccgattttggacatgggcacaaaagtcatctaacaaccggtggtgaatttgtagggattctcaattaaaacaccgattgtggctttgaatgggatgccaaatccaaaaattttagattttgtgtaaacatcaaacaaattttagtgttttgtatcgacgcgaccgatgaaacgccgtacaaaggccgactgatcaaccacagctatttgaagcccaacctcaagacgagggtattcataatcgggcggacatgtttaataccccgatagtttcttaatccgctccatgaactccatattttcttcccaattcgctattttgccaggtggccgacttcggctgtgacggcttccatttggtgctcgtcgccatgcgcgacattgacaacggcgaggagttgttgtacgactacggggagcggcggccctccgtgctggcggttaacccgtggattttgggctcataggtggcgagcagtgtgcctctatttattcttttcattcactactgttttttctttcctttccttttgtcctttttgaaacg

SEQ ID NO: 28709 - DNA, 1520 bp, Heterodera glycines
tttgatacacaaattttttttattaaaaattttttttttaatttcaacaaaacacaatcatgattcaaatacccgccattattataaataatatgttgccattattctggcaagagatcaataccaatggaaaagtatttagggagttagtgttaagtaagtaaaaatggtcattttagaggtcggcatttttgatggcagatttaaagaaaaataaattagatacagagccagagaaatagtgattaaaaagagcaaagttaggactataagaacacaaaaatataaaattttaattacaaaaattgaattattggagagccgagactgaaagtggtctccaaaaacggcatttttcaagaccaccaagtaacataatgttttaaaagtggttttggaaattctgaatttaattaaacaaggtaaatcgggtatgttgagttcgtatagtcttagatttggtctctgggatcgcaacaaacctgtacagctcgaacttcatgcatggagttggagcagtacaagctcaggttgaaaagataggtccctttaaggccatattcggattctactggtctaaattgtatagaaaaactaagattttgttatatcagctttggtttttgaccataaaaaattcgagaaaaattagtgggccaattttcaattttggcatggtcgggaaaaaaggcagaaaaatctatcaatcaaataaaaagtgaaacgatagtaagatataaaagaggacaccatgaagaacaaaataaaaaaagaatcatttaaataggcgcagaaataacggagttatgaatttttaaaaattggaaaaaatttgggtatcataaattatgttccaccctaaggttataaagcagcacattagaacatttaataaatatattatctatagaactaaaattggatgaattctttatttttcataaaaaaaaatctatataattgaaactatcaaagaaataataaacttaaaataaattttaaagaaaaaataattattattcattaaaagaaatgaaaattgtataaaatccttgttttaatgtttcaattcattttgacatgttaaaaaaatataataaaatttaagaaaaattaccaaaacatacatagtgtaaatgaaattgcaaattaatataagtattttttattataaattcatagaatagaatgaatgatattagatgatattttcatatttgtgaacaagatataaatgcaattaattcatttaaaaatcaaagggattaaataatttatattttacaatcagtgtatcattaaaaacatttttagaaatcgcaatataagattagattattaaaatagtgacagcaacaataaaaattataaaatttaaatattaaatattaaaaaatatttctagtttcagaaacttaaatcaaggaattaattacatatgggcagtaaaaacaaaaattatgtatccataaatcatcaaaagttcataaaaaatattaaaaaaagaaaaaaaactaact

SEQ ID NO: 28710 - DNA, 1398 bp, Heterodera glycines
  unsure (1)..(1398): unsure at all n locations
cagcggtatatataaggcctccaaagctctcaaactcattgtcttcaaatcgtttctcatcgatacagcccctcctgggcctacctatttcagtccctcccctcttaatgcgcgttattttaccccatcggtcaaatctgatcattgtcgaacccgtccatttcagtacccttacggtcatttaattatctgcatttcaaaagagtttgttgttgnttgcgccgcaattccactttcattgtttaatttgtgttgtgtgtgccccccgtccgtcccccggagggctgactgatcagttacaaaaacaaatttttaaatacggcatgggaaaatttaaaattttaacgggggaatttagggaaggggttggaaaatgcaaaaaaaaaaagagaaaaattttttattaaaaaaattgcgatttgtatccgcgaaagaaaaacctgtttaaaaaatttaccggtggatcagcgaaaaaagttggacttggaaaaaatttaaaaaatgagtcatgaaaaaattacaaaaaattgtgctttttgtatccgccggaagaaaaacccgccggaaagaagaagacacacggaaatgaggaaacggataaaaatgaatgtgtaaaaaagatgattaatgaagtaaaaatgtttcatgaaatcggagaaattcaaaaaaagaggaggctaaaaaaatttaatctgaaaaatttcgaaattctaaccaaaaattggggagggggaaccaacaaatttgaaaaactggatggaggcctgttggagaatttggcatttagacctaattaggccgaaaatagaaatatttttggcatttagaaatttaaaaaatttaacaaaaataaaaaaacggagcctagtggctgatttaaatttattaattaaaaaaatatatgtccacctcttcaatggtggcaagctcatcctcgggctgttgagccatgtaggtatttcttgagaaaattttaaatttttgaaaagttttcaccaaaatttactcacaataaaaatttggaaatttgtgggcccgccttggacgaaccggcgaacagggaaagctctcggttgagcaatttgcggaactaaaattttgaatttttttgaaatttctaaatttattttttttaccttgctggaggccatttcggtgagcgaagtgcggaacgatttgacctgttaagcaaaaaatttttaatgatttaattttgtttcagatttttaaattggtgccaataacttttcttanaatctttgaattattttttagaaaataataaaaattttagataaatttgaaaatctanaaaaaacaagtgtaaagtaagacttatttattttttctannatccttnncaaacatatttatcttttttatatatttttgaaaaaa

SEQ ID NO: 28711 - DNA, 1899 bp, Heterodera glycines
ctcggatcccgttttggattgtcgttttcgcacataacgggggggcgatcggtgcggtgaccttagattgtcgttggtttaccaagcaaagcttgtacggagattgaccatcgcctgtcgctgcggctgtgcaacttcgctgtttcgatttgatttgcgatgagagtcgaatgagccgttgttcccgttcaaaaaggaacatctgccagtggaaaaggttgctttaaacagtgatttgtcgtgtctttgcgcttactttgtatctcttccgccatgctatttcgtccgtctcgtcgtcctcctccgcttcctcctcatcactgccgaactcttccctcaatttggtcaattccttcccaaattctttcttgcagtgatttttccacaaataattcgtatcctcacggagatactgaaaaaaaacgaaattgtaattcattttagccttagcaaaaatagaaattgcaccgggtttttcttctccagtcgcatcagctgttcggcgttagctttctccatgatcggccttaacacatcaaaaggaatgtcgcccgtctcatcgattgctaaattaagcaaattccatgctcattatcagtctgtggattggaataatgaataggccgtcttgcaattacttaaacacccttttaaaggtgaaataaagttttggtatgcaattgttcatgatagggctaatccaaatcatttttgaaaattcccattcccaaccccgaattggcaaataccgtctatgttgttgagcaaaaatcgcatgcaaatgtcgaaaaggtagggcacaatttgcacatcgcccgtcgtttttcgccttcccgcataaacgcgtttcttttctttgggcgctttgaacatgtttatgttgaggtcggtgggcatggatatttgctgattgtttggttggggttgggctaacaataagttagcattcattagttgtttccatttaaccaaatttagaaatttaccaatggacggtccaaagttcgatggattcttcaacgaatccagcaacgaattttgaatgctttctgcggagggcatcgatacctttttgggctttttcggtaaacttttttgtactttgtcagcagcggcaagttgggaggcgaaggcgtcgattggctgctcatcctcgaaagtttcgcagtcatcgtctgaaccggactaatcttatcaaattatatggtttatacattcccaagggtggcaagccgatatgaaattttttagaggttttcaggaaagctaaaatttctgaaaaacttggattaaaaaaatttaaataggaaaatctctaacgatggaacgttagaaaattaaagtttttggtcttttaatttcaggggggaaacgaagcggggtgaagcccactctttggatgtgtttcatccattcgctcgtcctttacgcaccaaagtggtgtctctttttcgcttccgtttcttcgttttgtcttgctgattgtgagagtaattttgttgccgatgaattgttgggtgttgttgcgtgtttcgttggagatgcttcttcctgcggttcctttttgattctcaacacaagtgggttcggtcgcgattcctcgttgtcgtcgtctgtccctattcaattcggtcttcgcttgcctttggtcgaccctccgttgtccccaccttcttcgctttgactcttcgctctctcctcttcctcccgctcgtcttcctcttcgcgttgtgtctccgtccccattttcattctgtcgttgcgcctcttccgccgcgcgtgccgtctccgcctttgccacttccttccacctggacaccaatccggccgccctttcgccccacacgatgatgttttctcgagagcattcaccgctttaccaactcctttaaaaaataa

SEQ ID NO: 28712 - DNA, 1067 bp, Heterodera glycines
ttggcattggacaattattattttttaagaatatttttgtaaaagcaaataaattgttcaatattattgaattaattaattatttaattgaattaataaactttttccattctattaaaatcaaatttgtgtaaatagtttagtattgtccttttttaaaaatatatatttttaaatttttaatacctttcttttaaaaaatattatatttggtatttttgaataaattatgaattcttattagaattattactgttgattcaattaatctattataaataagttttaatatgtccacgtcgtcgtgtgattttgatcaaaatgtttcaattaaataaattttcaaaaatacatttatatttcattaacgcgtattatttgatttgattaaatatgattttagtcttgaatttaataatatgcttttaaacgaaaacttcagtcaattatttcaaataaaaactgagtaaaaacttgaatccagcactttgaaaatcctggctttattttgagtttttagtttccgcccgggattcccaaatcgcttttttcatttctcgtttacggaattttttacatcgattttatttgtagggtaaaatttaccaacgttaatcaaaaattctgaacaaaaaaagaatgataatgattgtattggtttattggtgccatgtgatttcgtcagaagtgatttcgtcagtggttgatttcgtcagaagtgatttcgtcagaagtgatttcgtcagtggttgatttcgtcagaagtgatttcgtcagaagtgatttcagcagggattgatttcgcaagtaattaatttccgtcagtaattgatttccgtccggaaaaattatttttaaaaaaaatttaactattcaaaattaaaataaattccaaaacgccagtgatattgaactaattatatttcatatgacctattaatacatttgtatgcaataaataatgaaaatatattcatacattaaaatacgaaattttatttgcctcttcactctccattggtcactcttatcagagaaaaagaattcttttttgagggttgcctctg

SEQ ID NO: 28713 - DNA, 813 bp, Heterodera glycines
tctcttttttgtgagaaattttgtaccataaaaatgttcccagcatgggcagaggggcgcggagagcaatggccattctattctacagggaatttttaaatttattctctatgccagaaaaatggttatctcttttttgcgagaaattttgtaccatacaaatgttcccagcatgggcagaggggcgcggagagcaatggccattctattctacagggaatttttaaatttattctctatgccagaaaaatggttatctcttttttgtgagaaattttgtaccatacaaatgttcccagcatgggcagaggggcgcggagagcaatggccattctattctacagggaatttttaaatttattctctatgccagaaaaatggttatctcttttttgcgagaaattttgtaccatacaaatgttcccagcatgggcagaggggcgcggagagcaatggccattctattctacagggaatttttaaatttattctctatgccagaaaaatggttatctcttttttgtgagaaattttgtaccatacaaatgttcccagcatgggcagaggggcgcggagagcaatggccattctattctacagggaatttttaaatttattctctatgccagaaaaatggttatctcttttttgcgagaaattttgtaccatacaaatgttcccagcatgggcagaggggcgcggagagcaatggccattctattctacagggaatttttatatttattctctatgccagaaaaatggttatctcttttttgtgagaaatttgtaccatacaaatggtcccagcat

SEQ ID NO: 28714 - DNA, 1096 bp, Heterodera glycines
tttaaataaaagtcaatagcatccaaatcaaaaattgtttctctgactctctcccctcccctctcctccctccctctcttctccttcgtccccttgtcggcattcattcgcattcgatccctccctctccaccccattttgcatatccctccaatgttgcgcttaaagcggcacttccccggggaagacgatgaactgatgcttatcttccattgatttttcatctaataaaatgactccgtccattcttcccgcctttcttttctcttgggaattcgcttgtgccccccacgatttttaattttgcaacaattctatctgcagaaccctcacataagtgggaaagtctaactttaaccggtttaaggaaaatcatgaaaggtttcttaagtgtcgggtcatcttcaaatttagggtaaccgatgaatcggttttttgtaccgaatgaattatcattcgaattgtgtcacatccggacgaatcatccgtcatacaatagcactgaattcacttcttttcttttcaaaatttggattttctttggaattctctttaattaattgcactctcaatttctttggtatttttctgctccgaaatgctccattgttttcacgttgtcagatgaaataattttggatttgctttatccgcttccattcttttgcttttcattaaattcccttattatttttcattttgattgcattttccaccttaattaatttaatggctgaatgattagattaactctcttttttcccttacggtgaaaacggactttggcattccgtcggttcgattcattttctgctgatcaatccgaattatttgtctttgatcattctcaattcattgttctcaatgcgataatgcacaaagaaagggaaatgtttttttgtttgcaaatgattcccttccgccgctatgcgttaaaatcgtttaaataatttgcgtttttgcaactgatcgacattaattaatcccggttaatttaatcgtattaaacaaagctttatttttggattttgtgccgatttaaatgttttatgataattgggacccggcgctgcccatagacaccaccgggaaaact

SEQ ID NO: 28715 - DNA, 1194 bp, Heterodera glycines
gtcccgtacttttggtccagcgcaattcttcaccggagcgggatttttaagatttccggtcccgtacttttggcccagcgcaattcttcaccggagcggaaatattaattttccggtcccgtacttttggcccagcgcaattcttcaccggagcgggatttttaagatttccggtcccgtacttttggtccagcgcaattcttcaccggagcgggatttttaagatttccggtcccgtacttttggcccagcgcaattcttcaccggagcggaaatattaattttccggtcccgtacttttggcccagcgcaattctttactggcgcgggatttttaagatttccggtcccgtacttttggcccagcgcaattcttcaccagaacggaatttttaagatttccggtcccgtacttttggcccagcgcaattctttaccggagcgggatttttaagatttccggtcccgtactttaggcccagcgcaattcttcaccggagcggaaatattaattttccggtcccgtacttttggcccagcgcaattctttactggcgcgggatttttaagatttccggtcccgtacttttggcccagcgcaattcttcaccggagcggaatttttaagatttccggtcccgtacttttggcccagcgcaattcttcaccagaacggaatttttaagatttccggtcccgtacttttggcccagcgcaattctttaccggagcgggatttttaagatttccggtcccgtacttttggcccagcgcaattcttcaccggagcggaaatattaattttccggtcccgtacttttggcccagcgcaattctttactggcgcgggatttttaagatttccggtcccgtacttttggcccagcgcaattcttcaccggagcggaatttttaagatttccggtcccgtacttttggcccagcgcaattcttcaccggagcggaatttttaagatttccggtcccgtacttttggcccagcgcaattctttaccggagcgggatttttaagatttccggtcccgtacttttggtccagcgcaattcttcaccggagcgggatttttaagatttccggtcccgtacttttggcccagcgcaattcttcaccggagcggaatttttaagatttccggtcccgtacttttgatccagcgcaattcttcaccggag

SEQ ID NO: 28716 - DNA, 1013 bp, Heterodera glycines
gaaatccctctaacagattttgactgctgccgctgccgtgttcaatgcctctgcacccgttgaaacggctgctggcggttttctgatgccattgcccccgccgccgcatcaccacgccaatgccaatgccaaccacgccctgcacgcgtcgtcctcaatgcttttgcctccggcaatgccacaacattcgcagcagcagcagcaaccgccgctcccatcacccgtggcactgctcggcacttttggcactccgcccgccagcgacaaagtgatgacgccgccggtgtgtccgccgctgttgcccagtccgaccacaaccattgcgccgacggcactgcctaacattgctcattgtcagcagcaacagcaggtgatcagaggggatgattagaaactcatccaacactgacaataatcaatgatcggaaatcaattcctctcttttccctcataggtttcggcacagaatggcgcgccaccgctgatgcccgccatggcacggatggagacaatgttggcattgctcaacgcattcagcaacagtaataatggcacaaatggagtggtcccccaacagctgcaactcgtcgaagacatcgtcaaacagcaaatgaatccatttgacgctgttgggcctccggcactgccaacgccggcggcgacagtgtcggcgttgcccaacccgagaccgatcaacccgatggatctcgaaaggtgccaatgaaaatgctaattttaagtaattcgttcaaaatttctcacaaatctaccgtaatttcctcctacttttttaaaaataaatccaccataatcttttccacaatttttcagacttttgctgcaggcgattgccttccaaaagcaaaaacagcagcaattactagtagaaatgccacaacagcagcaacaacaacagcatcaattgttgctgccttcgctggtcggcggcgctggcgacgcaacgagggctccgcagtcggcgacggggggagcgatgtgccgcccgccggcga

SEQ ID NO: 28717 - DNA, 1176 bp, Heterodera glycines
ccccccccccctgcctttcccagctccccccctttggcatatgttacacaattcgcgcagcatttgtccaaatccgccgcccatacgaatcgcccgcctattcatcaattcccatccctaattgagtgtgtgtggttggctctgttctcgcccccccctttctgtcggagaatcgcttcgggggattatctccccgccggggatggaatggatcttctccaccccaacctaagcggggcggcaatacatttccgatttgtggggacggacggacggcgggcggatgaatggcaaacaacaaattgcccgatttccgtattttacatgcatacatctgcagagagagagagggagagggggagagagtgtgtaaatgtgtgccccttttgccataccaatcattttcggagtttgccttttcgagactctcgacttgtttgatggatcattttcaaaatttgatgcaattttattgcctatgtcagtcacatcatcgcttttcgcctcctctgcctttaaatttaaacatcgctgcggcaaccgttaggtgaattgccggaaacaattggcgggcccgccagccgattccttccgccccgcggtgccgttttatttctcagcccgtcgtcgttggctgtgccaccttttgccgctcacttttggcacttttaccggcgattgacccctcctcccgcccccgacaatttgacctggccgggcgctcaaattgggcgcaaaatccccctaaaattgaacacaccggcaaatgatgaagggcgatgaatgacagtggcaaaaagtgatggggcggaaaatgggggaaagtgagggaagggcacggactttaaactgagaggtggtgagttatttgtccatttgagttgaatgaccgcgccgaagttcagcggagaaatgaaaaggccaaattacggtagtacagtaatatacagagcaattggccataaaaattttaaaaaattttcacgttggatgggtgccgagattcactctcgactgagattaattaaagttcaaaaataatgcttctccccctcactaatttttaaatattttttacaacgtgctgtgacacgcaccacatgttaattaaatgttcaataatgctctctgatgccttcactatcagaaagggatatgaataacaaatctaaaaat

SEQ ID NO: 28718 - DNA, 1388 bp, Heterodera glycines
  unsure (1)..(1388): unsure at all n locations
tcttttcataaatgccagaatttgtgccgttctttggagaggtgccatttttaaaaatgccattgatgaggtttcagcggcagtgttcgatttatgcgaatggttataagtggtcggtgacgcaaaaatagtcttcttttggtagagtatctgttttttgactgcgcaattttctctttccatcggagtgaaagtgccaaagttatggcggagatcaaaatctaaaaaaggaaatattgaattgaccaagtcattgttaaactcaatttaataatggaatttaccttcgtccttcgagtggttcagtgtctcgttcattggaaagttcgtttggtcggtgctcatttataagtcgatttgatcattgtgaaaaatacaataaatgcataaatacatgtgctaaattgttatttttgaatagaaattaagagcacattaaatggttttgacaaaggcaaccaattaaaaaaaaacaaattagcagcaatttaaaaatgaaaaataatggcaatatttctatttgaaaaataaatcaggtaaataaacagaacaaaacaaaattgatttctccttttattttatacccgcttacagaaaaaaattacaatgagtattcagtgtgatggcaccgagaaaagttgaatgaagaaagacaaaatgaacgataatgacttagtaagactaatgagtatttatttatctgtctacatccgtttgaatctcttcgggtcctcgcgataatcgtccggtgttctgaacattgcatccggaaatgctggagaggcgccttcaccgcaccagcgaaattgttgaaaaatgacccgagcctgataaagaattaatttttggaaatacgctttttgaattcccttgcctgaatcgtcgcaaaaattggcatttccacgcgtaccgggaacccctcaggcagtttagcggtgcaaaattcgcgtaatttggccaccgtcggattcaccggctccatgacgctgagaatgtcctggagaacaccaaattacaaaatgtcaaaagttttatgttttgtttaaaagatgagaaaagaaagacccgcaaactcttacaagtgccaaattgaggctgatcggaaaatcggtgctctgtaaaaaattgtttgagtgaaatcacaaaaagaggcaatggacagaccatggcaagcattccactcacgtccttagtggtgactttggtctgaatcggtctccccaaatggctttgttcgtcagaaacctaaattttttacatttttaaaaactttctcgacaacataaccctgaggtaattggaccaactgatttttggtcgaggcggaggttcgagactctcgaggagattctgaaagaanttggagaacggaataaacgcaaaaagca

SEQ ID NO: 28719 - DNA, 2365 bp, Heterodera glycines
aagcgggggaatccaaaagggaaggttgaaattcccaaaaatttccagtttaaaaattcggtgttgaaattgtttaaatttgtttccaagcttaaaattttagccaaaaaaaattcgggaaaaataagggaataattaagcgtcacaaattttttgttgccatttccagcaccataatgacagaaaaatccatgaagaatgaatgggagaatggaataaggagggaaataggaaaaaaggggcatttttatactaaaatattagcgtaccaatttgggggtgggaaaaaaagtcgaaatcggcgtttgtcggggtataaaaaggaacggggtcgttgacggcgaatgccattctaggtaataggtaagttttctgtagcaaagaaaccttttaggttctttatttagcactaaaaaattttatatagaaaataggtatctcaaattttcgcattcattattcacaattttttcaaatttgtcagagtttgtgattttgaccaacagcaatctttgaaatccaaaaaaagacgctttctattttgtacgcagagaaatatggagtttttcacttaatctctgcatatcctgaaatcactgtgcttcttttttaggtacgcgatgcaaaggaagctcgagatttatcaagcgtaatgtccgtcgattttgtataataattgattgaattcgatatttcggtactaattttatatatcattgcacatttcgttcctcattttgtataattcaggcagaaatgggccgattcagaccttaaaagcagagagacagaacgctttttattttgtatgcagagaaatatggagttttgaattctatatgcgtttttttgttgtaaattaatgtaaaatatttctgcttttggatgaaatttatatttttgatcgtcctaattaattatatcggatcataaaagaaaaagctgcaaaaacctcttttaagaagcgtcggggttcggggtcgggattcggggttgtcggggttggaagcgtcggggttcggggtcggggttttccccgaaatgaccaaaaatgtcggggttcgggcggggtcgggggttgcaacccatatttcaaaataaaaattatagattttaaaatatttctagttacataaaattgaatttaatatataaattcttttaattttaattcttttaaaaatgattagatagttcatcatttttataaaataagaaaattatttatttcttttttttctaagttttttacaccgaaaaattttgtgattgtgaaaaattgcagttccaaattcttacttccacgcatcaaaaatataaaattttttctatggatactaatgtttaaaaaggtcttgaatacgtatttatgtgctcgagagaacaatctgctgaaatgcatttttaccagatgaacagttggttttgtggcagaacatatattttgcatcagcgggacattctttaacgatgaatggctcttcctccggatcaacaactccgattgacccttgagcgcattccaatgctcaattaagaaattatttaatttaatcattttgttaaataaaaaaaaactaaacaaaattaccatcacaaaaattgtgcataaatgcgagagcaaaaaaacttgcgacaacaaaaggaaggcgacgaatggacattttgagggtatttaattgtttatttttatttttggaatatctgacggacaaaaaattatttattttaattcataaatacataaaatattttgtaaaaaaattaatcgaactaaaattcctttttatgaaaattaaaaatgaaaaaatgagagaatgtgaatgtttggtgaggagcgtaatgattatgatgattcatttggaacagaggattttattatattgaataaattaaatggtagaaaatcatacagctgtaatcagaattaaatcaaataaaaaataattttataaaatgaatacaaaaattctagttaaaatctttgacttaatttgaaaaatcaaaggaattgttggttcgcgttgaattttggatttatgttgaatttttactgttttgtccaaaaaagtgttttaaaatttagccacgtcatcctctgaaaaaaacacagaatatgaggctctttgcatagttgagaatcattttgtttatgtatttttaaaaaatcggcaactaatattgttcattttgataaaccattattatgcaaagaaaattttgggctttttaataagccttattacagatttttattatgggtctatatattttgataattttataaaatcaacttacaaaaatgcaatttttttgaaatttttgaatgaatattatacatagtaattgcgaaatttctgtaaaa

SEQ ID NO: 28720 - DNA, 961 bp, Heterodera glycines
  unsure (1)..(961): unsure at all n locations
taatccgcgacatgttcgggggggggggggggctatatctctctgctcactcgtcgggtgatgttggaaatatatgtccgcctatttagcttctcgtcgtaccagtgcttttctagcattgaaaaatgtccgaaatttggttctgccgttgtttcaggtggaatgtcccaacgtttgctggacgaaacaggacggccaaacagtctaaaacagctttttttcctaatgataaccaacaatgttggatttggtcggaaagcaaaaaaaactcacgcaataagttcatttcttgtaagaataacttgttctttttttctgagtagcctttttgaacactaaattttttgtaaaaaaccaaaattatggcctagacaattattaaaacttactcgctcaattttatcgtggttttgcttttcatcgaagagtgttagtagttcgcgtttgacgcgatctgacaatttgtgtgccttttgttcgatgtcgtccattaatgttttgttggatttaggcaaaaaatcagaggtgggctgatttgcgtcatatgcccatttttgcttttttaatacatcgaacacataaatctaaattaaaaatttctaatcattgcattaggtgttgacctttttaccaaaatcatgctcatttcatgcgcaattcttttatctgattctgaaggcattcgggtcttaaaaatcgaataatccgcgacatgttcggggggggggggggctttatccctctgctcactcgtcgtgtgatgttggaaatatatgtccgcctatttagcttctcgtcgtaccagtgcttttctagcattgaaaaatgtccgaaatttggttctgccgttgtttcaggtcgaatgttccaacgtttgctggacgaaacaggacggccaaacagtctaaaccagctttttacggtaatgataaccaaccaantgttggatttggtaggaaag

SEQ ID NO: 28721 - DNA, 1713 bp, Heterodera glycines
taatttccccccccccctccccctagggtgcttattattaagctgccccccccccattttcattaatgcattttcagtgggaaccttgcctgttggatttttaacccaaaatttagtttttagtctttatttatggggaagaaacggcacggcgccttcggagcattggcacaaatccatggaaatctgatcggaatgaaaaataaaagagcttaattgactaattccctaatcagatttataaataaattccatttaactcaaaatacagccaaaaaatgtcatcattaaaaaataatgcatcgtttttgatggaaaaatcgcttccagaaaaagtaaatagttggaaaaaacaaaattatttttagagcccggacgagacttttggtactgagactggttttttttcactcgagaatttcgtaatgaaatattttgcaaaaagtttcaaaaagcccgcaaaatttttccgctcttggccttacaatttaatttgaatgaaaacgccggcgggcaatggcatgccaaaaagcccgtttttgccaactgagcgccgaacaggctttttccggcatttttaaaacgcatttttcgttaaaactttgctttaaaaaaatctggaagttatcaaatttagcaagcattaatgttaattatgagtgtcatttttgagaatttcccaaaattttttattgagaaattcttagttagagaaaaaaaaagcccgtctcagtaccaaatgtcccatctgctgactgggctcttattctttttatgtgtataattaaaaaataatgtttttcataaaatttagaattccacttttcctgtgattgtaagtaattaaaaataatgattaaaatgaaaaaatttaattaaaattattatacatatggaaaaacaaaaaattaattctcaatttcatcaactttacaacttgaggcggtggtgctcggatcaatcggtcttatcatccttttcgccatattgttgttgatgtgcgcgctgatcgtgatgatccgccgcaggggtaaaatttcaaaattaaaaatttattttattccaaatattttgaaatttgaaatttcttttttcattgcgtattatttcatggcaatataactaattaatgcattgtgattgacttggcaaaatttgttagacatttttcattttttttttgccaattttttggccatttttcccctaatttgagccatttttttattttttcccctaatttgagccattttcattttttattttttcccaatttttgggggccattttcccccaaatttgtactattttttcatttttccccccaaatttgcgccatttttccgcaaatttgcgccattttttcctaatttgagccattttcattttttattttttcccaatttttgggggccattttcccccaaatttccttttcccccaattttagctcttttcatttcttcccaaatttgcgccatttttcccccaattttggcggcaatttttcccccaatttacgccgttttccctattttgagccaatttttaatttaaaaatttttttttgtagccagcactgtccgttcacagcaggcggttgaccagcagggctgggctctagtcatccgcgaactcaaaaaacatcatgctcggcacggggcggccaatggggcagccccacggagtgcatcggccggcgagctctgaaat

SEQ ID NO: 28722 - DNA, 1639 bp, Heterodera glycines
ctctggctctgacaccaaaacactgattctcacagtgaagcaatttatctctcgtttggagctctttgtgttgaacaaaaacagtggcggcgaacgcggcgaaccccgcggcgccatttccggtccatttttccaacaacgacaacaaaaacaacagaggagcagagaaagagagagaaaacggcagacgacaacgacaccgccttttgtccctcaattattatctaattattattatcaatatttccgtttaattgatcatccgatccgtcgcaagacagcaacgaattttgtgtgtgtgtttgttgtcacataattcagggaacagcaacatcatcagagaacagtccgacaacaacaaattttctgtttttgttttctccctaatctgctgaacgcggcggcgcactcaacacaaaaacaaacgacgaaaatgtgagacaaattcccactcggaccccacccaaccacgagttcgagcagttcaatttatgtgtttatgtgaccaaaaacgagcgacccccaaattggttgaacctttttgatctgaaaatgcaaatttaaattaattttccgacaattcggagaattatttcaaatatgtatcagttaaacaatgatcagagcaaatcagcaaaacccaataaacatgcttttcttgccattcaacttaaaattttgcaaaaatgagggatatggctatgtctttgccattaatttccccattttccaagtctgaccaatggccaagcaatctctgagcttaatctcggctaagccccccaaattgttaggaggcacaattaatggccaatgctttcccagccccatccatcaccagcggcaaaatctgtagaagaccacggcggcgggtcgcgttccccggggaaaagggagcaaaaagcgtccgaagcgaagaaagaatatgtaatcggggaaatcttttggcaaaaagtaattcatcgccaccaccccaacccccgtacacacttttttgctgtcctatttttctggttttacacataaaacttggtaccctatacctgtcccactgaaaaataaattttaaaaattttgaaaccatgaaaattggatgaaaatgccgggaacaatgaaatttttgtcggttttttaaccaatgtcgaaaagcataaaaatgacaatactggatgccagaagacttttattgcccaatttaaaaaaactcggtaaaagttcatcaaaacattccacaaaaatccgctttaaaaaaaagttgtctcctcattttggggacgtgaagtttgacgagaaaaaatgggtagaagcagaggacggacagttgggtgaggtgacgctatgaaattccaccgctaataataatgactcattcatctgtcaaatggaatgacaaattgggggcatacgaccgccgccatcggacggcgggggtttagcgattccgaaaagatagcacccgcaaaccaccacaaaattaattcatgtcactgccgaccggcttcattttccatataatgtgtgacagcggcagcagttttgtggggtcggcggggtcaatcgcgttttgtcaaaaattcacattttccgtcgaaatttcaatttcactcatcactcacaaattagatcactgagtgagttc

SEQ ID NO: 28723 - DNA, 1930 bp, Heterodera glycines
aattacttaatctcgcccacacactcaatgtggaccaagatatacgcttgtaattcataatggctcattttacgcctacactcggcaaattccgtgttagctagtgtgagttgagaaatttactcttgcaaatccataatcgatttattaagtcgcttcatctgtctgctggactaggattctgtgtaaaaaaaatttgtttttgctagatatttaccctatgatgtgtttatggataattcaaatccctgggcactgtaaaattcctaagaaaaatttttttttatagaatactacgccattattcatttcaagattcggttggacatatctctgtgaattttcaagtaaacaattaattgaataaaccattcgaaagctgcttttgagctctttcagaaaattacttaacctcgcccacacactcaatgtggaccaagatatacgcttgtaattcataatggctcattttacgcctacactcggcaaattccgtgttagctagtgtgagttgagaaattaactcttgcaaatccataatcgatttattaagtcgcttcatctgtttgctggactaggattttgtgtaaaaaaaatttgtttttgctagatatttaccctatgatgtgtttatggataattcaaatccctgggcactgtaaaattcctaagaaaaatttttttttatagaatactacgccattattcatttcaagattcggttggacatatctctgtgaattttcaagtaaacaattaattgaataaaccattcgaaagctgcttttgagctctttcagaaaattacttaatctcgcccacacactcaatgtggaccaagatatacgcttgtaattcataatggctcattttacgcctacactcggcaaattccgtgttagctagtgtgagttgagaaatttactcttgcaaatccataatcgatttattaagttgacggcgttgtcgttggcgactaagtgaagctggaggtttgggtccttcaggccccaaatcaataatttgctcatcatcatcgtcgctttcgttgcctctcagtgtcttcagaccttttgtaatttctacttttgctggtttattttgttgttcatctctcaggtggagataacgggacaattcctggttattgttggatgtgttgatatttaatattattaagtttcgacacgaatacttttattgattagttatttgttgatgggtcctctcccatcgactcattctttgcatttgtgttattttgcaattcggtgtttatttttcggactttctaatttgactccgtcgttattttattattattttgtgattctaattttattgtttattcatttaataaatttatcttgattgtgagttagaaaaacacaacaactggagacgcccgggcatttttgtgcttaaccgtgaattcacctaaaagcgaatctgacggccccctcacatcatccctaacttatttataattctccatctgtctgagccagaacatctgcgccatatattgattgtacgaagctatgctcttcattggtgattgccatcatcgagcttgcaatgagcaccccccctcattgcttgggttgtcttgtcactgttggacccaaaacgtggcgacatggttacccaaatggacgaaacgacgatcagctccaaaagagaggggcgagcgggtcatattcgaatttgtccttcactgaatttgttgacgtgccaggtgttcttgtcatttgtcataagaatgcattttaccgaatgttcatatttttgaacaattcatttttttgctcttacctaaaaactgttcccaaaactttctttttgtacattttcctatttcgcggaaatcccattctatttccaagttttttccttttcaggttccccatttccttgctgaaacttctcc

SEQ ID NO: 28724 - DNA, 1753 bp, Heterodera glycines
atccgcacaaaactgaggtaatcttacccagctaattaaataccgataatatttatgaatagaaatggctcaatgtttatccaataatatctttgcaaaattattaattgaattttctaataaatcaaaaattaatattttaatgacaaaaaaatgaatttaaaatacaataatttatattaataattgtttttcttttaagtttaaaatgttcaaagaaagcttccttcaatctttctcaccacaatcccaccaatttaaatgtttcgctttgtttggaatggcaacgttaatttttatttggtgagagttaaaagccatcacttaaaaacaattccaattaatgagttttgatttcgcaggtactcaacggtaatgcacgacacggaatgttttgaaattaaatggccaaaaaatgggcaaaaaaatggagaaaatttggataaacaaaatgttgaaaaggaaaagcataatgactggtcaaaaatgtgcaaagtaaatcaaacggaagaagaaaatgaaaggcaaaaaatgattaaataaatattaatcaattaataggaaaaaatttaatttaatttaaaaatataacaaaattttttaatgaattattttaatattaaatttgaaggcttttcccaagagattttgacaaatatttattcgccacttggggcggactttgtggcggaattggaaatcagatggtactctaaacaaacacttattaattaattaatgatggccgtttagtggcgttttgcttctttgtatggcattggaaaaccgtacgggcgaaagccaatttttaaggaagaccaaaaatgcgaaaaagcacatggagcgcacgaaacggaaggagagaatgaaatcgaaaaactctttcctgtctatgccagccaaatcaaatacattgtaaaaacaaattaattaaaaatatttaatttaatttcttattatggcatttagaatcctaaagaaatggaaaatgacactttttatgtgcaagaatttgctccgggctgctgttcatatgaggacccacaaaagttgtcactttgactgatttaaaatttgaaaaattgcctttagacgtgccatttcacggataaaagaaaagtacataaaaattgatgtaagactttaatatatttttcaaattataaattaattttgtcgtttttagggatattattttcaatcgtataaattctttgaaaatcgaaggacggaaattcgtcaaattttccaatttggtcacgaactctgtgaaacagtgggcacatacaaaagcgaattatttcagttaaattaaaaagaaatttaaatgttattcattttttatttttaagagatgatcattctcacaaattttgtgtccacgttcggattgaagattttaagaattttggtattgaaacaaaaaaggatttcacagagcagggaattgagttcggatttcaccatttaaaggtaaaattattcattttttgttcttgtttttttatttatttatttctttaaaaattaagaaaaaattcaacgatatttccgtcgttttaatgggagttgagaaggaatttttgaataatttagcaatcaatcggcaggtaaaattatttatttatgttaacattggcatatttatttatttgtctttcatttttagctaattccaaaagtttatttgcccaaagaaatgtcgcgaggaaatgacttggcatttgcgacaacggcatgcgattcgctgctg

SEQ ID NO: 28725 - DNA, 982 bp, Heterodera glycines
  unsure (1)..(982): unsure at all n locations
ttttaggtaatgcatgaaggccttgcgaatgtttgtctgatcggttcttcaatgaccgtggtgaagtccaaaattgacatgcaggttggtcggaacgggatttatttaattgtctttttagtaattaaaaattgtttgtttttttcagatcgctcgcaaacggaagggactgtcctcgcaacatgacaaaagtttggtcgcctttatgaatgcaatttgtgccgcatttgttcggcacgtgaacatcgaagtgactttcccccccccccatctctttttcactgccaaaatctctcaccgattttcagctgatcaaatgcgttgttgtcgatagtccgggattccttcgcgatcagttcatcgagtttttctggcagtacatcgaacgcgaagggctaaagcagcagttcgccccgcacagaggtaaatttgtgctcgtccattcgtcaagcggcttcaaacacgcgctaaaagaagcactttcggacgccactgtcagccaacggcttagcgatacgaaggcactgatttttggaaaaatggcattttccaatgttaggtcattttaggcacaggccgaagttaaggcattgaacacgttcatggagctgatgtgcaccgacccacagaaggccatctactggtacagacacgtggtgcacgcacgcgaacaacagtccatcgacactttgatggtgtccgactcgttgttcaggcaggcgaatgaatttggcatggaaataattggcagaaacatttaaaggtccaaagaaattgcccagaggaggaaatatgtggaccttgtggagagcgtcaaggatcaggcgagaatgaagcttattggccaccgctttatatatttttaagtgccaaacgacgaggccgagagggaagagaacggacggacatgagaagaaagcggaggaaaaagggggaaaagcaccactcgaggattggttttttcaaatttcattgntcccaa

SEQ ID NO: 28726 - DNA, 1487 bp, Heterodera glycines
  unsure (1)..(1487): unsure at all n locations
tccagctatcctgggggaaacttcggagggaaccagctactagatggttcgattagtctttcgcccctatacccaagtcagacgatcgatttgcacgtcagaatcgcttcggacttccaccaggagtttcctctggcttcatcctgctcaggaatagttcaccatctttcgggtctcagcgcatacgctctgtctccgccccatcgcatgcgatcgagacgggactatgttgcgccccaacaccgcagtgccagggatcacacatcagctccgtaagaagccttcactttcattgcgcctttgggttttgaacacccaatgacttgcgcatacgctaaactccttggtccgtgtttcaagacgggtcgaacagatgaccggcttttacaccgagaacgcacaactgagagcccgagctggaccgaactggttgctggtacgtgtcgcacgcgaccgccaccgacccccagctcgagtcaacacggacccgaaaccattgcacaattcacccagagtaaacagcactcccccgatccgggtaccagaccccgaaaggctggcctcaagaccgagctcacgcagctactccgagcatctcagcgcactccgcctgcaaatgccccattcgccactgaacagaaggacagcaaaccccagtctggaggctagcaggccaacgtacagcaacaaacgggtgaatgcagaccagatacgccagctctgtccgtttccacctcatcggtttcacgtcctctttaactctctcttcaaagtgctttgcaactttccctcacggtacttgttcgctatcggactcgtggccgtatttagtcttagatgaagtttaccacctgatttgggctgcgatcccaaacaacccgactccaagacacgtaaagatgggtaggcaccgccagttggacaggtcttgcaccttctctggagccccggtcaagggaaacttgaacaagcgggccaacccaagctcacggtctatacgctacacctcgcaaccccagaggagctgcgattcagcgctggactcttcccagttcactcgccgttactacgggaatcctcgttagtttcttttcctccgcttactgatatgcttaagttcagcgggtgttcacgtctgagttcaggtcgaaaaatcaaagcaggaatgccagtaatccaggcactccgccacagcatgcaaagcattggtgcgcttgagttacggtccgtaaaacgcgaattagaaccacaagttcgcgccagcacaccaaaaccccacagccgagctgagcaagtaacgtaagaacacgtacaagtacatgatcccacgaagcaacgcacaagcagtgcattttatggtaacgaccctgaaccaggcgtgccaatggatgtaactcctaatggcgcaantgtgcattcgaatgttttgtgttcaaggtttctaaaggtcgcactaattatcgcagttggctgcgttcttcatcgat

SEQ ID NO: 28727 - DNA, 1077 bp, Heterodera glycines
gaaaaactatgagtgcttgaattttcactaaaaaagctaagcctaaagtttttcgctcgtttaaaaagcaagtaaaaatttttagaatttttattcatcgccctttttgatagtaaaagcatcagagggctttgttaacttgaaaataaaatttggtgcgtttcagatcactctctgaaaaaatattaatgaatttattttttcaaaaatttgaaatgtacgcaaaataagaataccgaaaaaatttcaaattccacaaaatgggaaggaaatttaaacctaattacctcttcttctcagctgttaccctgcaaaatttggtgcatttctgatcagaacgcgaaaaactatgagtgcttgaattttcactaaaaaagctaagcctaaagtttttcgctcgtttaaaaagcaagtaaaaatttttagaatttttattcatcgccctttttgatagtaaaagcatcagagggctttgttaacttgaaaataaaatttggtgcgtttcagatcactctctgaaaaaatattaatgaatttattttttcaaaaattcgaaatgtacgcaaaataagaataccgaaaaaatttcaaattccacaaaatgggaaggaaatttaaacctaattacctcttcttctcagctgttaccctgcaaaatttggtgcatttctgaacagaacgcgaaaaactatgagtgtttgaattttcactaaaaaagctaagcctaaagtttttcgctcgtttaaaaaccaattaaaaatttttaagaattttattcatatccctttttggtattaaaagcatcagagtgccttaattaacctgtaaataaagtttggtgtgtttcagagcactctctgaaaaaatattaatgaatttatttttttcaaaaatttgaaacgtacgcaaaataagaataccgaaaaaatttcaaattccacaaaatgggaaaggaatttaacccaattacctcttcttttccgctgttccccggcaaaattgggggattttctgatcaaaacgcgaaaaaatattgagggtttgaattttccctaaaaaaattaagcctaaggtttt

SEQ ID NO: 28728 - DNA, 1090 bp, Heterodera glycines
tttttcacaaatactcctttattgtccaaaatcgattcaatataccaaatggccacgaatccctattttctatccaattcagtgcatttgaatcaattttggagaatggagattgattttggtaaaaaaaaatgtcgactgggttcgaaattggtcgaaatggatgtcatattcgtggacagcgacccctaatacccctggaaaacactgtttttaccgttaaaaacaaaaaaatcttctttgtggtccaaactgtccaagtaccaagtttttttaattttttattttgaaaactgaaacttttattataaaattccattctgaccatgtaaaaggtatatgtttaccaggcgtaccgtaccgtattaggtacaacttagcccttttgtgaacccatccagaaatttttttacatttttcatacactgtgtttattttatggtaacgtgcaaaacaactcaactgcgttttcagcgcccaaaattagccaaaaaaaaatatatatatataaaaaaaattccacgaggagttcacaaacgggagaagtaccccgtattatatttaaaaaaaaatataggtatagaaacctgcacttcgtcaggcgcagtgccattgccgccggcctttttggattttgcagaaaacagcgggaaacagcgcgcaattgccaccgttgaggccatcaccgagtcatagtccgtgaacagcacaacattcagacactgaaaaagacattcatttattgtattacatgtaccgtttgtcctctacgctgttaacacttaatgggaaaagggcgggttcgaatcccttccgggatggcgaatttttttgaaaatttaattttgttacaaattgtgttatactaaaattttgttttcttaaaagattgtccaatgcgtgccaaacaaacatttccttgatcattcacgaaagttcgcggttatgaaaacgcatcggtagaaaatgggccaaaaatgccacatttcctttgtttggaatttcaatttatgccatgttttacaacgaaattctttggttcaattttggtcaaagaccatcgaattccgtaaaggttaatggcaaaaag

SEQ ID NO: 28729 - DNA, 642 bp, Heterodera glycines
ggggggggggggttgggatgatttaaggtgaatgttgggagtgagaaaaggttcactagacttttaataaccatgtttagggttcaattacatgctttcaacagagtctgacggattggagcccattaagccattttccgtaccgaacccaccgagaaaaagtttagtgccaaaattcctggttcccaaacttcatcatgtcgccatttcaacaatttaaaccctggaaaacaaatctatgagggacgatgagggaaattaggaaaatttaaaaaagtgtagggccggaaaacaattaagatagagatggtagagagtcaaaattttgggtaaaattcaatttcggcacagaatcagcccggctggtaccaaaccgtgatcatcctcgtcattttggccttcatcgtggaattggtctgtgattcattgtgatgctcgagaccgaaaattccccgagaccaaaaaacccgcgactttgctcgagtagataatgaccggaactctcgcgcatcactagtgatttacttggcttcctcttcactttgcccccccccccaaaggacgtactgacttggaccgctctctcttgggtcggattttgtcccaccgcgctcaattttccgctcggtttcctttgagcgg

SEQ ID NO: 28730 - DNA, 754 bp, Heterodera glycines
tttgagacaaaagtcaatttgttaagaaaattcggtaaattttttctgggaattttggtggggggggggggactgcccacgcccccgctgttgcatcaattcacctggttgaccgactgtacgggcagcaagtcgtagtcaggcactcgcgcggtcgccaaaatgcgttggacggatgaactgacggcgctgaaacgcatgttggagcacaactcgtgcaaatcactgcagcacaacaccaaatgagcatcggcagaaagcatttccctttgtttaagaaaacgacaaataaaagaaaagaaaaagaaacggacttaaacgcatcgacgtagaaaaggagcaaattggcgagacggttcagcaccacacagttgccctcttttgtgatgcattgttccacccttagctaattgaataaaatgagggcgaagtccgccacggatcgaggggggggggaacggagggcacacccgcaacggttggcacatcgcttccgcgatggaagtgagcaccgcccgcgcttgggccggtacattctccgccccgccatggcgtgtgcagtcgcgcaacagtgcggccaacatttccttctctaccgccactgtgtgttggatccaggaaagcatttcattgacatatctgtcaagagaagggaaaacggtcaatcgatggaaaagtgggaaaattaggacgaaattttaaaagagggagaaaatggaaagccaacaaaacaaaaataaaatttataaattgc

SEQ ID NO: 28731 - DNA, 1851 bp, Heterodera glycines
  unsure (1)..(1851): unsure at all n locations
tttttaatattacaatgccncaggtcaaggccnaacttaattgatggctcattttatgaatgaattaattgtctaattaattatctatntaaatcaaacttcagtttcaactggtgtgttaacaatggaagaaaggttcggcgtgtttcagcactatttcgatctaaagttaagtgatgcccctgggctttttccatcgaaatttcccacgcaccgacggaacaaaaacgaaggcacaattgagatggaaattgaaaaagtgtccgaatttgcggtggaggaggtgggaagtcgccgatttagcgatgccatggacattgggggaatgccatggaaaataatggcagaaatcgaaacgaaaaacgaaagcaatgagaaatggttgggcttttacctttccgacgatggccttgaaaatggtaaaaaaaagtctttttcataaatctgtcagggaaaaacaaaaatatattattttttactcattgctttaagcggaggaatacatttactaaattcttttttccagaggtttttaaatattatttaaatcattcgaactaaataaacgattatgtagacaattttctacaaaaatagaaattcaaaaattgaaaatgtaggtgaaaagtaccctttcaacttaaataagtaccggatttaatgataatggtaattttattgaatatttatttattgtgcagaatattggacttgtaaaagttcggcaaaacttcgaattgtttcacaaaagaatggcacggaggatttaattggaagaattggtgattacatttttaataaggaagggagcagttatggtggatttcctaatttcattagttttgcggtgagtgggattcaaataaatttaataaacttcatattttgaaattaaaatttttaaaattttaaaaaagaaagtgacaaaaaatagaattttttgaaattttttggttataactctttgtaaatttttttctagattttaaaaaattaaataagataggatttgataggatatgtaatgcatcgtttaataccaatttttattaatttaactaaatttaagctaagttatgctttcttattagcaataaaattaaaactaataataaatttaaatgtttctatcattgacacttttgtaactttggctcaccatgattttatattacataattgatttaaaattaaagttataatcggaaacattgctgattttcatgttaaaaaattaattacaatatttgtcaaatttttgtattgcaaaataaatcactaaaaattaaggaattgttggatccgggcaaaggattttacatcaaagatgaggacaaagtcacattggccattgatgtcattgtggatgagccaaaaactgagaaaagcatttccgatccaaacaaatccaacggcacactttcgacggaaattgaaaaactatcggaatttgcacgagaaatcgtttggagtgaacgtaaaagtgaaactgtgtacataaagagaatgccatggaaaatattggcaaaaattagaaagaaaaatgaaagcactgagaaatggttgggctttttacttttgtgcgatgcttctaaaaaaggtttggttatcaaattattaatagaaataaaaattattttttctataaaattggtgtaattaattattgaaaaaacttatgtaaacagtaattttttaacataaaattaaaagtgattttttaaaggaaatgcgttaaaatataaatttgattattatttaatttgctttaagatggaaattggagccgcaaatgttcggcaacacttcgaattgtctctcaaaagagcgggggggaggattttaagagag

SEQ ID NO: 28732 - DNA, 1634 bp, Heterodera glycines
cctggtataagcctttcaaagtgaacttaagagtccctaatagcatggattcgggacccctgatcataaggtccaccgattggccgactgggagcaaattcaacaaagtctcagagttaaatcggcattctgttccattttcattggattagcattcttcagtattggccgttatagtggtagggactccatttcctagggggatcccttggaaccaacaaattaaggcaagggccatgcccaattttgtcaaaggcctaaatctccgattattgaatcttttgtaccgacggttttcataatcactttctattggccgtttttgcttccttcctttcagattttggaacatgcgacaacaaattgttcgacaacaacgtttaactgcgcggaagaaacagttttgtccaactgagaaggcagcacaaaacggttgatacaatgcctacaacaagggcaatgcaaccgatcaaaagagcggagaaagtgggggagcagtgaaagttgaacactctttcccagcatacatagcaatcgaccagcagacagatgtccactggggcgcattgggccgagtatgaagtggaaacattgggtcccatccaaaaaatagctaggcaggaggttccaagtaataaattttcctctggaatcggaaaaaagaaaggttttctgtattcccggtgaccgcaaatgccgtcacagcaaatatcaactttttcggtttcggggagtccctcgagcattacccccttggaaactcaggaaaaaatgcctgtggcgtttggttgtgtggataaaagtgcagctgagagtacaggtgctgataaaactgctgttccgctgaagaaactcaacacaagcagcatcgttagcagagtactcagaattgtggccgaaattgttgggcgaggagggcgttctgcccatttgaatttctgccgaaaattgccacggggtggcttttttgcccatcggaacttttcttttggattttctttactgaccgattctgaaaccggctcgaccacatccatcagatttccctcttggggatctcccggggggcgcgaaagagtctcacacacaatcccgggtggttcttctaacggcaccaatttcgaaacgggacgggataacacccgtccatttgccattaaaatgttggcacttcgagggtttccttcggggccctggacttctgtaatttttcccataggccaggtattcctaggaaactcctcattttcaaccaggacaatttggtccactttcggtaaagatttggatataattctaggtcctttgtgtttcgtctgattgcgttgtcttaacaacaacaggtactcctgtgaccatttttcccaaaactgccgaattgattttgctgtcccccaccatcgggcggctaacttttcagctggggaaggtcgaaaaacttcgtctgacatgttcggctcatcaaaagcgaggtttgcttttggagataaaaaatcgattggccgcaatggaaaaggaccatcagcttcatctgagacgaaagtgatgggtcgcgaattgatcgcggcctcaacttcagtaaaaaaagtgctaatttcctcccattttaaaattcggcgtcccaaaattcgtct

SEQ ID NO: 28733 - DNA, 1715 bp, Heterodera glycines
ccaatcaaagcatgtgctgacaaactggttgagggaaattgaacaatttggcaatccgccagtgtttggctaccaaagcagcgaagaaatgtcaaaaaacgggacagaattagcgaaacaggaggaggaagtggaccaaatcattaaggacaagagcaagggcaaaaaggtgatcgtcaattttgcatcccaattttaataaattctttagagcaaggctttggcgaaaactgtggctgccaaattccaatggcaaattatgcaatcgttgggcctcaacgacgcagaaattgccgagttttccaaatccgagcattggctgacctatttcccgcccaagtgtatggcggacctgcgcaaaatgggccttgcggtggactggcgacgtgccttcatcaccacagaggcaaatgcctatttcgactcattcgtgcagtggcaattccgaaagttgcgctcagaaaatctcatccaattcggcaaaaggtgccattcccgtgtcatttttatcccttggattgttatcataatgcttatgttgttctcattcttgacaggtacaccatttactctcccaaggatggccagccgtgtatggaccacgaccgttccaccggcgaaggggtcggcccgcaagagtacactttgatcaaaatgcaggttaccatcaaaaagtaaatttttctgttccactttttttagattctggagcccaaacccaaagttctgtccaatgtctctgcttccaatggtaagccaatgtttttggtggccgccactctccgccccgaaacgatgtacggccaaacgaattgtaagttgattgtttgtgatttcatccaaaatctgtgatctattcgttcattttcaggcttcatccatcccgacatcacttactccgtgttttttgtgggtacaaacgaccaagagattttcatcgcaacggaaaggtttattaggcaacggacacaaattaatgtgctctaatgtttttttgtggctgtttagggccgctcggaacatggcttaccagggcatgacggcggagaacggaaaaattcgctttgtgcccggcgtggaaagagtgaagggcgcggaattgattggctgtgcgttgaaggcgccgttgacgagttttgagcgtatttacgcactaccaatgctaacgatcaaagacgacaaaggtcaaaagcatttctgggtgttaaatgattggtccaatttgcctaattaggcgacagaataatggcaaattgatttatgatccgttaatttaacgaaaaacgcataatccgtttatctgtaaaaaaaccgtgcaacaatacagtgtttcttcctttttcctccaggcactggcattgtgaccagcgttccgtccgacgcacccgacgactttgccgcactgatggacctgaagaaaaagaagcctttgcgcgagaagtacggcatccttgacgagatggtgatgccatttgagcccatcccaatcctcgagattcccgagtatggtcgtcttgccgctgtgcacatgtgcgaaaagttgggcatcaacagccaaaacgatcgactgaaattggaagaggcgaagaaggagctgtacctaaagggcttttaccagggggtgaggggaattaaataaattgtttacaaccaaagcatggttttgtttcgcaggtgatgttggtcgagaattaccacggatcagaagacggagg

SEQ ID NO: 28734 - DNA, 1964 bp, Heterodera glycines
aagggcagcagaacggtattttgtgacttttttgccccatcaaacctttggcaaataaatgggcaaagggagtctcgacaggggggaggtcgtagcgcaagggaaaggagagaaattcctagagaatttggataatttcccattactataaaaggccaaaatatttcccctacaatgggcgaaatcaccgcccgccacttttctcttctcattctctcttttcagaatatgtcattctttccctcgtccgcactcgttcggttggccatttgcggtgctttccattcgtttcccttattattcaaatcatttcttcggcttaagggatgtccgtcgtttggtggtcgctctttcccgggctcggctcggattgtacgttttgggaaggctttcgctgttccaacgctgctatgaattagccccggcattcgaaagagtgcgttcattttccaatttaactattttttgttttgctttttagttattgaaatttccgactcgtctcgccattcttcccaatgaacaattttcggaagatttcgatcggaaggtcggtacaatgttaagacatttcattttctttttatattagcccggcgatactccgcaaattacgccaatacaaattgagggcactgtacacatgtcgcaattcgtgactgaattctacagaagcaatttggagctgataaaagggcgatttttgcccggggacggaataggggagaaggagcaaccgatggaacaaagcgaggcgagactctaaaagaggaggcgaatcgaccccgaatttgtttagcaaaccgtactagcagcaacaacagcagaacccgttgaggagcagcagtctaaagagtctgcggaagatgcaatgccaagttcaacaagtgacgatcaatcgaacgaaccagtggaagcagcgattgtgtttgaacaagtcgatttcgaacgtttgcaggaagttccaaaatattgatcaactatttttgttttcatttatatattatttctttgtttaaaaaaagcgtcttttgaatgcaataaataatgactagggcatggattttaagctatttaacaatttttggcctgaaaattcatcattttgatgagactattcgtcgctattttggaaaatgtaataatatacactaaaaaaaacagaaatttggagatcaaaacacattcattcgccaatatttggtgttttacgccattcattaggggtcgagtcgaaagcactgttttaggaacttcaaattacagcgtatgcatgcgatcgttagcatcagaagtatttcgccgatcagaaggacgatgaaaaagtgggttagccatcggtctctttcaagggcttctgaaatgtccgatttgtggcgaatgcgtctcctccgttggctttaccctctgccgctgagttttgcgattgtttcgtcacttccctccgtcggccttccatcgttcccatcgcgcgggtgaaaccgaaaatgctggagaaagcgatgatggccaccattttggcgaaggcaccgagcgcctgaggcaacggaagggccaattaataaatggcaaaatgccctttttatacgctggcaattgcacacagccaaagcgtttcttctgtccgactgttcattgctgcacaaattgttatggtgaccacgaggagaggaacgatgacacaagtgatggacaaagggtaggagaacagagcgagacacgccgactgaacaatgaatggagtcacaaagtgagaacggaagagaaaaaggaagatggaagagaaggaaaaggggaaaataaactggagaggagacggaaagggaaacggcaaaagaagggagaaaaagtaggaaaaaggagggaacggaaagagaagcggcaggaaatgggaagaaagagaagccatcaaatgttataaataattgcacaatgaaatataattcaaccattctaattgactg

SEQ ID NO: 28735 - DNA, 1522 bp, Heterodera glycines
aaaaaaattttgttattttttttctcattttatttaaaaagacacaaaaaaattaataaaaatttaaaagaaaatagggcccaaaaaggggggatggtttaacgaaaaagattttaggatgggacccctcccattttaatattccctttttttggtttcacaactgggccaacggtgactgtgctcattggcaggtagttgtccaattaaggtacttggactttccacagtaaaatgtggtgcaaattttgaactgtcccgcctcacggcggggcttaaaagcatttgtagcgcaataaaagttttttgttttgaatttttcacaatttatttaaaaaagccaaaaaatccggatccaattttaaaaacgaaaatagtgcacaaaaaggagccgcctcacggcggggcttaaaagcatttgtagcgcaataaaagttttttgttttgaatttttcacaatttatttaaaaaagccaaaaaatccggatccaattttaaaaacgaaaatagtgcacaaaaagaagccgcctcacggcggggcttaaaagcattgtacatcataattaaaagcgaaaataattttcgtatattttttcacaatttatttcaaaagacaacaaaaaattgataaaatgttgaaacgaaatagtgcacaaaaagggagggatggttagacgaaaagaggaatttttaggatgggacgcaccccatctgatattcacccttttctgctccataagaggtcagaggcgactgtgctcattgacacgtagttgtccaattaaggtacttggactttccacagtaaaatgtggtgcaaattttggaactgtcccgcctcacggcggggcttaaaagcatttgtagcgcaataaaagttttttgttttgaatttttcacaatttatttaaaaaagccaaaaaatccggatccaattttaaaaacgaaaatagttcacaaaaaggagccgcctcacggcggggcttaaaagcattgtacatcataattaaaagcgaaaataattttcgtatattttttcacaatttatttcaaaagacaacaaaaaattgataaaatgttgaaacgaaatagtgcacaaaaagggagggatggttagacgaaaagattttaggatgggacgcaccccatctgatattcccatttttctgtttcacaactggccaacggtgactgtgctcattggcacgtagttgtccaattaaggtacttggactttccacagtaaaatgtggtgcaaattttggaactgtcccgcctcacggcggggcttaaaagcatttgtagcgcaataaaagttttttgttttgaatttttcacaatttatttaaaaaagccaaaaaatccggatccaattttaaaaacgaaaatagtgcacaaaaggagccgcctcacggcgggggttaaaagcatttgtagcgcaataaaagttttttgttttgaattttttcacaatttatttaaaaaagccaaaaaatcccggatccaatttttaaaaacgaaa

SEQ ID NO: 28736 - DNA, 1452 bp, Heterodera glycines
ataaaatatgctgaattttttgtttaaaatatatttacttttatgtaatgaattttttaatttttaatattattatttaataatttttttcgtttttccggtgcaatcaaaatattaaaatataaattggaaccgaatttgcatttgaattaaaaatgtaaaatttagaaataataaagccatttcaaaatttacagtgaattaaattttttgttcaacatttcaagctaatgaattgcatttgataaaactaaaaaagaacaactattaatgaacttatgcttataatacaatgataaaatgataattaataataaatttgaagttcaaaaaataaaattggttattgataaatatctaaatctttagttgttttaaaattgtaaagataaagaattgtgcaatctcttttatattttaagtttttaaaaaattcgttttttgttttaaaaataataaagaagtgcgaagaattttgaaaatttttccataaataacaaaaaaagttaaaaagtccaaaacgctaaaaattcaaacaccatcaccaccgtgtacttttcataacagccggccaagttaactgtattgaaaaaataaatatttttaaataataaaacataaatgcattaaattgaaaaaagcgacttaaatgtttttaattagtaaagcaaattttcaatgaagaaattaaaaaacattaaaaatatgatcataaaaagagttatgattattaaagtaacatagaaaaaaacatataaagcaaaaatgatttataaaagaaaatttaaaaacattaattaaaacacaaataatgatgaaaaggaaaattaatttttcattaagcaaaactaaataatttataccaaaattcaagctttaaaaaagttcgctggttctctttttaccatttttcttggtaaaaatgaacctttgtaattaatagtttgcatagaaaataccattatgcaatttaattaataatttcatttatatttttttaaaacccaatgctaaaaatcaaattaaacttcgcttctcgaacaagaaaataaatttttgaattaaaaccagccaagcatttaaataaaatttaaaaatttgaatgaactaataatttaatactttctagaaaaaaaattgacaacaaaaaacacttgaaaacaaaaatttttagaaaaaaattatatacaaaaattttcgatttaattatcggcaagaattttgtaactaaaagtaacaacaaaataaaaattaaataaaaaataatataatattttttataaaaaatagcaaatacacttacaaaaaagcaatgacataaacatatttggttatttcttattaaattttaaaatatttctaattatatgaagttgtaaataattgcttaatttttttatctattaattttaaaagaaaaaaaaattcaattaacatgacttgaatataaaa

SEQ ID NO: 28737 - DNA, 1385 bp, Heterodera glycines
  unsure (1)..(1385): unsure at all n locations
catcacctataaaaactttcactcttgactttttgatgggaaacaaagaatgaaaagtttggtgatccacagcgnccgaaaggaatggttttttgcaccaaaaaaatgaagaattttcttatcaaacgaagagagttgtgctgaaaaaaaagatacaaactattaagcttattaaaaataattacagtctgaaagagtcggtccgctggatgactgaaagtccagagattgacttctgtttttgtttgtccttttcagctttcgattcaagagcattcagcttttcagtgaattcggagttttcgtgaatggcgtgaagatgagtatgcaaagttttaaccgttcctttggcaagctggtattcatattttagctttccatttgcttgacattcaagacaaattgctgtagtctttgacgtttttttaaataggccaaagactcattctctaaaattaaaaagaaaaagacctaaattatcatttctataaagtagaattctccgaatggaaattttaaccagaaaattgacaaacaaacatttataaacattatgccaaagagattttcgtaggaaaaagaacaaattttgtttatatcataacccggtaaaacccggtcaaaaatgccgggttccgggccgggttgcattttcaaaaacgaccgggttccgggcccggcctctcaaaacccggtcaacccggatttccccaaaaatcgccgggccgggttgccgggcccgggaaaacccggtaccgggcccggcccggtccggtctctacttactattacctgttttagttctcgaatatatttggtttgaaaatattgagattgatgccagtgacagtctcaggattagaaacacttaattcgctgaatgtttatgaaaatatgtattaatttttaaaacagaattcaggcaaaaaagtcgcgaagacaattaaaaaaagggagaaaaaggaactgaagaaattggaaaacctgaagatgaaggaaatgaagaaaaagcagaaacggagaccttagttgttgagcacagattcggaggaggagaataagcgaagaaaaaagacgggaaaaagggagaaaagtcactgaaaattataataaaaaaggaagaaaaagcaagggccaattagacactattttaattggaattataaactttatatttttacaatggcaccacagaaccttacacatttaatattcatttttatgttgtgtaggcaaaacagtcataaaccgtagcgttaggacctcattttaatccatttgcaattccacaattaaacgggatggtattaaattcatccatttaaaatccgtcctgccaactcactcattaaagggtggtccccactgatttgtttatatctgat

SEQ ID NO: 28738 - DNA, 1301 bp, Heterodera glycines
tttggacccaccggttttcggtttcggtttttgacccaaaaaagccggttttcggtttcggtttttgacccaaaaaagccggttttcggtttcggtgcggttaaacgaccgtgacccaccctagttttagctttaaaattaattttaaattttaaataataatcctttagtatttatcaaactaatattttttaaattttgtttcaaatttatttttaacaaatatattttttgcttttagtttaatgttcccatttttgacatttaaaatattttccgtataatattaaactgatcacacacaacaatctttccctgtggcacccattcatttcattcattcgtttcattgtcttttgtgtgactcattttcattctccaccatttgtcattttctctcgactatccttcggtttctctctccattttgctcccaataaatttaattttaatttaatctttggtccgtttttctcgaataaatttccataatattttaattaaattaagtaagcatataatttttgagtgaattaagcaaggaattcgagttttttattgttcccgcaaataaagaaacatttttatgtccgtttttcaacaacagaggcggagggcagagaatgggcgcgtcatctttcacataaaattgtgaaaaatgtccataggaaatgttttttttggcgttccactgaggccgtaaagaatcaaaataataaaaaaaaaactaaaaattagttaacaatagagtcaaaaaaaatttttttaaaactatttttaagcgaacaggaattttttttaattgggtctcagggttttcggtcggggtccggacaatccgtcggtggacaatccgtcagtggtcaatccgtcagtggacaatccatcagtaatggacaatccgtcagtggacaatccgtcagtggtcaatccgtcagtggacaatccagcagtgaaggacaatccgtcagtaatggacaatccgtcagtggataattcgtcagtggacaatccgtcagcaaattttttttgagcaatgatcaaaaaccttgcgaaaataattgttaaatataataaatataaatttttttatagcttcttaacatttctagttacttcatgcttcaattaattgccatatcgaaaataatcaattaattcttttttaaaatgattattcgtaattttttttaaataacacaaattattaattcaggattttagcgacttaaattaattttcacatgattacaaatagagatgggtgttttaaaataaatttgcttatggattagttactg

SEQ ID NO: 28739 - DNA, 1480 bp, Heterodera glycines
ctcagcgacgcaaatgtccattttataaaaaattagaaagaggattttatttttttaaaattccaataagattacacaaattgatcctaaaaactcacctaaaaattcagaattgtttattttgtcatctaaggacagaatactgaatacttgctgcaccagtaaataattttttatacattttctaaaaaaaggattttaaaaatccaaatttcctttatttaatatttcctttttttgcattttcatcattggattttcttggtaattttttctcatttgaatcctggacatttgcggcccgtttcttaagatccattaacggacattttcggcccagtttttttttggtgcggcctaagccaaaatcggacttttgcggcccgcgacatttgcgtcccggacattggcggaccgtttcttaagggcaattttcggaccttgtcgacccaatttttttttaaattttgagtcccaagccaaattcggacatttgcggcccaacatttacggcccgacattggtgtcccggacatttgcggcccatttcttaagatacattttcggaacattttaggccaattttttttgaattttgcgtcccaagccaaaatcggacatttgcggcccaacatttacggaccgacattggtgtcccgaacatttgcggcccatttcttaagatacattatcggaacattttaggcccaatttttttttttattgaattttgcgtcctaagccaaaatcggacatttgcggcccgatatttacggcttcacccaaatttcaccatcggtagcggcataaattacttagcatgggcacataagggagtaaatttatgagacttttcggtaaaatgttaactcctatctgtgcggatcctttttgcgtgaggactgcaaaatgcccaaattgttacttttttatacctcccaaatagttgaagcgctatttttggatattctgtgggcttttcattgaggttttaaaactcacatgtgactgccccaaaccgtaaggtacctactttgcttcatcatttaaacgcatatagtatcgctttattttttgaactttcatgcttatttttcttgatttaattaatatttctttgattttcttttttattttaattttggttttatctttattattattttttctattcgatatttcactaggctaccgtatgctgcattattcttaagggtttataattttttctttatgaatttttaatttattttattttgccaaattaattatcttttttcaaataaaattattttctccctagaatggaaccctttactcctgacgcccaaatttgttttaaaattgacaatatttccatttttgctcaacaacaagttggcacgaaaaaaggcacccgaacattttggaacacgagcaatttaaattcaaatgctacttgtattcggtgaacatccgtgatccaacggacctgtcaccg

SEQ ID NO: 28740 - DNA, 1140 bp, Heterodera glycines
atcgatttctccagtgtccgtttggggtcctcaaacatttagggggagccaaaatcccacgcagcatttaaagtacaggatatacggaagctattcccaaaggattcggtctccccataaatctaggcgcatcggttcggggggactgccccgaaaacaaaaaaatcgattttttcaagtgtccgtttggggtactcaaacaattatggggagcaaaaatccaacgcagaattaaagtacaggctatagggaagctattcccgaaggattcggtctccccataaatctgggcgcatcggttcggggggactgccccgaaaacaaaaaaatcgattttttcaagtgtccgtttggggtactcaaacaattatggggagcaaaaatccaacgcagaattaaagtacaggctatagggaagctattcccgaaggattcggtctccccataaatctgggcgcatcggttcggggggactgccccgaaaacaaaaaaatcgattttttcaagtgtccgtttggggtactcaaacaattatggggagcaaaaatccaacgcagaattaaagtacaggctatagggaagctattcccgaaggattcggtctccccataaatctgggcgcatcggttcggggggactgccccgaaaacaaaaaaatcgattttttcaagtgtccgtttggggtactcaaacaattatggggagcaaaaatccaacgcagaattaaagtacaggctatagggaagctattcccgaaggattcggtctccccataaatctgggcgcatcggttcggggggactgccccgaaaacaaaaaaatcgattttttcaagtgtccgtttggggtactcaaacaattatggggagcaaaaatccaacgcagaattaaagtacaggctatagggaagctattccggaaggattcggtctccccataaatctgggcgcatcggttcggggggactgccccgaaaacaaaaaaatcgattttttcaagtgtccgtttggggtactcaaacaattatggggagcaaaaatccaacgcagaattaaagtacaggctatagggaagctattcccgaaaggattcggtctccccataaatctgggcgcatcgggttcgggggggactgccccg

SEQ ID NO: 28741 - DNA, 1870 bp, Heterodera glycines
  unsure (1)..(1870): unsure at all n locations
tttttgaaacggtgtgtcaaggatgattgtgcccgaaaattgtacgattcagtagcatttttttcaaaataaaaaattaaatatttcatacaaaaaaaaaaaatcgatagaaaaaatttcaaaattttttcttgcaattttttatttaaaaaaattttctgttttgaaaaattaagtcgagaaagtcttgaatacgtgttgcccaccggttcnagagttcagatggaagcgcaatggagtgccaaactcctgctgttgtccaagctgtccagccgggttcagcggaaagtacggcgtttcctcgaaatgaatggtgtcactgaaaacaatgccccaggcaattaggaaaaattgcaaaccgaaaaacgaaaactaattaaaaaaacaattattaataatagtaaatttgtattactgcgtatgtgcggcaaatttaattaggtaattaggatttagcacttccgactaatcaaaataaatgagcccgtgccatggatttattaatttattttaatcaccagagttaatgtattaatttgcttggaataagcaagcctaaattcattaattgcccaagtaggcgttaattacccctaatgagccctgcactttatggccttactctgccgacagcacaaacacagccaatgacgtcagacagttgtagccgttgcgttgtgggctcgcatgtaagcaacgctcattgcccgccgggcatgtgcacagacgcgagtcgggcagccgaaatccggggttagcgtatgagcggagttggacctgaaaagccaagcaggtgaaagcaggggctgaaaataagtttcagaattttccaacgccgcgttaacatttttttatttgaattttcaaattattactttttcaaaaatttaatccgccataaatttagaaatctcgagggtcgaaaaatttccatgactcgaaaacaaaagaaatatcctaaatttctcggtccggccgcctggaccgagaacctcgactcggattatcttcactgttgaaagcccacctgcacttggacagacccatgaccatggccaacgccaccgccaccagtctctgccgacccaccggcaccaaacattcgctgctgctgctgctgcccaaatgccattgttgttacgttttggctggcatcagccggtgccatttgaccaaatgtgccgctcccaatggcactccatgtgccattgttgcggttgttgatgatgccatgagcattttgctgctgctgattctgttgatggccatacagtggcaacaacattgggtcgtaagggtttttcaaatttggctgtcgatgttgttgttgttggcgttgtgccgccgggtctgccgcaggcaatgtgccaactccaacaatgcctccagcggaaggctgctggtttctcatctgtggttgttgctgttgctggtgccgaaagtccatagattgggcccggaaaatgccaacgacggaaatagcacacaaaagcaattgttggaaaaaagttgtgccgtgccgcatatcttctgctggtcactgaaaaattggttgagtgaacgatgtgggccttgtgatcaagcaaaacgcaacaaaaaaagagcaacaaatttttctaaaccccgaaaaaacttcccggtaatttcggaaacttcggtaggtaaagtccaagcaaatttatccggttaggcgcgtacggatcgacagcggtactaacctctaactattttttaatgccccaggcgataattatgnaaagtanaattaagcggtcaatcatcatttttaggatggacatcacaacacaatctgataatattcttatcgacaagaaactgctgcaaatcattttgtgggcagcacagaaag

SEQ ID NO: 28742 - DNA, 1347 bp, Heterodera glycines
gagacattcagtatcatccatcgatcctattggggagacgatataaaaacgattcatgataaaatcttgttgtataagaaaaaatggcgccggagcaaaataaaaaaaaagccaaaaatttaaatagtaaatcagctatgcctctctctacacggtaaaagaggtttgaaattgatttgaatacttcgagttcgaaagttcccttgttagcattcaaaggatgatttgttttttggcattatttgcttggcaataaatgcaatcaaccaatcaggagaaggctagtgaattttttccgtagcaacctatgcgctaccctatttctagcattgcaaaattatgaaatggtcaaaccgaagcctttggaaagtctgccgatccgagaaaatcaattcgcgtgttgtagaagtggccggccaatggcccgggagatgcttgttccagattttgggcgggaaatcactgggatggactgaagtttacgcgtgcttttacaacagaataggaagaaaaccgttttccttcaattgaattgggggggtggagaccaaacacacgaagacaaagccacacacaatatttatttttgaagtccgaggagatcaccaatgtgaagcaaattgagaacgaaatttagagaggaaattttggaaaacaaattaatgagaataatgagaagtgaaaaaaaatgtaccaaacataaattaaagaggtcaacaaacataaaataaatagagataaaatgccataataattttaaattaaaacaaatatcttaattaaattaaaatctccaacacccccgaacaatctcgagaggcgtcctcgcctcaaaaacatcactcgtccatcgaaaggtgggtccacgagcagtcaacggcgaaaagggcgagagtcggacggatcggaacgacgattcatcggcggtccatagcgattggtgttgcgccattgtccagcatacggatgatggcgagtcgaagtgccacggcgattttggggcgggaacggtccaatccgacaaggatcgactcgatctcttgcggtaacattcggggccacaacaaccgtcgggttcatacgagaatcggctcgattactcgtagagacaactgcagaattgacggtccgaattttcaaatcctgatcgcccgggaatttcgtctgggagaaaatccaggccttaagcattttgcagccattattacacattttcccctctttggaaacagtgtgtttgttgaaattttccccgaatcggaaaatttccaaaactgatcggcctttgtcggtggtgaaaattggagagagcggcgatttggtgatgatggcgtgcattttcgtgat

SEQ ID NO: 28743 - DNA, 1038 bp, Heterodera glycines
cattaaaataattttatccaaaaaattttttttgggttttgggggcattcccctgaaaccgtgcgccccagacttttttggcagaatctgatcagaatagcaccactatagcagggatactgaaaggaagagtttggatttttttccatataattgagtcagttcatcaaaataatttttatcgaaaaaatcgatttatttgggttttcggggcagtccccctgaacccgatgcgcccagatttatggggagaccgaatccttcgggaatagcttccctatagcctgtactttaattctgcgttggatttttgctccccataattgtttgagtaccccaaacggacacttgaaaaaatcgatttttttttgttttcggggcagtccccccgaaccgatgcgcccagatttatggggagaccgaatccttcgggaatagcttccctatagcctgtactttaattctgcgttggatttttgctccccataattgtttgagtaccccaaacggacacttgaaaaaatcgatttttttgttttcggggcagtccccccgaaccgatgcgcccagatttatggggagaccgaatccttcgggaatagcttccctatagcctgtactttaattctgcgttggatttttgctccccataattgtttgagtaccccaaacggacacttgaaaaaatcgatttttttgttttcggggcagtccccccgaaccgatgcgcccagatttatggggagaccgaatccttccggaatagcttccctatagcctgtactttaattctgcgttggatttttgctccccataattgtttgagtaccccaaacggacacttgaaaaaatcgatttttttgttttcggggcagtccccccgaaccgatgcgcccagatttatggggagaccgaatccttccggaatagcttccctatagcctgtactttaattctgcgttggatttttgctcccccataattgtttgagtagactctaacggacacttgaaaaaatcgatttttttgttttcgggg

SEQ ID NO: 28744 - DNA, 1071 bp, Heterodera glycines
gtggaagggtcctcacatctttttgaggagtatccgggaaaactataggaaaaaaatcagcgcggacgactgagtcccgggaagtgatttgtcactttttcgctcattttagggcccataacttttttcataaaacccgaatcaaaaagtttccgctggtagggacctaagttgaagtgttgactaaaattcaaaaaaaattccaggcctctacctataatagggaaggctgtaggtgcgtagactttttcagtaccaactttgtccagttcagtcccgggtgaataactcattagggtttgatctgagcggggggtcgccagcgggactattgtagagcttgaaaagctcgatttttccaaatttaaaaatttcgaaaattttcaaaatttctcgagctaggcctaaaaaactgttttcgggtttttgaattttaggattttttaacgatttttccggggaaaacggagaccacttccaaaacatcattttttgagctctatcgattggtgatatttttgaaaaaatttcgattttttcccggaaatagaaaaaatttttggcctgagcgggacatttcagtcccgggcccataactcgttaggggttggttttatcgaaaaaacgccttagggcaaaattgtagagcttttgaagctctatcgaatggtttaggataggtcgagaaaatttcaaaaattttcgagccaggccccctagaaattttcgggaattttttttcggacgaaaatgggggtgaaaaatatttttctggggtaaaataaggtgctgagtacgaatatgatgtctattttaagtttcagaatttttggaattttttaaaaattcgaaaatatttggcaattttttggccctcgggattttggcctaatatttgaaaattcataacaaatcgaagggttgatcaattttacaggaataaagccttaaaaatagagaaaaatctggagaattttatgggatttatttgggttttctaacatcaatatgaaaaaagttattccagaaattctggaaattttagatttttctgaaaaaaattcctaattc

SEQ ID NO: 28745 - DNA, 1486 bp, Heterodera glycines
ctgatggtggctcttcggtggtcgcttcttcggcctgacgtttctttcggatttgcgcgacttctgctccattagcaggcggttcgccgctttcactcgactttgactgaaataaattaattttacacttaagcacaatacttatattctaaacgcatgcatctactaattattgatgtagcttttgataaaatgagataattttcataatttggctttgcatggctaaaatatttagccctttttgtatcattttttgtgcattttcatttcagaagaaattaaatatgggggaaaattaggttctaatgaatttttaaggggacccgttattctcacaaaaaacggtttatatcaccaaatctcaaaaacttgctagacgcgctcaaataccgggcaaacattttcataatctgacaaaccgaatgaaaaatagcaaaacgatgaaaataacaaaccaggcaaaaacccgagaaaccgagaaaaaagggcacgtatcctcaaaaccaggcaggcaaaacatttttggccattcaaagccaaaatgtgatttggtataaactgcttaaaaattaattaaaacccaaacttaatattatttttttaattttaaaaaacgtactgggaatgagttgatcatttcacaaattagcagaaggaagaaaattgagaaaatgctttgggttcgcattttgtttactggtttctaaatgccaatttcaaaatgtgctaattggttctttcattgctgattttatagatgcaaattttgaactttttcaatcacttaaatttgcttagctgtaaatgccaggcataaatttcatcaaaaaacttaaaatttatttaaacaattgcccatttattaccaatgtgtctgttagtgcttaatgaatccgttaatcagactgaataaacaaaattcttaatgaactgaattttcaagccatcaaattataactgccacgtaacttttgttggttgttaaaactaaatatgaaatttaataaaaatatattttaaatgaattagtttaactatttttgctgataactatttttgctggtcttcaattattattttttgactttatgccatttttggcgcccagtaaagatttttttcttttccagattttcttttcggaatttttttggtaggatttttaggaaatctgcaaaaacccacgatgagatcataaaacaacaattttttctcattttgggcccgttttgtgcatccatcttcagcagtttccatttactcggacagattaatattaaaccaatataaacacgattgaatgccagaagaaatttttttcatagctaaaaaattgtaagtttttaatttcattaaattaaaattatttcgcattttgtgaaagaatggaaatgcaattgcggtaaaacggttctcaataaaatattttttcatcatccctaatcttaaaatccaggaaaatcaaggctaatggaacttttat

SEQ ID NO: 28746 - DNA, 1404 bp, Heterodera glycines
  unsure (1)..(1404): unsure at all n locations
gaaaaaaaccagcaaaaaaattttcaattttttttctttttcatttggaaggtccttttttctccaatgggaaatatttttttttgaattattataattaatattaaaccaaatttttaaaaaaatggtgcagcttccatgccatgttcgtgtccactttatcaaaaatatgaataaacaaattttgtttggcccttttttgtcaacagaaaaagcattattgaaaaatttgatgaatttggtaggtttttgtttctctttgtttaccattttcaattttgcttcgagaccggggttctcaagcattaaaaactttatgaggatttaagagtattagttttccattccgtactattttagtaaatacggtaggtaatttacaattcgatgaacaatatttaaatttatatatatttagtgtttttttaattaggacatgaggatgactcatgctgggtccattctgagtggatggatgcgcaagaaatgatggccaatttcattgagcaacattcggtcggttcagttctctcggcatttgctggtcatcatgtgccacaacatattgcaaatttgctcaatgagaatgaagaatccacgcagggtcaaatctttaaaattaatatttagtttattaaaatttgacattttacttttaatataaaaaaaaataaaacttaacaaaataacccaaatttttaaaatcaagagtaaattaaaaatatttaattttttttgttactgaatatctaattttttattgataaattccgaaacaaactcataatatatgaaaattaatttatttctcaattcgtgcggttaaattcattcttttttcaagagcaatttgtcttgactggcgttcacttcgccattgttgctctgttgcagaaatttcagtaaaagagattgtggatggttggtcatcatcaaaatcatctccggctaacggcaaacgcattttcaatgccaattgtccgataaaaaaaagaagttaaaccgattatgtctaagatgtaaaatgattaatgtatgtttattaaacataattagttaattgatcaaaaggcttataaagccaaatatgccaaatcataagattagtcaataattaataatccaactcattttcatcaaattctttgttttcttctttttcttcacttttctgctgctgatcattcgaagccatcattttggcgattttatagtcatagtaagctgacattttgtcaaccaagggcatggcagaatgtttgaaaaagtctttttggagttcgagcacatcgcgctgcagatcgacaacagggtttacggttcgacgaaatgccttggcaaaaaagaaggagaagggcgtgccccgaactcggtcttcggcattttcgntggcacttgctacaa

SEQ ID NO: 28747 - DNA, 621 bp, Heterodera glycines
ctacgaaatacattcaagtactagacaattcaatttaaatcaaggaaaattattttagcccccagacgtgtgttggaacgcaccgtttaaaaacaaaatcaggcaaatttacgatgaatggatggtgaatggagagaaagaaacaacggcgtccggaaatatgaaggctctgccaatggagacgtatctgcaatggattgtcaccgcctggaactcactctcgaaggaactgatcgccaaatctttcctgtcatgtggaattacggaggaaattaatggaagtaaagatgagctgatcaatgttttcaaggtcgtctatttgcagttttttgtgtatttttcaagtgttttaaggcggacggagccataccgaatgggcttaagcttctgagccaacgtcgcaatgaagaaaatgttgtgaaagcacttgaacaaattgatttaggataagatgaaagcgatgtctctgtcgacgttgctaatgaataatattttgatcaaatttattttcttttttaataaaattgatcgccacatgaagtcttttttaggggcctttaattagaggggagggccttctaccagaggggggccttctattgttcaacccctccaaaaagg

SEQ ID NO: 28748 - DNA, 1342 bp, Heterodera glycines
tatatcatttcgccaaataaaaaaagcatatagaaccaaagcaaaagctacctacctaattcccatttaatttcgcagccaattttctataattttcaaaaaaatacaaaatttaaattttaaaagctaaatatttataaaaaatggcttattctcgttcaccaagtcccaatagagaacgttcccatcgctcaactcgaaaacgctcacgcgatcggagcaacgagaggcgacacaaagcgccacgctcatcacacaaagaaagacatcgagacaggtcattttatttaaggacggaaactaagatgagctactttttcattgtgcaaagagaaaatgggtcccctttttcaccattttctaaaaattaaatccagtttttcgttaactcaacaaaaaacatagaaattacagggaccggcgcggagatagggaccgagacagagaccgagaaagggagcgccattccagtggtggagataaaaatcgcgagcaccggagcaagaagaaagacaatgtagctcacgctacaaaggttgtttgtgaagcttgtacgaacatttcaattgtttttagtctaaccctattaatgaaattgtcgatgttgatgaggacatgatgcgaatgatgggtttttctaattttgacacaactaaaaataaacatgtcgagggaaatgcctctggtgagtcgaagatcaaccgggcgcgcaaatatcgtcaatatatgaacaggaggggaggctttaatcgtccattggattatgttgcctaactgtacacgttgttttatgtaattgtttcacctttatatttcttttttgtgatctctattgttcaataactctgcttttacatacttgtttatttacaaaaatatatatttgaaatactattcagtccttgtaatattgactttttttagttgtattataagtctttattgaaatattatcttcaaatggaatcaacttctgctgaagatgaaacgacggtatgaatgaaatggatacctattagaaaatgttttcacaattgggctcatggtttgtcccccataaattttctggaaacgatttttagagtcaggtaggacatcttttcttaggttttcggtgtctgaccatgcattaacaaggggttcgccagtcgagggcacctcgtttccggtaggggtcaactccgtctggccaactccgtctcagcaatgttcaaaaagctataacttttttctttgttggccaaacttcacaatcatggtatcattcgaaagccctagatgtttagaagatatttataagctatttctcagtgattaatcagctctcaaaaaagtgtcagtt

SEQ ID NO: 28749 - DNA, 739 bp, Heterodera glycines
agcctgtactttaattctgcgttggatttttgctccccataattgtttgagtaccccaaacggacacttgaaaaaatcgatttttttgttttcggggcagtccccccgaaccgatgcgcccagatttatggggagaccgaatccttccggaatagcttccctatagcctgtactttaattctgcgttggatttttgctccccataattgtttgagtaccccaaacggacacttgaaaaaatcgatttttttgttttcggggcagtccccccgaaccgatgcgcccagatttatggggagaccgaatccttcgggaatagcttccctatagcctgtactttaattctgcgttggatttttgctccccataattgtttgagtaccccaaacggacacttgaaaaaatcgatttttttgttttcggggcagtccccccgaaccgatgcgcccagatttatggggagaccgaatccttcgggaatagcttccctatagcctgtactttaattctgcgttggatttttgctccccataattgtttgagtaccccaaacggacacttgaaaaaatcgatttttttgttttcggggcagtccccccgaaccgatgcgcccagatttatggggagaccgaatccttccggaatagcttccctatagcctgtactttaattctgcgttggatttttgctccccataaatgtttgagtaccccaaacggacacttgaaaaaatcgattt

SEQ ID NO: 28750 - DNA, 800 bp, Heterodera glycines
tccgtctccctaccacgaacgcccgggccgatcggacgggtccaacgcgccgttctttccccaattttcgggacggtcgaagaactcggccagcgcgtacaccttcttcttgcggcgtacttccgcctcaacgtcatccttaatgggcattgagagagagaggatgcgaaaaggacagaaacaaaagcacaaaaatgggtcgaatggacaaattttgaacattttcgagtgggagaatgccaaaggaatggcaagttggcattgccaacttagcagagggcatcaatggacagagaactgggcaaaaattacaaaaaagccagcaactttttagctagtaattttacaccaaaattgtcaatttttagtttaaaaaaaaataaatacaatggaaaatagtgccacggcatggatgccaaaaacccggcaaatgctgagttttccagtcaatttcaggaaaggattaaaagtggcgccttaacacagattttgatatctttttgcacctttttcttcgtagacacattgtccttgcgcacatccatcggatcgacgacgtttttgaagttattcctcgtggcgaacgaacgccgccgggggacggcggacagagcgaagagggaaagggcggcagcggaggaggaggggggaacaacaacaacaaatctgagggggaggaaaaggatggcaaaaacggcattttataggggggggggggagtcagtgacaaaaaagtctttttgaaaaaagtgaaccctaatccagccgaatttgtgagctaacgcaatgtttattttgta

SEQ ID NO: 28751 - DNA, 991 bp, Heterodera glycines
  unsure (1)..(991): unsure at all n locations
tgaatgtnntggcggttattgggttctctacaattatctaccttctgataattcccaaaatttcatctccgatcactgctttgttttgccaagcaatttgttcaaatattggcgcagcgtcaaacggaccgatttatattttacaaggtaggtaatctattgagtgcttgctcagttttaagcacaaaaaatcaccgattcagcactgtaaacagcaccaaattttcccaaaataagcatcaaaaaagcacaaaaaggcaaaatcagcacaaaaaattggaaaaaaacataaaaattaagagattaaaggcaccaaaaattgaaaaaagttgtcaaaaaagcgtttacttgctccctgattataaaaaacctccaaaaaaaacataaaaattaagagattaaaggcaccaaaaattgaaaaaagttgtcaaaaaagcgtttacttgctccctgattataaaaaaccttcaaaaaaaacataaaaattaagagattaaaggcaccaaaaattgaaaaaagttgtcaaaaaagcgtttacttgctccctgattataaaaaacctccaaaataggtgctaaaatggtaatagatgcataatttttaaaaatcaaaatcttgtcaaaaaaataaatttaaaaaaatttaggagatgaattatttttgataaaattttcatttcttaagggtgtatttttctgaaatttttcgggtcgtttctcaggggtgtatttttcgtttttattgcatttttgttaataaattttttgaaaattgctgaaaatattttcgaaaattcctcaaaatgacgaaacagcacaaaaaaagcaccaaaatgccaaatcagcacaaaaaccaaaaaatcgagaaatcagcatgaaaaaagtggacatagaagccctcaacccagtagaaatgcgttttcatgcttatatcacgccccnagtagcaaaaaaacaaaaaacacagcatatgctgcaaaatgagcactcta

SEQ ID NO: 28752 - DNA, 1511 bp, Heterodera glycines
ttttaaaaattctttattttttggaattttttggccctcgtgattttggcctaatatttgaaaattcataactcggtgatggtttcatcgatttaactataataaagctttaaaaatagagaaaaataaggagaattttatgggatttatttgaaatttataccacaaaaacaaaaaaagttattccagaagttctggaaattttcgatttttcagaaaaaaatttatacctcggttctgaaaagtcattagggaagagtataatgctacaaaaatccgcaattttttgctctattatataaattttatttggcatttttatcacatttttaaaaaaagatacaaaaataaaagtgtttttggggttcgggcccaaaggggggtgaccaggatttttgggtggaaaaattttttcaccgaaaatcttccaaaaacatgtcattaggggttatttgggccgctgatcacgaatacgtgatcagattttacttttgacatcgataagacatcagaatccctgtgtgattggggtttctgaggcatcatttttttgggggggtgggagttcggatccgggcggtaacacattatttttatatttattttttgggttaattttcattacttttaataaatttaaatgtttggttttattaataataaatttttttagtttaattaaattattttttgatgaataatgattttcatttaaattatttagtatatttaattaaagaatttcagctattattttaaaatttaattgtaaaatttttttcatttcaatttaaataactattcaattattatacatttcataatttgtttttcattaataaaaagtgtattatattttaaaaaatgaaaaatataacacatcgattttttttatctattttgattaaaaacaattcattaattaccataaatgctctatttgaatgcccactttctaatcactgttgtacctcttctaatcactgttgtacctcttctaatctctgttgtacctcttctaatctctgttgtacctcttctacgcgaagcgtcccaatgtcctcaacaaaattaaaaaacgggcgcgaagcgcccgtcctgaagccgcgaagcggccgattgttctcaacaaaattaaaagacgggcgcgaagcgcccgtcttgaggccgcgaagcggccgaatgcttcccacaaaattaaaaacgggcgcgaagcgccccaatgtccaaaacaaaattaaaaaacgggtgcgaagcgccagtcctgaggccgcgaagcggccgaatgttccccacaaaattaaaaaacgggcgcgaagcgcccgtcctaaggccacgaagctgccgaaaattcccaacaatccacaatatttagaagcgcaaagcgcccgtctgaggccgcgaagcggcccaaatgagtccacaatatttagaagcgcaaagcgcccgtctgaggtcgcgaagcggccgaatgcacttgcctataacttatcaaacgcgcatgcactagc

SEQ ID NO: 28753 - DNA, 1016 bp, Heterodera glycines
ttctgagtaactttatttacttgacccccttgaaatccccccccccccccccccctccgctattcccgtcccctattttgtccccgatgctgatcactttcatttttcttgtcagaaaaccccatgccaccgcgtcgtcagtgcccgccgaatgcttccaaaggtattattcgccaccgcaccaccaccatccaacagcattggcggtgaccaaccacgaaggcgatttctcagtggacgagagtttttacgccgccaatggccaacggttggtcggacggcggtggtgccgtgccacggcttattcttaccaacaaatcgccaaaattccctctggcctttttgagtctttgagggctttggcaccactctaaaaagggcactttttgaacggaactcttggtatgcaaaattctttttaaagatggctaattctgaacaatgaacccaaaagtcgagaattgaagcgtttttcgactttttgagttccgctgattagtgattcgaaatttgtcaaaatggatgtcagactccgtgatcacaccgatcccgaaactctagcgaaaaagtttttctggcctttttacctacataaagtagcgccaaaattttttacattttgtccaaaattttaatcaagtttctttaaaatttaatttcattaaaattctttcggttttaattttttttccccgttttttttggttaattcattttgctttttttttatattttcgggctgttttctttaatttttcgccaattataacttttttttaaattccctttcagctgcgcctattgaaaacctaagctcacattgcccgtggaatgccatcactgaagaagaattaactttttttaatcaaaattgacaaattttttaaaataattttcttgactcagaaaatatggaacttttttttcatgtttttcattattttaaattaaagaaggttatttaagcttaactggagagtattattaaaatttctaattctttagaaatttcttaa

SEQ ID NO: 28754 - DNA, 978 bp, Heterodera glycines
  unsure (1)..(978): unsure at all n locations
cgtttttgttgggtcaaaggcaccgccggagcaaacgacaaaaatggcagggtcaattttgacctccaactccagcttcttgcgcacgtcaaccatgtgctgaaggactgtcgcagaacggcctaaaaagagcaataaaaaaaaatttgtttaaaataaattcaggttttcaactaactgtcatgaaaatggtcatttttatgcaaaactgctagcaaaaattctcatattttaaataaaattccaacgatttttctcggcgattcacacccgaaccccaataacttttttttcttaaaaacgctcaaatgcaccaaaattaaccgttttttgcgataattttttaaataatactctcaattcaaaattttcccgtcctccggttcccaaaacagttggtgaagacggactgattttggcggtctgaacacgtcgattgttcaccgccggggaatggcacgtaaacaccacctaaaattacagaagcagtattgttttagtttaaaaaaatcaggagcatgtttaggaaaacacgttgttcaaagtcgccctctagcggatttgtttcaaattttagtgacattctatttacaattaaaaaattcatcaaaatcgctactttaggaatttattcctgggtttgttagccataatttaccttcaccgattcgatgctgctcacactgacgccagtccagtgtcattgcgcaacaaatgggaggaagtgtcgggcaaatcactccgcggggtgctgatttgtttggaagcattttcaaatgcctaaaacagaaaaataaggaacaaataaacataaaggacatacttaagagttgggtaagctgttggaggaatgatttggtgatggtgatgacaatggttcggaggcctcaacgattatggccaattnttgggggtggcaatgcgattttggaatctccgctcgtctctttgtccttctggtgttggnaggtcgatgga

SEQ ID NO: 28755 - DNA, 1443 bp, Heterodera glycines
gttatgaatttttttctgaaaaatcgaaaattttcagaaattctggaataactttttttctttttaagatagaaatcccaaataaatcccataaaattctcctgatttttctctatttttataatataattgcatgaaaattgatccacacttcgatttgttatgaattttcgaaaattaacccaaaatcccgaaggccaaaaaattgacgaattttcaaaaatttttaaaaattccaaaaaaatctgaaacgaaaaacaaaggtcatattcgtgctcagcacctcaaaataccccagaaaaaaatttttcacccccattttggcccacaaaaaaaaaattgaaaatttctagggggcctagctcgaaaatttttgaaaatttgagaaaatgaagtacaccgttcgatagagcttaaaaagctctacaattttgctctaaggcattttttgtctaaaaccgacccctgacgagttatgggcccgggactcaaatgtcccgctcaggccaaaaattttttctatttccgggaaaaaatcgaaattttttcaaaaatatcaccaatcgatagagctagaaaaactatgttttggaagtggtcttcgtttttctgggaaaattcgttaaaaattcttaaaattcaaaaaccaaaaaaccgttttttaggcctagctcgaaaaattttcaaaattttcgaaattttaaaatttagaaaaatcgagctttcgaagctctacaatagtgccgctggcacccctgcgctcaggtcaaagcctaatgagttattcaacggggactgaactggacaaatttggtactgaatttttgtagaagcacacaggccatggggttagagatagaggcctggaattttttttaacatttagccaacacttcaacttagggccctcacagcgggaattttttgatccgagttttaaaaaaaaagttacgggccctaaactgcaagaaaaagtgagaaatcggtccccgggactcagtcgtccgcgcagaatttttctctatatttttcccggatgcgccgtgaaaagttgtaagaccaatgcacaactttcaaacccgtcccgttagccattcccgagaaattggttttaaggatgaaaccccttgtcaatataacgtatatataattaatttaattaatcgatgggtaaatgtccaaataaacatttatttatgccttccctcaatacccccccccccccaactatttacatggctgggccccctttagaaaatttcaatttgggtccccaaaaccccactttgtcagtcgtctcgcgtcctccatatttggagatcaatttggctcccgaaacgaccgcatttctggtggacgtgaagttggaatgggactcgggcaaaacagacgatgagtgaatgagcggggagaatgtcagttccgactgatcgacctgggaat

SEQ ID NO: 28756 - DNA, 1284 bp, Heterodera glycines
  unsure (1)..(1284): unsure at all n locations
tcaatttcttttatttnttataaatcagcaatatggattaaacaattttgtctttttatctattaagagaaagttatntaaaaggtatttttaagttataaaaaatattatattttataaatttaaaaaggaaaattcatagaactaattaggtaaaatatttaaaaatatcagaaaattacaaaataattgatttaaacaaaaaaaattatttttaattttataataaaaaataattgaaaatttaaaatatctcttcgctaatgtacgaaagaaacaaattaaaaaataaataaattcttacacataaattatgcaaaaaaattacggattggatattacgggaaatcaacatgaaatggaaaaagattgttttaatacaaaataatatttaaaaacttttcgtaaaatatttaaaggttttaatttattattttaaatattttaataacgcatgctgagcagtcatcgattctaattcaattttaaaattattgacgtgaccataaatgttctttttctgatcaattggcttgtgttatgacattgtgtgccgtattttgcatagtaagcaaaagcccattttggcgatatcttcggaacataatgccagccccggcattttgccaattgccaaacgcttttccctcccccaccaatgtttctgtgtttttctcttcgatattccattttcaattttttttaattgtacaaattatttatgttaaatctcttatttggactattttacttcggcttaatcctggtattttttgtgcattgaaatatttgttaacaaatttctctccaataaaataaaatttcgaagggactggcagaagaaaaccacctaccggagtcaaaatcatttttgaatatgccgatcgttttaaaggcgactttcctacgtctccctatctattcctttttttgccatttcttctcttcctcgtcttctgccgcttctattcatgcccattttccaccatctctttccactaattcatattcaaattttttgctttgactattatctttatctaattttggcagttttaaacgaaaaacataaaaaattaaattttaattaattgaattagcttttgttctgaaaaatgcacagcaattcattcttgaaagagatgaaagagggtgaatatttggaaagacaaaagcaatggattggtaaaaatcttgagcaaatcgaacaaaagacttccgctaagaacagcgcaatcatcgtatgccgttttgcgccccatttgaattgtgaanatgatttta

SEQ ID NO: 28757 - DNA, 986 bp, Heterodera glycines
attaattattattatattatataaccgttgttattgtgtgtacttaactgatcaatctccgccactccttcacccaccctttggtgtttcattttgaccaccaaatggacacttttcgctttctctctccatctctctttcgattcacaaacgacacacactctctagtgcattaattgttcttttacatattaattgtgaatgacgcgacgccgcacatgatgtcatatttacagccgaataataacgggtcagactgctgctttattattaccatttttgtgaatgtttttctctttctttttgtttgcttgttttcatggacacaattatctacttattacaatactgtaattcaatgagagtttgactccgcatttaaattgatactccgatcgattaaaatgtgtgtaatgaaatgaaaatgcaaataaaataagttgccgaggatcattttgcttttgtcctattccattggttccgtgccaatttctctgccaatgaaagcaaatttccgtttcatttaccatatggtgtgctgttgaaatggaacttaaaaagacaaataatttatatctggcgaactgtttaaatttaaaaaaatcgcaaattttttttatcgaaggaaaaaaaacattaaagttaaacaaatttacctatgtatgtatgtgtgttcacgcaattaaaagctataactaacttaaccctttatgtgcactcgtatgataatttcttatttgagctttttgtattaaaataattttgctaaaaaatgggtaggaagaagaagaagccgcaaaagccatggtgttggtaagtcgaaatcaaattagttttgatgggcatcattccttttgtttaaggtattgcaaccgcgaatttgaggacgaaaaaatactcatccaacatcaaaaggtttgttttatttgtacggataacttaatttggaaatggaattgtcggatttcaatgacagagtttaattg

SEQ ID NO: 28758 - DNA, 1459 bp, Heterodera glycines
  unsure (1)..(1459): unsure at all n locations
aaaattcatcgccactgccgccttatatgatgacggcaagcggtggcgtcgcaaaattgggaggacggtaattagcaaaattaaattaatttttaataaatatgcattaatttgtggccaggcgtcaccgacggaggccctattcgtattacgggggaatgggcggcggtggtgcgagtccatttttggtgggttttcttgatttattttattttaaaaaaatatattttaaattttttatctctaatgattccatttgctcttgattttatcctggattcccctgggggtgtaaatttttttgagggagggtcgccggcgaagggaaaaaaattaatttaaaattcaaaaaattttcccggcggcgcctttcggcacctccgaatctcctcccccccccccctagttcaccaaaatttttttgaaaaaagcgcgccgcaaaaaaaggtttaaaagcaaaaatcgtttacattgccggaccccttcgcaaattggccggccacttaccctcgcccttcaattagaggctttaattagtcattaattttgtccctgattttgtgcccttctctcccctccatttgaactacccccaccaatttttaggcttcgtccgccggtggaggccaccgcggttggctgtgccgcgcgttgcactgccggaggttgaagtccgtgtgcttttttttgcttccattaaaccaattaattaatttaatgagtggcttaattaaccgtcataaaataggaagcggcggatgccacttagccaaaaaagcttttcaaattaataaaattactttaatataatcgatagtttaaaagctgcaaatacaatagaatagaatgcttattagcttttcctaatatagcatagaaaaattgattttaaaaaaattaaaataatttaataaaattaattttttttaaccattcacttcaaagcttcctaagaaaaagccaaacaattaaaatttataaaaaaacataaatttttctttttgttcagcccgtccaaaatcgacaggctttcccgctcatgtttccccattttgttcatcattttcaatttggtctattggtaaaaataaatttttttttaaatttaattataattatttattatgtttatatttttaggtccgctatgacaataatgagtcagcgcgagttggagaaggtcgaatttgtgccgttcaccagctgaccaaaatgccaccatttctttttctcattttctccacaattgctcactcatttttttttacatttttgtacattttgaagaattttatgatcaataataaaaatatattttttaaaaatgcatttaattctaattatgattccctgatcccgacacaaactcacgaataccgacacaaattacgaaggggttcgggcataaattgatcaaaagaggaagaaatgaaaganaatagtaaatcgacatcattta

SEQ ID NO: 28759 - DNA, 1038 bp, Heterodera glycines
cctaaaaatcctatataataaagttgagtgtttgtatgtacggatttttgaatttgtgtggcgttttgttattattttgcgttaaaaaatgatttgaaaatgaaaatgtttttgttttgttttgcgttaaaaaagcatttgaaaaatgaaaatgtttggttttgatttttcaatttgttttgcaataaacattcttaaaattatacctatttatttgcttttttatgtatgttcatagtttaataagttatttgtcatataaatttgttttttgtaaacgaaaaaatttatcagtatattgtttgagtatgatttagtggttgttgtttgtttgtttgtttattttgtttttgtgttctttacgtgaaataattatgcttatgcttaatgttatttgaacttttaatgaaatagaaatgcatatctttggtttgttctgtgactttcgtgtgagacactaatgtgtgtcatgcttttgaaaaaacaaaaaaacattagtggtttgttctgtgactttagtgtgagacactaatgcgtgtcatgcttttgaaaaaacattagtggtttgttctgtgactttcgtgtgagacactaatgtgtgtcatgcttttgataaaacattagtggtttgttctgtgactttcgtgtgagacactaatgtgtgtcatgcttttgaaaaaacattagtggtttgttctgtgactttcgtgtgagacactaatgtgtgtcatgcttttgataaaacattagtggtttgttctgtgactttcgtgtgagacactaatgtgtgtcatgcttttgataaaacattagtggtttgttctgtgactttcgtgtgagacactaatgtgtgtcatgcttttgaaaaaacattagtggtttgttctgtgactttcgtgtgagacactaatgtgtgtcatgcttttgataaaacattagtggtttgttctgtgactaaggtgtgagacactaatgtgtgtcatgctttgaaacaaaaaagagtggtttgttctgtgactttcgtgtgagacactaatg

SEQ ID NO: 28760 - DNA, 1022 bp, Heterodera glycines
tgtcatttcctgcataaatgttttcatataaaggtccctctaggtgatcgggtttaggaacattcaacaaatgcatctataaattttttgaatattatacaattgtgcattttgctctctatcaatttattataaaaaaattcacttcccttcgaaattgaaggcagaatgctcatttgaagctacgcaaatataaattaatatttgctataagaaccgactatttagtcaacagaaaacaaataaatcataaaattagaacaaaaaatgattttattttagaatgcacactgaagatgcataataagctaatatattcgaatttattttgaaataactgttcaacagattattagttatttctaagaaataatgataggaagcttatctgaaatgtgtgcttacccaggttggaatttgtcatttcctgcaataaatgttttcatataaaggtttaaaaaatttgatcgggtttaggaacattcaacaaatgcatagataaattttttgaatattatacaattgtgcattttgctctctatcaatttattataaaaaaattcacttcccttcgaaattgaaggcagaatgctcatttgaagctacgcaaatataaattaatatttgctataagaaccgactatttagtcaacagaaaacaaataaatcataaaattagaacaaaaaatgattttattttagaatgcacactgaagatgcataataagctaatatattcgaatttattttgaaataactgttcaacagattattagttgtttctaagaaataatgataggaagcttatctgaaatgtgtgctcacccaggttggaatttgtcatttcctgcaataaatgttttcatataaaggtttaaaaaatttgatcgggtttaggaacattcaacaaatgcatagataaattttttgaatattatacaattgtgcattttgctctctatcaatttattataaaaaaaattcacttccccttcgaaaattgaaggcaggaatgctcattt

SEQ ID NO: 28761 - DNA, 1491 bp, Heterodera glycines
aaaaggccaagatgcaatggatcaacggccaaagggacaaaatacaatggaaacggccaatgggacaaaaggcccaaaatgaaatggatcaacggccaacgggacaaaaggccaaaatgcaatggatcaacgggcaatgggacaaaaggccaaaatgcaatggatcatcggccaatgggacaaaatacaatggaaacggccaatgggacaaaaggccaaaatgaaatggatcaacggccaataggacaaaaggccaaaatgcaatggatcaacggccaatgggacaaaaggccaaaatggaattggtcaacggccaatgggacaaaaggccaaaatgcaatggatcaacggcaaatgggacaaaaggccaaaaataacatggcaaaggccaatgtgacaaaaggccaaaaataacatggcaaaggccaatgtgacaaaaggccaaaatggaattggtcaacgggcaatgggacaaaaggccaaaatgcaatggatcaacggccaatgggacaaaatacaatggaaacggccaatgggacaaaaggccaaaatgaaatggatcaacggccaataggacaaaaggccaaaatgcaatggatcaacggccaatgggacaaaaggccaaaatgcaatggatcaacggccaatgggacaaaaggccaaaaagcaatggatcaacggccaatgggacaaaaggccgaaaagcaatggatcaacggccaacgggacaaaaggccaaaaagcaatggatcaacggccaatgggacaaaaggccaaaaagcaatggatcaacggccaatgggacaaaaggccaaaatgcaatggatcaacggccaatgggacaaaaggccaaaaagcaatggatcaacggccaatgggacaaaaggccaaaatgcaatggatcaaaggcaaataaagaataccaagaggattttgaaatttttattaattgagttaataaaaagaaaaactaaatgtctttttgtgtagaaaaaggaaaatgccctcaaaagtcgctttctgtttatgagcggggcaaattgcggactaaaaaatggatcaattgaaaaagaatgaataaaaagtcaataagaaaaagggggcaatcattgcgaaggcaatgggcaatcagaagaataagggcagcggatggaaagggatacaaaaataagtgaaatagtatatgaaaatgagagggaggaagagaaaggacaaggaaatagttaatggatgggtacatcagcagataaggtgatggatggcaaaatgaacgattaacgggaaaaagatgggaaaacaaataaatgggaatacagagagaatacagaaaaatgagagagtggaaaaaaaaagggaaaagatgcaaaggagtagagagaatacagaaaaatgagagactggaagaaaaagggaaaagatgcaaatgaccgtcgcggaggggtgggaaacggaatggaccgacggattgggccaagaaaatgtcattgaaaa

SEQ ID NO: 28762 - DNA, 1814 bp, Heterodera glycines
  unsure (1)..(1814): unsure at all n locations
tgcaacctcatctacgcaaaaagccctgtcaaaccaatcaaagtggccgcacacgacggcacaattccaaagctggaacttcaagcactgactctcggagtcaaggcagtcaaattcatccaagcgcaaatcaaatttgccgatcatcaagtcatcatgtggacagacagtcaatgctcagtcgaacgacttcgagaaaacaagcgccaagatcgatttgtggtaaatcgattacaaaaaatccgagaagcgaacttccaagtccgacacgtcagaaccgactcaaatccagcggacatggcatcaagaggagcggatcttcaatgccttcgatcatcactgctttggcactttggccccgtttggctttcgaaagcagacaaatggccaaaatcaaacgtcatctaccggcccggagatgaattcaaagaagtggaagagccaccaatcatcgaactgacaacacctgttcatgtcgaagaacagttcaaaccatcaatccacttcgaacgatttttgaattggaacaggctgaaagccaccgcagcacacgctatgcgcttcatcaaaaagcttcgcacaatcgaaaacggcacaattagtgaaccgcatcaaaacaacaaaccactgaccatggcacaactgcaacaagccgaaaattggatcttgagagaagcacagcggcttcattcaccatccaacgaccaaatccgagaattgcaactcttccaacaagaaggaatttggagatgcggtggacgactcgaggaagcaccggatctgccatacgacagtaaacacccaatctttctgccgccacacgcatggataaccaagctcatcatccggcattatgacaaacagctcaaacattgcggtccgagaatactcctgtcaacattaagagagaagttctggataccacgcggacgcaaaacagttcagcaactgctcaactccccgcaacacggatgtcttgaatgtcgtcgagaacgagtcaagccgtacacatatcctgaggcatcggatttgccaaagggaagagtcagcgaagcacgaccattcgacaaaacgggagtggactacttcggtccactcaaagtcaaacaaagcaatgacgtggtaaaaatctacgtcgcactcttcacctgcttggccatccgcgcccttcatttggaagtagccgaagactactcggctgaagcattcctccgagcctttcggagattcacggccagaagaggcataccatcacttatcatgtccgaccaaggcacaaacttcgtggcaggagcaaaagtcatcaaagaaaactggaccgacacgttaatgccggaggacatgcaacaacaaatggcgcaaagcggaattcgttggatttttaacacagcccacgccccttggaaaggcggtatttgggaaagactcgtcggcatcaccaaaaacgcactgcgaaggacagtcggcagaaaccttctcacattggacgagttcggcacaatgctctgcgaaattgaagcgatcatcaacaatcgaccactcacgttcgaatcggatcaggaaccgatcaaagtgctgcgaccaatcaacttcctgataccatacagcaaagcagacaacaacttcccaatcattgatgacgacacaaacgatccaacatacgagccaaacccaacaaatcgcgacaaaatggtggcaacactgagccacgttaatgctcggctgaacaattnctgngaantttnggaaaagtgactaccttcttttcctgcgcgaacacgaccgatcaaatgcaacgacaggactacaaaccc

SEQ ID NO: 28763 - DNA, 933 bp, Heterodera glycines
catcaattagtaacaaatttaacccaaaaatgcgttaaaagggctctaattggttcaaaaattgcctttccattttcaattttcctcctacaccaaaaaaaagaaatgtttccatttgtccatttttgtgacactttgtcttctcattagctgcttaatccccttctcgtttgactatgatgacgacctgttcgaaattggcactgctcagtccgtagcagtcaccggaattttgacgtgcaatggacgaccaagtggcggcacaaaagtgaaactgtacgacgtggacagtaagccaaactcacagtttaatatggtaatggcaacattaaaatttgtaaagcttttgacccgacgatttgatggccgaaggctttacggacgaaaaggaacactttctgctggagggattcgaaacggaaataagcgacatcgactcgaagtgaacatttaccatgtgatataaagggacaataaaaataattagctaattagccaactaattcatttcaagaattgtaacgacgaacatatccctgtctgcagaagttctccattgaggtgaatgaaatttgaatttgaagacatttaattcaataaacttttagatccccgacaattacataaccgaagaaaaacgatcaccacaaaagatttttgacattgggaaattgaatttggaaggcaaattctcgggccaacatcgagattgtattaatcggacattttgttgaatttattaaatacaaattaaattttagaagtaaaataatcgataggatctgtccgtatgtggcttcattcaacttaaaaaaactcaattattttcaaaataaattaatttttcctcaagaaatgtggttgcccttacttacaagggaacattccgagctgtcagtcggaaaaggcatatatatgatatagcatgtggat

SEQ ID NO: 28764 - DNA, 1744 bp, Heterodera glycines
atttgtgtgatcagaaaggggggaaatgggaattttaattttaaagtgaattttaatttaaaatttgggggattcccccgctttcggccggccaaattggcacaaagtttcacatgccaaaacctcaaaatttttacataagaaatgaattttgtttgttacgactgaatggcaagttacgcttttagtgcctattaatcttttccaaaacccctagttattcatgtgatattcccgatttttttagttatttcagcaacaaaaatggtgctgggaaaagtcaaaaatggaaaagaaaaaaaaacattttgcgcagaataaaaaaagatgccaaaagcatcggccaaacttaatgaggtgtgttaaatggcaattatgtaataatgtgtgtgttttgaatacatattgagaaagcgaattcgtaatgataaaagcaattagcagcatggaatgcaaaaaataattaacataatgatgaaagctaagctaattaaaatgcaacaaacaaatggaaagtaacttttttaaaataaatttttttttagcttaaaaatgctaaaaaacccatcgccaaatccagtttaatgcttaattaacataataacttaaattgttttgattttggcattaaaattttgttttctgtgccgtcgtgattcagagactaatggccccaaataaaatatttgtttgccgtttattgacacacagtgccccccccccccattcattatagaaaagtgtctacctgtcctctaattagctttaccacacccaataaattttagtttgcttttgctttgctgtttcttcattattttattgaagatgcactacaaattaaaaacaaaattttaaagttcagcaaacaaggcaattaattaattaggctctaatgcattttaataatggacggagcagcaaacgtacggacggacggttggaacaaatttaattttctgaaatttacactcaaaatgagtgagtggaagtgggaaaagagattgagaaaaaaggaagaatgaagaacacggtagcaatatggtaatggaagagaagggaaggaagaggagtaagtagaaaaagtggggagagagaggatgaaaaagaaaaagtggagagaaagagaggaggaagaggatgaagaagaaaaagaaagaaaggatgaaaaagaaaaagtggggagaaagagaggaggaagaggatgaagaagaaaaagaggagagggagagaggaatggaagagaagagaggcgcagaaaatagttgcatgggaccatgaattccttccgttcatccggcacaaaaaatgccgggatatatgatgttactaattataatagggagaagctaaaaagagaacggcgcgaagggtttccctcctcggcccattgcttaacagttttggtgaaaaggggaagaaagtaattagggggaattggggaacaaatggaattaatccgagtgaagtcgccttaattatgctaaaatctgccgacagcgaaagaaattcgcggcaaatggtccttggacactttcgctttcacttacattttgtcgtttcgttatgttggttcattttaatggccactgaatgtgtgtggccgcgtgcctttaattgcataataataattcaatgctaattgtttttgggttaattaattataattaatttagaaatgtttcaatgctaaaaaacacggcaattaacacaaaataatgtgataagaaaaggattggttttt

SEQ ID NO: 28765 - DNA, 1243 bp, Heterodera glycines
  unsure (1)..(1243): unsure at all n locations
aaaagacgtttttgtacaatttgcccagtgtcctcacctgctacattgggtttttctttggcgtttttgtcgccaatttggtcgagacttctctcactcccgtatttgccggcggaatgtgagcaaagcattggcggccatttcctttttaaaagtttccctttattttcaggttcctgtacatttcctttgtgagtctgcatttttttaaaataaattccatcgccgcaaattttttttttatttttcataaattttggtctttaattgaaatttttgaaaaaattttgtacaaaattccattgtactaactaccatgccatcacaaagcccatttgaaaaaaacttgttaagaaaattcagggaataaaaaaaaattgaaaacatttttcttgaaattttgagcattttatttttgctcttcgagactcgttttttcgccgtgttattttcaaaaaatgcattttcgtggcacagccggtgacagtttttgtggaatttgtttagattttgctccttaaaaagcaatttgcggtttttggcaaatgggttccccactttttgccttttatgtgcttaatgatcctttcaactttcccgataacatttaatcgcttatgagactgttaattgatcagtttttccctcctcttcgctccccaggttttcatgataccgaagatgaaaagggccatggaggaggcgctcaccgtgtccctttcgcagggactcaaagtgcttgccctgcaggcattcggagtgctcactggtgagagaaaaaatggctaaaaaacgcaaatttttcaattcgttctccccccccccccacatttttcaggtctgagcgtgatgtttttcatggcattttatggcgaaagcattaaaaatgttgttgaattttagtcggtcgattttgcatttttgtggaggatttgttttgtttttctttgtgcataaatttatcagaaatttcttgttataaattgttatattttatttaatattaagcatttcgtggtaaaaataaaatatttaatcatttacaatttaatgaaaatttcttcaataaaacaatttttttatgactgtgaaaccaattttcaaaatgattttaatttttaatcgaatggacaattgtttaccatactttatttcgttcgccattttttanataacataatgatacacgagaatgggaaagtctcgaagcatcattaaccgctaatctgcagttccggcgcca

SEQ ID NO: 28766 - DNA, 934 bp, Heterodera glycines
  unsure (1)..(934): unsure at all n locations
cggaaaatggcgtcatttntgggatgagaaatgacctgctgttcagctgcctgaatataagtactcacaaaacgttatgtgttcgttgtaaaagccgagaaaaacaatgcttaaacatttcgccaattggcaatttcccattttggcactcgccgacgccccataaattaattgagcaaggctaattgaaatcaacccctaattagcaggacatattaaaatagcttttgtaatggtaaatatttggtgaaattgttattttaaattgataaaattcctggcacttttttaaaatgtatttttctgccaaaaacagctgaaaaaataagcattggatttaattggcatttaccaaaatttaaaatttaaatgaccgtccattaaatgcaacgaaacgtccgccgatggaaacccttaaaaaaccctaatttgattaaatcaaaaatattttacagttattcaaatatgaaaaagttcatttttattgggatttttcatcttttttcttgtttctacagttcatttttatgccttttcagacgcattaattgtttaattgtgcgcttttgtgccaatcccttcactttttggcgtaaattcaaaaagtttggcgtcttatcatggccaggttatcatcattttgctccgcgttctctccccgcttccccgtcttctccgcccttctgctgctcctcgcgctgtgctttcttctcggggcggaggcggcgacgtgagaaatttaaaatatattttaaaaatattttaaattacaaaatttttagccttttaatacaaattgaaatatatattaatttacaaaactttttaaacgtttttttaatattccgtttttgttcatttcagctggcgaatgcggacggacaaaaggcgatgcgaaatgcactcgtacgcttcggcaagcgcaacgcctacc

SEQ ID NO: 28767 - DNA, 1679 bp, Heterodera glycines
  unsure (1)..(1679): unsure at all n locations
agcagatgtataaaatggcaaaaataagtgcaaaatcaaaaagtttttgagaatttggataaaataatctaaaatttaaaatgctgaattattttttgagtagaagcaaaaataagaagcacataaagaatcagaaagggtagctgaaaaatttaatttttgcgcaaattataagtaatattcaaaaactcataaaactttctttatctgtgcacttgttcaaaatatctgaaaaaaattactgttagtacataccagcgatggcatggaattccgatttccaacatttttgataaaaagtcggaaattttaggaattttttttttcaaaaattaacaattagcattttatttatttgtcattggcacctctggagtgccatttgccgttgccatccacaaatagcagttggacttttggacaatgcttcagatggcggcaagttgcccgacggatgggccccgcttcgcgcacagccaaatattcggtgatgtaatgggccggttggcccaacaaaaccacctcatccgcaacataaagcacctaaaagttcgcaagaattcaaaattgaaaaaaaaacaatttttatttgttcaaatcattattgccttaagcccggggaatgtttgcaccaccaaagagacgacggaaaactgaggctgactactggctaacaatgtattggggatttgccaaatttaatctttgaatttagtaaggttttaattttaaaaataaccaaactaataaaattcaacgaaaaataaaagtttcagattcaaaaataaataaactgacaataaatattctcgtgcctgttttaataaatttttaaaaatcacttctttgcggcgacaacgaaatttgaaaaaatggatttgaacagattccgcaaaaacaatgagaatgaaatggaaataagcaaaaaagacgaaaagagcacaggcaacagaagggaccatcatcggcaaaaacgcaaaatttgagccaaaaatcagctgaaaagacacaaaaaatgacttttaattgaaaaaacgattacccgatgacaaaaatcggcataaaattgagccgaaaccatttgaaaaagtgcaaatttagcgacggtaaactgcgcaaattcggccaatcgaatgcaccacacaaaattggccaaaaattggcaaaaagcaaaatgccaaagtgtgaacgcccatttcaaaaagcattcaaacggcgtaaagaagagagggaactgcgcgaaaattgaggccacgtaaagcaaagcgaatggctgcataaatgttgggtcctatgagaaataaaattttaaaaacattatgaaaatagcaataaatcgtttagtgaggctgtttaattatatatttttttaaattcttaataatttttctcattaactaagaaaatttcatcaaatactataatatgaatttatggctaaaaaactcgaaactttatatgccaaaatggaatgatgccaataattgttaatttgttgcataatattaggtcatttcataaaaatattgtccaacctaaacatcattttcanagaaaaatgtgagaattcaaaattatgccaataataatcgaattaggcggacaatatttatgaaataacccctcataaatcataaagaacacttagatctatcgaataataacacggattaaaaatt

SEQ ID NO: 28768 - DNA, 1010 bp, Heterodera glycines
cgatttgttaacagattttgtccaaaaatgaccaaattttgccacaaatcacatattttcttgataaaataatgacattctgccacaaaatttaaaaattgcgagtatgtttaagaaatcaggacaaaattgggccactccctccaaatcaggacaaatctgacaaatcaggacattttaattttatcagatttggacccttcaaatcaggacaaatctgataaataaggacagatcacacccctgctgtacatgggcgtggggatactgtatggggcgcagcacctcgggttcccccctcccagccatttgcccccgttttagaattatttattttattttttgaaaattcccccccccccggttcagttccccccgcatcgtttaccccctggtaaataaaaatttttttttttagtaacttatgaaaattttcaagaaaaaaagcttagttttttataaaaattttttaaaaatcttagtaattcaaaaaaattttggaaattttttttttcttaaaattttcatataaaaaacacaggttttttttcttgaaaaatttctcaagttagtaaattttaaaagaaatttctcgggggggggaacgtagtgcaccctactgcatgacaacttgggcaaatttttcataatttttccaaaaaaactaagaaaatttcaataaaaaaaagaaaattttcaaacgctttttaccaattacatcttatggtgattggactaacgcccattttgatggtttttcaaatatcaccatgaaggggagtgatctgatcaaattggtataaaatactcttttggccagggaccaaaaacttggtttaacagaaaattttccagaatttttttctttgcatatattgagtgttttcattgatttaataaatctttttgttccgtgtaagtgtccactaattataggtcgaaagctctaaaaaaagcaaagatgaagcaaaaacgactaaaattaatgaaatgaagaagcagtttgatga

SEQ ID NO: 28769 - DNA, 1026 bp, Heterodera glycines
  unsure (1)..(1026): unsure at all n locations
ttcggagataatttcggtacgtttntctgtcctaataatgtttattaaaatgattttattgcttttttaaacaatgctttacccctttaaagcgcgctttcataacattttctccaatgtagaaactcgctaccatctttttggcttcatcttaacaaaattcaacttgtttatatttaacctgtatgttcatgttatacagtaccgagcagtatcaccgtaatgtttgataagttagcatcggtcagtgccgtaaaggaaaagttgaaaagcgaaatgcggccggttagggcaaatgtttgatccgttgacaagggtgggcatgcttctgacccaaatgttggcactttgggatcaattggcttattcgagtccatcggttggataaactaaaattgtcaataattaaatggccgtatttatccatagataagtatggggatttaattgactccttctcaagtaatacgtaaagcagttaaaaaaagaaagaaaattttcttttctaaaacaaaaaattgaaaatccattttaaaaattacaaattaaatgaaaagtggcccctgataatttttctattaggcaatttaactccctccttctcacttacccatgcatccatggcgcagttacagcttcggttgacgtgcagatgaaccgtttgttggcccgtcattggcaccatgtccaagccgagcagccaaaggccggaaaattcgcccaaaaatgcactgtttttcaaatttgccaaataatcggtttgggactcggaatttttggccaaaaatgaagcatctgaaaattatttataattaaattaaattaattgaaacgaattaaaacaaaccactaatttgtggtgaaataaatgtgaaggaatccttcagatttccatcaaaacgtagcaaaaaatgacttcgattcactactcccaaatcgatgctttanatatttaatcattatcattnntgaaattgatttattataaagctattctttatttctataattgatatgtcatttttc

SEQ ID NO: 28770 - DNA, 1199 bp, Heterodera glycines
  unsure (1)..(1199): unsure at all n locations
ttttttagaataaaaataaataaaaatattaantttggtatataaattaaaataaaactaaaaatatatatgtttaaaacaaggttataataataattgatttaaaatatgttttcatttaccaaaaaatcttcacaaaattacagaaaaaattcaccaatcaataaaaatcaaaatatatttcacgtgtgaaaaaactatttctttacaatgtattaaataattgaaacgtttggctagtatatgaacaaaaatggaaaacaattaattttcaaaaagataattaaaaggatatacgcagcgaggggataaaattattgccgaggaaaggaacggagaccctaacctaaaaaacatataagcaatcaaatatttatgacaaagatttttccagttaaaaataaatgtccatcaataattgaacagaataattatattaaaacaaaactacaaaaaaatgctatataactagcaagattaaatattgtccgaggcctagggacagtgcgcgaaattttcccggattttttttaagttactgtattttttgaaaaaaattttaaatgcggggaaagttttccaaattttccagtgggacagtaaaaaaaaaccccaaaggtttagggctatttttattttttaattctcgataagcagggaaatggcgtcccattgcgtgatgcgcagggagaggacggcgtccctcccttctaagcgttctgctgctgctgtgccgttcgcactgtgagcaaggcagacgtttgtctctgacccttttccttaactctctctctttcttttcctctattattctcacgcaccaaaaaaaatgctgtggtcagcgaccaatatttgaccgcatcatttttaaattgcctttacgcatcattttcaaattgttctttttcttcccagtaaaagaaaagggatttatcaaacggcaaaaataataattttattatttaaaataaattcgtatagtaccccacgcaccacctttaaatttaaatttaaattgaattatatccccccgtttttgttcttatttttaacgcgattttcacccccccccctttctctctctgcacttttctctgtctctcttttccacgttcttttctttttaattttaattggtcatttagaggaatncaaaaaatatncacgaaaantgnccaaaatatncncatntatatgca

SEQ ID NO: 28771 - DNA, 612 bp, Heterodera glycines
cagtgattgaaatgttggtgggttgagtcccactgtttgaaatgttggtggattgagtcccagtgattgaaatgctggtggattgagtcccagtgattgaatgctggtggattgagtcccgttgattgaaatgctggtgggttgagtcccagtgattggaatgttggtgggttgagtcccagtgattgaaatgttggtgggttgagtcccagtgattgaaatgttggtggattgagtcccagtaattgaaatgcagaagaattgagtcccagtgattgaatgctggtggattgagtcccgttgattgaaatgctggtgggttgagtcccagtgattggaatgttggtgggttgagtcccagtgattgaaatgtcggagaattgagtcccagtaattgaaatgcagaagaattgagtcccagtgattgaatgctggtggattgagtcccgttgattgaaatgctggtgggttgagtcccagtgattgaaatgttggtgggttgagtcccagtgattgaaatgttggtggattgagtcccagtgattgaaatgctggtggattgagtcccgttgattggaatgttggtgggttgagccccagtgattgaaatgc

SEQ ID NO: 28772 - DNA, 813 bp, Heterodera glycines
  unsure (1)..(813): unsure at all n locations
cagggatgacacggaattccgatttccgtcatttttggggtcggaattccgatttccgacgtttttgggcctcggaatgccatccctgatagtgatgttcttgagtgggagaggaagcggttctctgctgcactttatgagtagtctaaatgcattttttgagtccaatcaattaaccatacctggttttttatacaataatttttgttcatgttcgaataaaccctttttttgttaacaattcgaaaagcataaagcctaaagaagctaaaataccgtatataaaatttcagcgtatgataattgccaaaaaagatatgattaaattaattgtttgtaacttttttttaaacatagatattctcttatttttcatatttctcatatgatttccttattcatactttgtgctttcgaatgacaccaaaaaacataggattttgttcaaacatgaacaaaacttattgcataaacccagctaatgaatggtacggtaaaaaattctctgtcaaattcttccattaaatttcgttttttactcctcctaatcttaaagtgtcatttgctcgtttgaccattttcatgccaattgcagaaatatgttccattggtccagctgtaagtgatggcgacgatgagcttactgccgactcgcatccggcactcctgcagcaggcaaaagcagctcttatcacggatgcataaaaccaccaaaaataggggatgggnggggggggggggaataaacgagcgaggaaatttctgtaatttttggctaacttttttttctccaccaacgcatatacccactgc

SEQ ID NO: 28773 - DNA, 1145 bp, Heterodera glycines
  unsure (1)..(1145): unsure at all n locations
cgtccgtatagccacngtatgggttgaaaaaccacgacaaaataacaccactgaacagaattggcttagtgaacatggcaactgcaaagccataacaaattggcacagcaaataaacatcgcaatttattgccttgaaaatatttgaaaaatttttttcatataacccgaaagattaagcggaatttgaacaaattaaatgatttattaaataaataattgtatttaaatataattattatcaatgaaatgctgtatatgataaaactttaccactgaaaatggcatgtgtcggaactctgggattccgactgccgatcaattgatcagcagaattgaagaaaggaagtggcgacccttccccctccctttcacatgcgtcacaccccgttccactcctctgcccccatttccctccaaattgttaattgtttttctgcgttccttccatgctccgcgcacaattaatgaccaatttgtcaaaaccgcaacttttctgccgccgtccccaattcggcgaatgagactccaaagaacgatgaacccccaaatttcccgttttccgcccattttgttcatctgttcattttgtcccccgtttttcatttcgtgcccaattttcggcccattttcgttctgctcacatttgccactttttatttaaatttattgttatttaagcggccaaaaatgtcccccaatttcacaaccaaatttcatttggcaattttgccgtttctctccccgcccctccatttgcctttaactgtgatggcccccaattttgatcattctttgaaccccccgattgttgatctttgatctatggcccggtgccctccatttctgtttctcccggtcccattcattgatttctgtgatttcccatttgccccagtaccgaatgcttcctttctgaaaattttcctgtcccatcccggtccccaattcatttgtgattaatccttaatcccccggtgatggcattttatctgtgatcaattttgtgatattttgttcaccatttttaaattttcgtttaattacccaagtttgaggtcatttcccggaataaattttttattaattctgtgtctcgtccctgcctgcccctgaaccccgcaccgtggaattcatttggcccga

SEQ ID NO: 28774 - DNA, 1109 bp, Heterodera glycines
gaccctatactactactaatatatttaatttcctcttctcaatcacaaattaaataacaaaaaataaataaaatcttagaaatattcacctgccaaaaacctacgaatttaactcaacggggaaacacagcatgaaatagaaaaataacaatttaaaacataaaaggaataaaattaaaaatcaaaattaattaaattgcgcaaacattaattcattcatatacattataaacacttagtcaaattaactttaaaaaaatgaaatcattatggaataaacaaactactaaaaattaatataaattatattacatatctaaatgaattaacttaaaaagagttgaaatattatctactaaagcactaaaatttaactttgccaattccaagtgaaattttatttagatgttccttcctcagcttgctcgtggacctttcctaaaataatttagatattttattttataaattgtttcgccttttttatcataaaactcattccgtttattggtttccaatctgcggaggggtgtggtccatatcacttgcatcataaatgatggttttttcgctgccagtgtgattcagcctcatcctttcgtcagtttaatagattggcagttcgcatatttatgattatatagctagctaccaaataaagcaaaattcatatcattattttttccagaatcaaactttagagtggcagttcgcagcttccaatattaattttttcccagaatcagcctgaccggttattatgaagtgtgggataatacttctgtaagtatgtaacatcatacgatgaaagggtttatgtttagagttttatatttataaattttgaaactccacaaactccaccacttcattccctctctttcagcacgttcatacttttatgcatagaggagggagcattatggcgaggtttgcctaaaatcaagctcccgagacagcgaccttttggtcagagtcggccgcgaccccacccattgaaattgcgtcctcggcctcggcctccgccaccgcctccgcctccgccaccgcctccgcctgcgcctccgcctccgcctccgcctccgcctccacctccgcctccgcctccg

SEQ ID NO: 28775 - DNA, 1224 bp, Heterodera glycines
tcaattcctcaattgtcgcccctggcccagccgaaactcccatttttcctccaacgactgcattagcacagtgtccgtccacaaatggcccgcacttttcgacgcaaatgggggaagttcactgccatcagactaaatgacaatcatttaaacagttagtttcagtccttttaccatttccgcttcgtctgtcttttgtccattgccattccccgtggacgtcgacgcgcctccattgcttaacggtcctttgcgtttgggcacgacttttaatcgcgcatttaaaactctgtcgaatgtctgttcctcgtcgtcactgacatcgctgccattccgtccattgccgacagtttgcttttctcggaaatcactcatttttgaagtcaggacatttttaaacgttgcaagttaaaaagaaaaaaggtttaaaatatcaaatggcaagccatcaacaatgtaaaagtatttaaattaaaaaaacgttataattttatttaaaaataaatgaaatgcacggtaaacatatttgaacaggatgcttgctcttttgagctaaataaagttgcaattacttacccaacaattctgtttttcggttgtcatttttaaatcattgtccgttttcggttgctttgccaattcgttcatcctttgttgtacgtattcccacacccccttctgttcacgtccttccactcatctctctgtatttgcgcctgtcttttcctctcttcctcctcttctccctcttccgtctcgtcgtattcttgcgttttgcgttggtcaattttaaacgacgatggcattggccctttgccaaaagtgccgcttttttgcatctcattgtaccattcgtcgactgtcactgtgggcacactcggataaccaaggccgaaaacgcgtttttgcgcctcggaacgcgcgataatcagaggttttaaacgggtagctgaaaaacaacccgaaagattgaaaaatggtaattgcactaacgttcagcaaatcgaacatcttttgaagtgctggccgaatcggaatgtgacgacggatgcgaattccgggtttcgaattgttcgaccattttcaattcttctgaaaaaaagatttacccaatttaacgatgggaaagaaagagaaaagcctttgaccttcaatcatttccagttccttcacagatcgaacgtgaggaaacgcaaaagtgcgaaaatcagttcacgctaatca

SEQ ID NO: 28776 - DNA, 2409 bp, Heterodera glycines
  unsure (1)..(2409): unsure at all n locations
ttgaaaaaacgtctatctctttttctgctcaacactcctttgaattccaaccacattttcggaatagtagcgacgaccctaatttttctggattttctttctgggcgagtttggctctgaaaattttgaaaaaacgtctatctctttttctgctcaacactcacatgaattccaaccacattttcggaataatagcgacgaccctaatttttctggattttctttctgggcgagtttggctctgaaaattttgaaaaaacgtctatctctttttctgctcaacactcacatgaattccaaccacattttcggaataatagcgacgaccctaatttttctggattttctttctgggcgagtttggctctgaaaattttgaaaaaacgtctatctctttttctgctcaacactcaaatgaactccaaccacattttcggaataatagcgacgaccctaatttttctggattttctttctgggcgagtttggctccgaaaattttgaaaaaacgtctatctcttttctgctcaacactcaaatgaactccaaccacattttcggaataatagcgacgaccctaatttttctggattttctttctgggcgagtttggctctgaaaattttgaaaaaacgtctatctctttttctgctcaacactcacatgaattccaaccacattttcggaataatagcgacgaccctaatttttctggattttctttctgggcgagtttggctctgaaaattttgaaaaaacgtctatctctttttctgctcaacactcaaatgaattccaaccacattttcggaataaaagcgacgaccctaatttttctggattttcttctgggcgagtttggctctgaaaattttgaaaaacgtctatctctttttctgctcaacactcaaatgaactccaaccctcattttggaaaaaaagagcacgaccctaattttttttggttttttttttttggggggagggtttgttttcaaaaaatttttaaaaaaaaaaaatatttttttttttttggccccccccacaaaaaaatccccccccttttttttgaaaaaaaaagagccccccccttttttttttttttttttttttttgggggggggggtggtctaaaaaaaatataaaaaaaaaaatttttttttctttttcttttctcccccacaaaaaaaaaaaccccccccccttttttttaagaaggaggggcgccccccccccccttttttttttgtttttttttctttttttgggggggagggtgggggtcgtaataataaaaaaaaaaaaaaaaaaaatttttttttttttttttgtttccccccaaaagaaagacacccccaccccccctttttagaaaagaaaaacacccaccccccctttttttttttttttttttttgtttgggggggggggggggggggaaaaaaaaaaaaaaaaaaaaaaaaaattttttttttttttttttatatttatttttttttttttaaaaaaaaaaaaaaatattttttttttttttgggtgggggggggggggggggggggcacccccaccacttttttttatttttttttttttaaaaaaaaaaaaaaaagggggggggggggggcccacaaccccccccccctctttttttaataataaaaaaaaaaaaactttttttttttttctccccccccactattattttttttttttttttttttgaagaaaaaagaaaaaaaatatttatattattatttttttttgttggcggggcgggggaagagagattttttttaaaaaaaaaaaaaatttttttataaaaaaaaaaaacaaaaaaccatttttttataagagagggggagggggccccccccctttttttcgcggagaaaaccccaaataatattttttttttttttttattccccccccttaaaaaccaaaaaaaaaaatttttttttaaaaaacaaaaatttttacgggggcaaagaaaattttgcggcttttacccaaaaacaatttttttgtggaaaaatttaaaaaaaatttttttaaaaaatttgggagactcctccccccccaattttcaaattgctttcattcaacccattccttttcccttgaaccattttatcaatttgcagtgaaaatttgtttgccaaaggcacacaaattttcgggtgaataaaaattaaaattttcaaaaaataaattattaaatttaagacacttccaccgttgccatggcagggcgaaagggtccaagagttggtccaaaaagatggctttttttcgactgaaaaaccaatgtatcgcattttggaccaagtttgtctgccggattgttcaaatcaattcctggcatagaagcaatatgtccagatgnataaggtttattattaataaacg

SEQ ID NO: 28777 - DNA, 1443 bp, Heterodera glycines
gttttttatgttaataaattttattttttagttaagtaaatttaagtaagattttttgctgttttttgaatggattaaattaaaatatatgtttttttctatatctttaatttttgcagcaaattaatgtaaaattttttagctgttttgaattgattgaaaaaatttttatttttttctcgcatatgttccatttttgatttttgcaatttaaaaaaaatgatttttttctagaaaatttgtcatttttgacctaaatgctggcaaaaagatattaaacacatttttctccgtcgttaaaaattagaaaagtaaaagttgtatttactgcataatcactagggctgggaatttaaatcaaatgacttttttgttgcttctattatatggccttaaaatgaattaaaaagatatatatactggctcccggacatttggatatgtggcgtcgaagctgtacattttttggacttttttctacatactttgttttttctttattttgataatattttttatttatattataatgaattttctagctgcatctgaaacatttgatgtttccgccaatgcttggcagttcccaaccaatccgtgttgttggtttatcttgatctggtttttattttgcttgattccctagaatttttccatccttaagtcgcttgatcgcatacctttaagtcactgtattctccatttgctttgtcttgccgaggcaataatttaattttatttctttgctttatttatttatttttcttttgtttttgttttgcccattttataaatgtattattattaatcttgtgcaagacgtgttcttcctcgcgatgtgtgtgaagcgaatgcatatgctaaatttttggtattctattgttaattaccaattcttttatttttaaataatttttcgcttttatgttaattttataattattggtcaaacacctgaaatttttatatgcaattaattatataataattattttctgcatccatctgttgtattcaattaagattttataatttttgcatttttgtttttgatatttttgtttcagacttttttatttaggcttctaaaatgaattaatttttaacataacaataaattctttattaatatttgttaataatagtcaaaggtttaaaagattgaatcaaagaaaaaaattatgtgttttttgtttgtatattttacttttttgctgatagttttttatactaaagtgttttggttgattttgatttactttcttttaatttcttgttctagggatcagacttagagggtctcggttgtttcatgtactgcttattattgggataaattatttgagtgtactaatttgttaatttatataacgatggcaacttttatcaagaacgaacgacgaaaggtatgaatacaaccacaaacccataaaagaaaagtgg

SEQ ID NO: 28778 - DNA, 1003 bp, Heterodera glycines
  unsure (1)..(1003): unsure at all n locations
tatgattttgatcgctcactttccggcaattcatggcgtaaatgcgttgaatttcacacttttggcatcacntgcactntgtgtttttattttcaacggcgtgtgggcgtgtganaataantcagatactgtatncattgcaaattaggacacccttttctatacaaaaanctgggtttacggtcatacagcgacgnccatcgccttnatagaaagtgcccataaaatcagttcgttaaaagagagaactgcactttattctcatattagccgtcagatgcccgacttagcttcaaaacagttaaagccacacattctctatcattatgaattttgatcgcctcacttcccggcaattcatggccgtaaaatgcgtttgaatttcacaacttttgccatcacatgcaacttgtgtttttattttcaacggcgtgttggcgttgtgaaataaatcagatactgtatccatttgcaatttggacaacccttttctatacaaaaaactgggtttacggtcatacagcgaccgccatcgcctttatagaaagtggccataaaatcagttcgtttaaagagagaactgcactttattctcatattagccgtcagatccccgacttagcttcaaaacaggtaaagccacacattctctatcattatgaattttgatcgcctcacttcccggcaattcatggccgtaaaatgcgtttgaatttcacaacttttgccatcacatgcaacttgtgtttttattttcaacggcgtgttggcgttgtgaaataaatcagatactgtatccttttgcaatttggacaacccttttctatacaaaaaactgggtttacggtcatacagcgaccgccatcgcctttatagaaagtggccataaaatcagttcgtttaaagagagaactgcactttattctcatattagccgtcagatccccgacttagcttcaaaacaggtaaagccacacattctctatcattatgaaattttgat

SEQ ID NO: 28779 - DNA, 401 bp, Heterodera glycines
ttaaaaacgggcgcaaagcgcccgtcttgaggccgcgaagcggccgaatgtccccaaaaaaattaaaaaacgggcgcgaagcgcccgttatgaggccgcgaagcggccgaatgttcttaaaaaacgggcgcaaagcgcccgtcatgaggccgcgaagcggccgaatgtccccaaaaaaattaaaaaacgggcgcgaagcgcccgtcctgaggcttaacagccggccgcgaagcggccgaatgatcccataaaattatgaaatgggcgcgaagcgctcgtcctgaggccgcgaagcggccgaatgttcttaaaaaacgggcgcgaagcgatcgtcatgaggccgcgaagcggccgaatgtccccaaaaatattaaaatacggatgcggagcgcccggcctga

SEQ ID NO: 28780 - DNA, 1359 bp, Heterodera glycines
ttcgatagagcttaaaaagctctacaattttgctctacggtcatttttggctaaaaccaacccctgacgagttatgggcccgggactcaaatgtcccgctcaggccaaaaattttttctatttctggaaaaaaatcgaaaattttccaaaaaaattaccaatcgatagagctcgaaaaactatgttttggaagtggtcttcgtttttctgggaaaattcgttaaaaaatcataaaattaaaaaacccgaaaaccgttttttaggcctaactcgaaaaattttgaaaattttcgaattttttaaatttggaaaaatcgggctttcaaaactctacaataagtctgctggtaactccccgcccagatcaaaccctaatgagttattcgcctggtactgaagtgggaaaaaaaaattaactgagtctccgtgtctgtacaggtcagggatttggtctgatcaaaaaataaaaaatactggattatagaggacacttctgcggagtgccctcacagcgggaattttttgatccgagtttcagaaaaaaagttatgggccgtcaaacgcacgaaaaaatgagaaatccgtccctgggactcagtcgtccgcgctgaatttttttctatagttttcccagatgcgcctcaaaaagttgtaagacccttccactcctttcagggcgctcccggccttcggccgggagattttgttttttgaaacgaaactccttgtcaatataacatatatagtaaaattcaattcccttcgaaattgaagccagaatgcttatttgaagctacgcaaatataaattaatatttgctataagaactgactatttagtcaacagaaaataaataaatcataaaattagaacaaaaaatgattttattttagaatgcacactgaagatgcataataagctaatatattcgaatttattttgaaataactgttcaacagattattagttgtttctaagaaataatgataggaagcttatctgaaatgtgtgctcacccagattggaatttgtcatttcctgcaataaatgttttcatataaaggtttaaaaaattcgatcgggtttagaaacgttcaacaaatgcatagataaattttttgaatattatacaatcgtgctttttgctctctatcaatttattataaaaaaattcaattcccttcgaaattgaagccagaatgcttatttgaagctacgcaaatataaattaatatttgctataagaactgactatttagtcaacagaaaataaataaatcataaaattagaacaaaaaatgattttattttagaatgcacgctgaagatgcataataagctaatatattcgaatttatt

SEQ ID NO: 28781 - DNA, 1301 bp, Heterodera glycines
ttttgatcggcaatcaaatcactgacacagcaattgattctggcacattcttcacacatctcgagtccaatcgccactcgcccatcttccagccgacgtgccttgtctatagtgtagaaaagttgaacagaaatttgaaattgttatactattattaatattcaattaaaaaatattgctttaaataattatgtatgaaatttgctctgtgatgccataggaacggagtgtgggagaaagtgggataaaggacctgacaaaagaaggggcggcaaatgacagtggaatttccaaatgaaacttggtgagtagattaagcatccatgggttctattgaaaaatttaaccattgaaatgggcatgcgtgccaaggaatgactagctaaagttttttaaggaacaaacaaattaaacaataagttatgttagtggtgtagaggtaatgcgttagtcatcgttctttaagccacaggttcgaacccactatatgcaaattcatttttcaattttttatttttgcttttttatgcaaagtcaataatcaaaaaattgtttataaaacaaaattttattttcattcttatacataagatacttaataaaatattattcaaaaatattttgaaaaaatcgacaggaattattgcatcattatgcttaatataatgtatttgtgattaataaaattaaaaataaataatttgtttttttaaatatatttcttagataagactttgtataacttaaaaaagatttgacgaacgcactacctctacaccaatggcttcttataaaaacagaaatattatattttctctaattataaaatgctaaaaaacttggcacttcatatctcggcatagaagcaaatttggcaacaatgattaaaatttaataatagaacttgtgatgatctatctaaaaccaagtttcatttgaaaattccacagtcacttgccgaccagggatgtgcctaggtttcgcttttcgcctttcgcattattctcatttttggcgtttctcatttcgctttttggcgcgaaaagtgacttttacacccctaagaattggattaaattcccataaaatttttcaaaattttacctataaattggctaattctcagtgaaaacctgtttataaatgatcaaaatttccaattttttccccggcggctcctatcggcaccgccgcgcccccaaaactcctattttttcttagaaaatggcccaaaatcgcaaaatttggtaatttgatgaaaaactgttctcagcggcgccccaaaactcttatttctcatt

SEQ ID NO: 28782 - DNA, 1947 bp, Heterodera glycines
ttccaaacgattaagggaaaggaagcggaaagtgagaaatggaaaagaaagggcggatttaacaaatcttggcccaatcaaagcattgcttttccaaatatttcaatttcttcccaattccccccccccctttcggtccctcccttttctttccctttccttgcctttttcagccgcccctttcctcatttgccctcgtcgatcacttcgccccccgggggagggattaaaatttaatgggtgaatggaaagacaaaggaagagaaatgaaaatttaataaaataataaataatcaattgggaaagggcccggagatggaatattcaattggacaacggaagttaggaatatccgccggagacttttagggcggctgaactgtgtgtaattcgaggtgagaaaggcaaaagaggggagaaaaggaggggaaaggggagggagtcgagactctcgacgcagggagtgccaatgaattattaggggaaaagcggtcgacggaaaacagcagtggaatattgtatgcggtggctcagccaatgtgtgcccggggaaggccccgcccatggagccaacccggcgaatacggcacatccgtcggttgtcgtcggaaaccggcaaaaccgacgaaggaaggcagaataatgaatgagcccagccgatgggatggcgcagatgatggaggtgggagggaaagagtggagggaaggacgggggaggcaaatgtaaaattcataaggggggggggacggcacaggggccggccgaatcaccaaacaaaacccaagggacgggagaggtaaagccaacggcgagaaaggcattggttctccggaagaaggccaagggcgactaaaagctttgatttttcgtaatcatttattttcttcccatcttttcccttctcttttcgccgtttccttttcatccccattttccgtcttaatgtcctttttctgcccattttcgtcaatttgcacgcaattggaagtcggaaaggatggcactcatttcttgtcaaatgccgcaagggttgattcaacatacagagatttcttgagggggcggcgggggcggagggtctttcgcccgatcatttttcccgtttttcttcccctgatcacttttttacaattttttttgtccttgatcattttttccatttccattttattttcccttccttctcccaatttccgttgtcatggacatttttgggatttttctttcatgaaaagcttccactgagtgacaaaggaaattggactcaattgggcgcgggtcattcggtggccttttgtttcgggcgactattgtttgtcccttcgggggatttaccgccacgcaaaggcaaacggacggactaatttaatgcaaatattggcaatctgttgaaagagtggacagcagaagaagaacagatcgaagacagacaatggaagaaagggatttactcaaacattcaaatccaaaataatatttaaatggactcgaaatgagtttggcataataatcccttgtcgccacaatgtttcccaattccctctcccccccccccttttctctccatccaattttgcttatcgccgaccattgccataattctcatcactttcgacggcattggctgaatgaactcattgtggcggaagattcgtcgtcctgcaactcatccgattgtggcacgacgcgaaaacaattcattcatcggagagagtggcacagaatgggcgcaaagggaaaaagggacggacggaaaaagggacggacggcacgggaaaagggccgggggcgaagttggcaaaaaaaagggggcgggggggagggaatatgaggaaaatgagagaaaatggaaattccaatggaaatccattgattaaaatggcataaattgactttataaacaattcaagtaagctttaattccacttaagagatggttgcgtttc

SEQ ID NO: 28783 - DNA, 2054 bp, Heterodera glycines
ccttgcgcgttggttaattgagttacagaattacaatattaaaataattcatgtagcggggaagcagaaccaagaatggttcatgagcattttcttttaaccatcactgctcgtgatatagaaggaaaaacattcgccattgatgttcggaaagaacaaaatgacgattctgagattaggaaattaattgaatttgtaaattttggttcattccctgaggggaccacagaagttgaaaaggaagatattgcatcaagagcggaaaatttgagtctttcctcaggcatattataccaacacttaccagatcaaaatgctcgaatgtacattccgctttctcttcgtccactaatttttgaagcttttcatacttcacaaataaatggtggtcatatgaacatcaaaaagacattagggaaatgtagaaaattttattggccaatgatgcaccgcgacatcacaaattggacaagacaatgcatcacatgtcaactaagacattcacccaatccttcatatcgtgcagaaatgcaaatgccaccaaaaaatactctcttcgctcaaattgcacttgatttggcaggtcctcttcccctcacgcagaaaggtaacaaacacatccttaacataatttgcacatttaccaaatatgtaatctctgtacctatccctgatgctaaatcccaaacaatagcactagctagcattctttaaacactgttatttaaagtttggaggctgtacgagtcttctaactgataatgccacggcattcacctctgatttctttaagtccttctgttcgcttctctatattaataaatgttatgctattccccattggagccaaggcaatgcagtagttgagcgatcttttaggacatttcacaatatacttgcgaaatatatttcaagtgaagaaccagattttgatgaatttcttgaatgtgccaatttctgctacaacacatcaattcactcttccacaaaggagacccccttctttttggtctttgggcgagacccgatattttgcattgagcaaattctgaatcccaacaccgaacccgaaaacaccagtgaagttgacaatgtcaagcagaaattagttaagtctcttagaaaagcttgggaatccgctgcggcggtcattaaagaagctcagttacggtcaaaagtacaatatgacaagttagtacgaaatcaaactgttcaaataggagatagggtcctattacgcaattacgcaggaaaagtcaaaacatccaagaaatttcaattaccctggaagggactttatcgagtcattgagattaatgatgtccttatcacaatcgtcagctgcacatctcctcaaaggcgcaaaagcgcccccccagagccgcgaagaggccgagtgagtaccttcggtgcaggaaaattattaaattttaaaaattttttaattgctttttaaatatgccaaaaaatgtaggcttaacttttttagtgaaaattcgatcactcatattttttgctaattgagcagaagcgtaccaaactttgcagggatactccccggtaaaggactaacttacactgaaatgagcgccgagctagctggctcaaaaaaattttcgaaaatctgagtctttcgtttttatttattttttgcaaaattaattcttaaatattttttcagaaagggttctgaaacgcaccaaattttatttacatgttagtttaggcactctgatgctttttctatcaaaaagggagatgaataaaatttttaaaaatttttaattcctttttaaacaggccaaaaagtttaggcttaacttttttttcagaaactgatcagaagcgcaccaaactttgcagggatactgaaaggaagagaaataacctattttaaatattatctagtcagttcatttaaataatttttatccaaaaaatttttttttgggttttcggggcagtccccctgaaccgatgcgcccagatttatggggagaccgaatccttccggaatagcttcactatagcctgtactttaattctgcgttgga

SEQ ID NO: 28784 - DNA, 1684 bp, Heterodera glycines
ccctgaaaagctcatctgttgagaccgctgaatgtacctagagtggtgattcccacaggcaagccggccattccatttaatttcgcctaagtataatgcgaatttaatcttttaattatctttaaagttttttgaatgccattaattttattgaatgtactaattatacgtttgtcatattagttcatcgtattgaaattaatgaaatattcaaattatcgaattattaaataaattacgtttttagccttatcaaaagaatcaatgaaataaagatacggagccctgtttcgtaatcagcatccttaaaaaccaccagcacacagccctgaagtgatggcttgtttggcccataataataacaatttcttaatattttcgaatttttctcactgctttataattattttggtgtgtttaaatattaaatcaatcagcataattatatttaaataattaaaatacaaaataacaaaatataaaatgctagtattacaaagaaatccttttttttaaataacaacaaattttgaaaataaagataattattgtaaaaggctaaatttaatatgaaaaaatatatatttaaagtctttcaacaatattttgatttttccgaactggtaagatgacaggtaataaattgaaaaataacccagtttagcaatatacacaaaaaaattaattattattaaaacattgtaataaaaaattagaaaaataaattttgaattaaaaaaaaaaaaatttttataaatacattatatatttaaaatatttgtacagggtgacaaatatgtaatgtcccacttatttatttgaataacttttttcaaatgcaaccaaaaatgacaaaaatatattcaaaatgtgcacaacaaattagggaatatagctacataatagttttatcgtatctttagagagtcctgagatagagacaaaaacgtgccaaaatttttttacagttggcacgcaactcctttggtcattttccggagaaaggtttaacgaaaagaaactatttttgcatgagaattaatgaaggccctggccacttttcgcgccgcaggcgccgctttttcgccttttttaaattgctggtgtaatagcttatgtgcgtgctccttattagcgttcattttttttgctataaaaaatttgcaaattgagatatgaacaaaatcaatatactattttgtagacaacaattagcttaacaaaacggtatataaaacattttattatgttaacaacaaaattttttataagccattataaaaaagcgcccttttttatgcaacgacctagtatatatatatagaaacaaacaaaaaatttcgataaaaatcaaagcaaaaatgtttatcaaataattttgtaataaaatacaaagatgatgcttttaacaactgttgtgtccccacgagtttcaggcaaatgcacttttctcagttctgacaacttttcctaatttgacccaattcaatctctttttttcgaccttttttctttttttttttgaggttttattaaagcaaagcaaaatcgtttaagagtaagaataagcaaaattggttatagcaaaattggttaagagtaaggaaagggagagtaagtaggaagggagaatggcagtattaaaaggtgttttccaaagcagaaagagagcttaaatacggca

SEQ ID NO: 28785 - DNA, 1568 bp, Heterodera glycines
cccgtaaccctaatttaatatacaattttgaatgaagtaaacaataagaggctactgaaaaattgaaaaactctcgcctctcgtcctctcgctaactctcgtgttttttgggtctctcgccttcgtcttttctgagacaagtcacacccctgccacagacttaattataaccaaattatttgttcacattaattttaggcttttcttttttcttactttatttcttaaacaacaaatcaatcaatggaattctccacaaaaatttaaaatcagggtactaattttaattgccgaatatcaatcatcaagaaaagattcgctggcgttgaaattataagcaaatctcggcccaaagttcgcctcgattatgtctcctggaagatacaggaagacaacagggagcagatcagtgtcagttacgaacaaatttgaagtatctataaaaatgaaaaatcaaaaaaaaacaatactgtttaaaataaaaaatagaaaatttaaaaatcttgcagcgctactaagtctctgatttaaaacactttagaagtcatgtaataaatatattttatgagtttaaaatagagaccggtaaaatcaaattagcggatcttaaaaatgaaaaaataaataaatttaatgaataaaaagtgcctaaaaaataattattatgtaatggtgtgtttctatcttttaaattaactcaaaaaattaaacttggaaatcaaataaataagatttaatgtgacaattgtgttttaaatagcttgatttcttttaaaacgaaattaatgaatagagtcatcatttttctttccaatttttcacgatattctctgaattttttcactaagtttattttatttttactcactcaatttctgcccatttttggtgtaaatgatttccatcgatgttaaattggccccacatccgattgtgtcgccctcttcaaacgagggatatccccagaagccattcacattgtgcccaaaaatgaagccattgtccccatacatgtaaaggctttttccaaaaagtccaattccgatcgatcttaaaagtttttataaatcatgaaaattttaaatttattttaaaacgattaaaattaaataaaattgttatttgattccttcgattacttacgagcttccttcaatatttagttgctttcttataattttcgtctcataaaacacaacttcaaaatatgggagaagcacagattccgcaattaattcccggcgccgcccttaaaatatgccgcttaaaaatgccaaatcaaaaggcataaaaggtcgaatgaatttgttaaaaagtgtttaatgaaatttaaaaaaagtttaaggcaaaatgacttaattaattgaaaaggcaacaaattatgcaaaaattttcaaaaaactttctcaatgttaaagtatcaaagaatcttctatttttagttttattatacaaagaatttgtgcaattttagcctaagcaatgaaagagttacattattagcattagtatatttttatactctgaaacgtagtaataaaaaataaataaataattaatttctttta

SEQ ID NO: 28786 - DNA, 1051 bp, Heterodera glycines
catatttttagaagattttcattaaaaaattattaattttgtgattttttggaaaaaaatgggttcttttctggtttttataaaaaaattagcaaaatttttggaaattttgggtgagattttcgtattgatgctctacatattaaaaacccaaattattaaatatttgtaaaacattttgccaatttattaaaattttaaaagattctgaggcccaaaagcctcaaaaatcctcaaaatttctcaaaaagccacaaaaatcctcattttccaaaaaaatcctcattgacctatcaaaaagccacaaattgtttcagttgtgacacaaaatccacggggtccatcagacctctgccgccgcttcgccgtttattgccccaggggttggagccctggcatatgaaaaggccttctattgtattcaaactcgtacattaataaactcctccatttctgttcttctgaagttaaacataagtttaatttttcaaagacttggatttaaattttcaaaaatttaaagataattacagtttccgaagtaaatttgctcgctgctggcaaaaacattagaatttggatggtgaatcaaattttttgcagtgtagaaattggacataaatgataaattggacatcgatttaatttcttttttaattatgtcgctgttcaacatttaccagtggcaattagcaatgtttattttgaattatatgaataaatttgctaaaagtttttatacggcattttaaatatttttttaatcaccatttttctttggtgggttttaaatttcatattatgtccactatttggtatgtctaaacgctcaaatggaccccctaaataattcgattttttgcaaaaattcgataaatcatcataactatttttggaaccgaaaaatttttatgattgatatcattcaatagccctaataattcttaatcaaaatggataattttaaaaaaattggcaacgccggagccttaaaattccctttattttgtaaattgaaaaaccgcgaaagtactaagaactgacaaattta

SEQ ID NO: 28787 - DNA, 1432 bp, Heterodera glycines
aaactttgagaattgctaacgggtagcggctatcttccggacatttccattcgacttcttcgttcaacacatgcacagttgggtgaccaatcgggtagcgtgtagtaaaattaacgaaggggtagagagaagtgaagtcgaagtaagaaatttgttcattcggtcccgctttatggagtagtttcagtggtcccgtccttcctcccataaatgatgtgcgtattgtcagcggaccatcatccatgtagtcttcaaatttctctctcatttctttgtccttcgttaacattttctcgatctcgcactcccaatacacttccagctggccaacttgacttcgtatgaattctaatcgtttggcattcctctcccgcactttaccagctgtctttccatttggcatcatcatattatcgtctggataacactcactgcatgcatgccaaacacatccgttaacttctattgcctttctctctgcttccacccatccatccacagaatattgaccaaactttttctctcctccgggtgaattagccatcctcacttccacattatgttcttccgtgtaccactgtaagaaacggcgggccagtctactttgattttgtgcattgtcatagcctcgttccgggacaattgccaagtgttcagctggaaggtggttgatccggaaatgcttcatacaggcgccggcgatcgtcatacactccctcaatacatcaattccttcgtgtgccctttccgctacaatgccttcttccctccgagacacatcaaagaattccatccgaaacgctaccagcgctgccgttaaaatttcaacgtcgtttgtgcagtagctggccaatgcttcgtcaaggaggaagggtttatgctgatgttgttcataccagacgttgaatttttgtcgtttatccggcatcatcccatcggccaagtagtcttcaggcgtggggtatatctgctttccgtagttatccggttggtttgccatgtgcgggaagaatggtttgtcttcgacgtccaagccgaaggatgtgacgagttcagccaaagagcagggcatcaaattatacgagtctcggaacaccacgtttggattgcgtttcttctgcttgcccactttcatttcatacagcttattgcccttcctcaacatgctcggattgaatcctcgccggaaaagttcacggaaaaccaacaccatatcgaagcggccaccaaagtgcgaataaacataagtgtcgtacttcagcgggagttggaagactacccaatcgacaaattcctccacaggattgtctgcgaccacttgcttgtcgactgttgtttctgtgaagcggcgttgccaaaaggcgaccgttctgtttggcccgcacacctcacaccctcccgatgcctctcgccagctctcattctcgatgca

SEQ ID NO: 28788 - DNA, 831 bp, Heterodera glycines
atttttggatgtttttgagagcaaaaagcatacattcttgaggaaaaaaatctataaaaatagtcaaaaattaattaaaacgcatttattaattattgcctcaccaggcccacggctggtcaccacgtttttgtgcacgcacactttgtgctggtcagagtacgcgtagccggcgtcagtgattgtcttctgcaaaaggaaaatgatttattttactgaaattttaaaaattttagattttaaaaatattaaaaaaatcccctgtttttgatatccggcgatggcgagcaaaaatgattgtctatgtgccaaaagttgcaaattttaaaagtctgtctccacaaaagcacttcgtgtattacacaataaatccatgcaaatgggtccaaaatttgaaaacgctcgttggcgcgcgcctgtctggggtaacactgcagaattgtggtcccgccggaaaataaagttaaaaattttattttgcttttctctggggtgaatatatgtgttgatttacatatccaaagtatatattaaactagatctattatacttgtgttagattctttattaagcttcctattctattatattttttctagattactattgctgaatctctgaactatacaaagtttatttaatcattttgatttaggattgtttatattatataaaaatgctatacaaaatcatttattgtatttttttattccttataaattttaagactttgggttgagttcggtggtattggaaaggaacagctgatcagctgattgcacatgactcgaagtagtttagtttacattgatgttgataggaaataaattc

SEQ ID NO: 28789 - DNA, 1038 bp, Heterodera glycines
ccccccccccccccctttatatatgtaaagtgggggggggggtggggaaaggcgcataaggggcggaaactgcaggaataaagcatataaatagctgaaccgctgaagatgggacggctatgaatgacggagaaatggccaagagaaagagagggggagagggaaataaaagagggaggagagacaatgccagatggtggagagacaaaagtgggagagagagaaagagggggaaagagttgacattttatgggaaagcaatgagaaaagcgaaatagttttcgagaaagagagagagagagcgaagtgcgggtggaagagaaatttaaaaattattggccatcggcggagggatcaatgaaatatttagcggaaaacggggacgacacatggggacactttttttgttaacaacttagccaatgggctgcttcaaatcggatatgagaaatatgattagaagacggagggaaattgaaaatgattgaggcgcttttcggattcaaaggatcaatcaatgggccaaaagataaaaaattataacgggggaaaagcggctaatattaaaaaggcaataagtgtaattatttaaaatctttaaaaaaatctatttaataaaattggtggtttgtaataatttccaaatgtccgaataaatttgcccaccattttgagcaaaagcagcggaaagtcacagatttttctgatcagtgaaactcaaatgaaaagatttggacgaaagagaagtaaaaaaaaaaagaagaaaagaattatatttttaaagcaaataaatcctaaccgccggcgccaattgatcaatctgatcagaaaaagaaaggacaaaaaacaaaacaaaaaactgttgcaaaaagcagcaaagaaaattaatgattagcgggagagggacagaaggccaaaaaacaaatcattaataaataaaatggaaaagtaaaaaaaaaagaaatgggaaaagaccaattttatataaaaatggtcaaaatgacataaaattcaaaaaatgatcacaaaaatgaaaaa

SEQ ID NO: 28790 - DNA, 1063 bp, Heterodera glycines
gttcggggttcggaattgatcgaaatgcttgccggattcgtgatgagcgaccccgaaaaccccccgaaacatgttttcatgatttttgaaattaaaaaagaaaattcgaaaaatgttcgaattcgggttcgggattggaaataggacgaaatggaggtcggattcgtgctcagcgcctcaaaacacccctagaaacattttataagaattttcagaaaaaatttaaaaaaaaaattttcgggaccaatgatcgacatgattgccggcttggtctaggcctatgcttcagcttaggcttaatattttgaattttgtccgtgttcgggattttgaattcccaccctgctttttagacttagctcaacaagagctttaaaatgataccaaatttgtctgaattatccgttttaaatggttaggagaccccttttttacctcaattttaaatttccacataacgaatttttaggaataaaatgatttttaaatataaaaatattttttattccatattatttttcagaaaatagaaattcagtattcacttcatagtttgatccgaatttttaataaatttccacataaagaatttttaggaattgagtcggaaatgacattgatatgtatgtatgaacaaaaaacaaaggatttgaaggggccaatactattgaaaaggaggaagtggaatgcaatgatgagacgaaagagggtgaatattctcggtttttatttgatcatcataatcttcgcccatcagcttcttcccttcgtttagccttgacactgatacacctaaaagtaaagttgagcgggaccgggggcctgacacggacaactgagtaccgaaatcccggtcacggtttacattttcaaattacttattgttttcctaaaaaaaatttgccatttttttgggaaaatttggctaaaaaacagaacaaaatttgaagaatttccccgggggggcccatcgggattctcggccccctcccctattcttaaactttttttaaaaaagcaaaggtacttttcccattttgccccccccttgaaaattaatttt

SEQ ID NO: 28791 - DNA, 973 bp, Heterodera glycines
tccggcggtgccgataggcgtcgccgaaagtttttcggaattttaggaattttaaattaattttattaagaaaattgtacaaattaaaaaattttcaagagtccccaattccccgagttagtgtcggggggtcgggggataaaaagtcggaggtagggggctcggggtcggggagcaaccctattataaacccccaaaataggtgctaaaaatggaaatgagataaatattttaaaaatcaaaaatgtagtcaagcaaataaataaataaattttgaatatgaatttttgataaaattttccatttctcaggggtgtatttttcgtttttcttgcatttttgttaataatttttttcaaaatagcagaaaatattttacaaaaaattcttcaaaatgaaaaagagcacaaaaaagcaataaatttattattattaacaggttatatcgccccaatttgattcggtttttttttccgtttttcataaaagtcggtcggttgtttcggttttttgattatttcagtcggtccgtttcggttaaaaaaccaaaaaaaccgaaccgaaaaaaaccgaaaagtcaaaaatttctcggtcggttttttcggtcaaaaaatattttagcacatattttgccatattttttgatttttttagcacatgttttattagatatttcaggatttttagcacataaaaatcccagctttatccattaaaaaggcccagatatcaggaagctgatgagcgagtactgagaaaagttcagaaatgagtcagcattggagtatttttgtgttgcttacaaattagtgcataaattttacgagttccatttttttgattttcatttcatttttgactagcaatttctattttttattattttcatattccttcttttggcctttttcataagctttttaaatcaagaaattataatttttctctttttttttgtatgatttatcggcga

SEQ ID NO: 28792 - DNA, 1371 bp, Heterodera glycines
tcaaaagtaaaatctgatcacgtattcgtgatcagcgttataaaatacccctaaagacatgtgtttggaatattttcggtgaaaaaatttttccacccaaaaatcctggtcacccccctatggtcccgaaaccaaaaatcacttttatttttataacaattcgcaaaaaagagataaaaatgtaaaataaaatttatattatagagaaaaaaattgcgaatttttgtagtattttacttttacagaatgacttttcagaagggagttctgaatttttttctgaaaaatctaaaatttccagaatttctggaataactttttttctttagaagatagaaatcccaaataaatcccataaaattctcccgattttttgctatttttaaagctttaattcacttaaattgaccggtcctccattgagttatgaattttcaaattttagcccaaaatcctgagggtcaaaaaattgccaaatatttttgaatttttaaaaaattctaaaatttcctaaactgaaaattaacatcagattcgtgctcagcatatcaaaataccccagaaaaatatttttgacccccattttcaacccaaaaaaaattttcgaaaatttctagggggcctagctcgaaaatttttgaaaatttccggcaatatggcacatcattcgatagagcttaaaaaactctacaattttgctctaaggagttttttcgataaaaccaacccctaacgagttatggacccgggactcaaatgtcccgctcaggccaaaaattttttctatttccgggaaaaaatcgaaatttttccgaaaaaaataccagtcgatagagctcgaaaaactatgttttggaagtggtctccgtttctctgggaaaaatcgttaaaaaatcctaaaattcaaaaacccgaaaaccgttttttaggcctaactcgaaaaattttgaaaattttcgaaattttaaaacttggtttgatagcctttcaaatactacacatttttgctcagaaacaatttttcggtcaaagcaacccctggcgagttattcgcctggtactgaagtgtactttttgagcacacttcagttagccaagcgtgcaggccagggggtggctctaataaaaaaataaaaaataccagcatgtagaggacagttgtggggagtgccctcacagcgggcactttttgattcgggttttagaaaaaaagttaggggccctaaactgcaagaaaaagtgaaaaatcggtccccgggactcagtcgtccgcgctgaatttttctctatagttttcccggatgctcctcaaaaagttgtaagacccttcaacgactttcatggcgctcccggccttcggccgggagaaaa

SEQ ID NO: 28793 - DNA, 925 bp, Heterodera glycines
  unsure (1)..(925): unsure at all n locations
tgcttattgatcgcttctaaacatggagagcattcgaataatatcaagtttgaagaatttggttgattttcaaaatttatcacataaaaagttttacttttttagcttattggcttcgtaaaaattcttaataaaaaagcagttaaaaaaatttataatttgatagattctttatcttcacaaaattttgctaactgttatcatttcatttaatggctatcatttataagtttttatttattttgcaaagttcctaaaaacggttttaaattgatgggcaagagtattaagtactgaattaagattcatcctattattttggcattagattaaaaattgacaaagccttaaacctcatttttaaattatatgattttatttagcatttatttagacgaacaaatttgtaatagatttatttaaatttgtatcgaaatttgataattttaattattttattgggctggagttcgatcgatcacacaaacagtttccaatgaaaaaaatcgagtgatcaccgccaccaggataaaaaatgcatttatctttctgcttttatattctttacttaggttatgcattatttttactcgcgttcgataattttttctgaatggtcaacgattttaatttttcaatctccccaattacaattccaatttttgtgttttaattatttcatttatatttatgaaacaaaaataatagaatctttgttataaatcttttattttttcttcttcttcttctctttcatatttaataaagtaaatgaaatttattttattatttatatcataacgtagttgtaaatataatttacttctcatgtttaccaacttcgtaagttatgttatgtctctattntgtgatgcagtttcctggatcatgagtaggggtggtaattatatgcacatgcatattt

SEQ ID NO: 28794 - DNA, 698 bp, Heterodera glycines
gttttcggggcagtccccccgaaccgatgcgcccagatttatggggagaccgaatccttcgggaatagcttccctatagcctgtactttaattctgcgttggatttttgctccccataattgtttgagtaccccaaacggacacttgaaaaaatcgatttttttgttttcggggcagtccccccgagccgatgcgcccagatttatggggagaccgaatccttccggaatagcttccctatagcctgtactttaattctgcgttggatttttgctccccataattgtttgagtaccccaaacggacacttgaaaaaatcgatttttttgttttcggggcagtccccccgagccgatgcgcccagatttatggggagaccgaatccttccggaatagcttccctatagcctgtactttaattctgcgttggatttttgctcctcataattgtttgagtaccccaaacggacacttgaaaaaatcgattttttttgttttcggggcagtccccccgaaccgatgcgcccagatttatggggagaccgaatccttcgggagtagcttccctatagcctgtactttaattctgcgttggatttttgctccccataaatgtttgagtaccccaacggacacttgaaaaatcgatttttttgtttcataatattttttcagaagtgctctaagcgcaccaattt

SEQ ID NO: 28795 - DNA, 833 bp, Heterodera glycines
  unsure (1)..(833): unsure at all n locations
gggaaaacggaaaaagaacggggcggggatctgtcgtaattatagaatgacctcattttatttttgattttatgatattttggcgttttgttttaatgttttgtgatttcgttttttgtttgcttttgtttctcggactttaatttggaattgcctgacataaaaataataaggctttatttttgtgtgcttttaaattgtgtaagcgctgaactgttgacgtgctgctgtgtatttttgattgtttgtacgtggcgctcctgtaaaaaggtgtggtcgacgcgggttttatttgtaagctcggtaaagtaattccgtctacaaagctgattcgacagaaagggtaaagtaattcccatcgacatttcatcgtctacagaacggaaattttgtgaaattcatcagttttcttctcacagaattcgacaagtgaaattttgtgaaaaagggcgaagtaatgcctaatcttcgatcgccaccgcttacttgtcaaagagcactcaacctcggcattcgtctaaacgaaaacgcaaaaaaatggaaatcggagagaaaatcttgagagggacgttcttcaaccggtggtcagagacccgggcttagttcgtcaccaagagagagttttgaatggttttacacaaaatttcgctgaaaacccaaacgacaatcaacgacaaagagccgaacagcgtttcactgatgaaaacgaacgacaatcggctctggttagacaacgccaagcaaatctgacccattatgcgaacaacgaccgagataacaaattccgcaacaaaatacaggatttgtgggaaatcaccaaatnttttcgtccc

SEQ ID NO: 28796 - DNA, 1118 bp, Heterodera glycines
cattcaaggttggttattaaattaatttcttcgcttttcttttttcagcagaagcaactcaaatgagtggggtctggtcatttttaaccattccagtcgccaatggacaagtcctaggttcggctggatcattggaccaataccctttcctttgttcaacaaattactttcaaacaataacgaaacaccgtccgataagctaatttccatggtgactattattcttagaggtgtaaacatatgcattttaagctttgtgatgttcttaaatcgaccgttcattcgctgtacactcaaagtgcccctcttttggataccattttggattttgtggacgtcatcgtttctgcacatcctcggcccgcctgtgaacttgccaaatctctctttttggcatgtcccaaattaaacttaattaaagcgaggttttcagactttccacaaaaatcgagacgaaacgacaacaaaattaattgcccatttggctaaatggttcgctgacgaatttgcttttctccaacaactgtccactttcgacgccattgatgcggaggaaagggacgaacaattattaactcttggctattacgtgctgaagaagttttgggacaatttgttgttcgtctcctccacgctgacgacgaccaaccaattggaagctggaactttgtgctgtgccttcgtccgccacttttgtcttatcatagcaacggcaattaaattttcttactaaactcatttttttcgccaataaattgacacttttcaggtgcttcaacacagcaaaaacccttcattagtacagcttggtctccgttcgcttttccatctgttgacaaagtgtaattctgttgacgattgtccgcctctgtcagacacaattggctcagttgctggtcatttgaccagtgcggtgttcgtaatcattcgcagtgagctggtcactggcaatatcaacgttgtggcggacattttacacgcattggccagcaaatatccgaatgtgacgaggtggacgaaaaatttaagaaagggaggggaggtgggattttgaggcacaagacaaatggacatcagtaaaatggactttaatgcatttttattggatttacacccta

SEQ ID NO: 28797 - DNA, 1180 bp, Heterodera glycines
tgagcaaaaatgtataagttaatgagaaatattttcgtagtgattggcgaagcgttcagtttggatgactgtggacaaaaagaggaaagtgctgaacaagttggagatgagaagttgaggaaggaggccaaaagcaaacagcaggacgatgatgatgatgatgatgatgggattttggtaaaaaataaataaaaacaaaaatatttaaaatggaaataatcgaaattaatttaattctggaagaagtcagagaaactggaaatggaattgagggtggccaaacaaatgtgcgcgttcatcaaaatggaacttgaagaggcagggattccagaaaaagctaaaaatcaaataccataaatatttaaaaaataaaataaaattacaaaactttgaaaaataaatttcgtaaattttaatttttcacagaaggcacttcaagcagaattaaaacagcaaagactgattgaagaaaacattgagttgaaagtcaaaatttacagaatggagaaggaaaaggagcaaatggaaaaagacggtgaaaaagaaaataaattgtaacaatttttgtagtttaaaaagcataattaagctaatgccaatcaatccaaagaactcttggagcggatcattgaattggagaagcgacagaaacaacaaaaggaggagaatgagagaaaaggtcggaacttgggagacaacatcggtatttaatggcaaagatttacactaagaagtcccgcgggattccctctcccactaatctctaattttagatcattcatttttgtagtcattttttaaatttcatttttaacttctcggtctctgttctccagcagaaggtcatttctgctgatggtccggttcagaaacagcagcagaagaaggacgaaaattcggatgccaatttgaacaaagtgttcttccacctttacgatgacattgggtgagcagaaaggaggcctttttttgtataaaacacggatagggaaacggtatcccatgtacagtactttcccagaatcttggcagggccatgggttctgttaagacagaacttcagtccttgttttgtcttttttgctcttgtccatcccgaaaacccttctggtccgggtttttccaataattacgggctgtacttgcgaaaaagttatccgattcaaattgcgcttaattt

SEQ ID NO: 28798 - DNA, 1175 bp, Heterodera glycines
  unsure (1)..(1175): unsure at all n locations
cttttttggcgtttttttcgaaaaattccataaaaaatgcaaataaaatcagggaaaatacacccctaaagaagtgacctgaaaaattttcagaaaatacacccctaaattgtaagtattgaaaaattntcagaaaatacacccctaaaaaaattgaaaattttctcaaaaatttatcgccaaaatttcatttttttcttgataaaaaattttaggtttaaaattttccttatcctaggtttaccaagttctcgaattgaatttacagagaattgttttgttttgcgtcgattttttcacgaaaaatgatctgatcagcttcggttgcctggcgaggattaggtccaggtaaattctcatgattttgcccttttcggaagacattgacaaactcaggggagggggctggaaccgaatgattcgagaacagaggacggaatgacatgcaaaatggagaatatcccccaccccatatgctaaatcttcgcttacaaattagtttattgctcaatatgctaactaaaaaacaaaaacaaaagtcaccctgttttttgagtgctctcatatgctgaccattagcattacaatttattttaaaaaactcaatatttttggtcaaaaaagcaaattaaatgtattcaaacgaaagaagaaacaacaaatgtgaggagcaattatcagcagatcaatttccattcataatgaatgatcaatcacttgtcatttcccaataattcattcactttttcttctttttatttcgctgtccgctgggcccgagtttcattttccgatgactttttgacttcatttggcccgcctttggtggagacaatggcctgatgaatgaagtgaaatttgaaacaaaagaaaatggtgttgcccaattcacccaaattcataaagatgaaagttgacattgttcaaattgtccaggttttcgtccacccaatgaaccgtcgccgtcaccccaatttgaaatcgcttcaacagacaagcaacattattagtattttgatggtcgtcttctttctcgaatgtaagcatttcgttggtccgttcgttcaccaattcaaatggctcaatttccgttggttcaaaatcctcaagtcgaattatgtagctnggcgaagaagtggtggcatggagaatgcctaacacaatggaatgaaaaa

SEQ ID NO: 28799 - DNA, 940 bp, Heterodera glycines
atcgggggaatatggcaaaagcataaatcgcaaattctccaatatcacataagcatcatcatcagctcgcaagacccaatcgaattcattctaaaaaatattattgaatcagcttcaatttttcgtgtaaatatgggtatatttttttcgcaaaaaaagaacatatttctgagaagggattcaatcgaatgaaattaccgtaaccgttttccccataaaataacctccccctaggcaaccagtcagtgggcaaaccgtcagtattggctaatccggtagtaattttttttttgtacaatatcaaattaatttaaaaagaaattggaaagatctttacaagattcctagctattttataatttaattaaattgaatattttttagaatcttttgtttttaaaaaaagaataattttcattcattttatataaaacataattattgtttaaatgtttatcgatttaaattcattttctaaatatttgcataaaatcttactttttcaaataaattttgctgacagattgtccactgatggattgtccttcattgataaatcaaataaaattgggtaaaatgttaggcctcggaatatacaatgtgttttttttgaattattttcttacaaatttttccacaattataaattttttggctattataaaccataattcgaacaaatttttttatataaattatataaaaatgaaagccatataaaacacatttcagttagttcattacattgttaatttctagagggtattattattatttactaattaccataaagtgttcgtaaatgtaattgataatccatcgtgttctggcccaaagatacttccttccgagtggtaatccccccacatcaattgctggcaaagatgagtcattttttgaagagaaaacagatatttggtgcaatgttgagcccatgttg

SEQ ID NO: 28800 - DNA, 1357 bp, Heterodera glycines
cctggcggtcgccgttgcacatccatcccaactctccggcgagcggcccgccgcccgcgcgcgtaggggcgagcttccatcgagtgaaacccctccaccagcaacgagacgaaccgtgccgaatttgtgcgttggttggcacaagcgacgggagggggcggggaaaacggttgtcattagagactgtacaggccctgagggcatttaccgagccgcccgtccctgtcccgttttttggacaaaccacctaggccaggccgccccattgggaaagtctcggatttttgggcgtttgtctcggatattgggaaagtctcggctttttggacgtttgtctcggatttcgtctaccgggctgcccgtccctgtcccgtttttgggcaaaatcaccgggaccaggctgccctgtaaaacgggattttttaccggacagcctagccacgatcaattttctaagccgggcccggtactttcaaattccggtatttatttgtgatgcatgctcgagagtcccgacgttgggaaagtgtcggctttttggggcgtttgtctcgaatttcgtcttggctaggcaaacttttggcctcaaaaccaaccaaaccaattgtcaatgtaattttgcatgaatttttgaatgcatgaataagaaagcttttttggaaaaagtttagctcttgagaagattctcgccttttcagtggtctcaatgttcaagaccattcttaacacagtattggcaattttttaagtcatccaaaagttcataaatataattttacatgaatttttagaatgtaagaaattttttgaaaaaaacgtcgtgaatttaataaattttatacattttttaaagatctgtcttctatagattagtctcggtcaagagtatcggcaatgttttttcccttttttcctccacgcgatgggaatttgtgaaagttgtttagactgtgctgaagcccatgcagaaatattgtccacgcattcacatcgtccgctctgacaacatttattcacagatggccaattggaaaacgacgagctttgccgaaacggaattcatcgcggtgacctcctatcagaacaacttggcaagtgacggagggaaaggagagaaaagagataaaaagagtagggaaagagaaaatgagaaggaaaagaaaagtaaaatgggggaggagcaaaagggaaagaaaaagagggaaaaagagtaagggaagaagggagggggggggggggggactgggtcgttttggcgcccacgttttggcgccgacgatttggcgcccacgttttggcgccgacgatttggcgcccacgttttggcgcccacgttttggcgccagggtcgttttgg

SEQ ID NO: 28801 - DNA, 1405 bp, Heterodera glycines
taaaatttgattttttttaattttttaattttttgaattttttgaatttttaaaattcccggttggtcccggttcccggtcccgaagaaaaatcgaggtcccggtcccggtcccggcttctcaggtcccggcaagtcccggtcccggttttgcccaaaattcccggtcccgctctactctagtgaaaattggtgacaaacaggtggggaagatcatatacatatagccacaatgttggatcactttttgcaaagagattatgaccatttcactgattacatttaatcagatcgattaaaatttgatcagtatgataaatttaatcagatcactgaaattgttcgggtcacttagaaatcttgtttaaatcactaataaatcttggtcagatcactgataatctatcccgatcagatggccgtgtccgcccattggctgatgtccgtttccccggtgatcagtcgcatgctcagcgtgagatgaaggagaagcagcagcgaatgatcactttggacgaattgggcgtggacatggaccaattcaagcagtttttggaggccatcacttatctgaacggaccttttctgcccaaccgtaattcatgatactgatctattatactatatcccctgaggggttgaaaatttaattttttaaaaatattgattctcaatttttagccaaaaatgtgctggtgctgctcaaattgtccgactactttcaggtgggtgcccttacagatggaatattagacattacataaaattttattccgttttcaaaaaaatgatacttaaatttgaatatcctttatcaaagagagtttacccataattttcaataaaaaattaatttttactatttttaaattcattaggctaattattaggggcactaattgctccgttttgaggtggccgcgttgaagtcgcgttgcgaattgcatctgatcaattgcgtggaaattccactgatcgaccgtttccttctgattgaacgcttcggactcgacaatttgaaagtgatttaattttcaaatattttaaattattttttaaattaatttttagaattactttttgcatttgaatgttgacaaatttcgtgcctttttcaatgccaaccatgaacagttttttcctgttatcagcaaagaatttttgtgcgctttgtctgtccgaggaatggccgggctttgatcaaattgattttggcattttcatagaaattgatcaaactgattttggcattttcataagccgggctttgatcaaattgattttggcattttcataaaatgttttttagaaatttcctcattctcgatcagagagaaaattgttaattttttttgaactgtattaaaaaactttgttataatgagtttatcaagtaagaccaagga

SEQ ID NO: 28802 - DNA, 1604 bp, Heterodera glycines
  unsure (1)..(1604): unsure at all n locations
ccatggctgaagaaattcgggtagttgtcactgggagtgatcgatttcggttttcgaaacagaaattaatgtagcaatccgtatcggcacagatgttgnctatcaggatgtcctcctctggacgcgaataatttgcgatcagccgagacaaaacgtcggcttggccaaatgacgttgtgttgacgtagcgaatttcaaaatcataattcgctaagatcatggaccaacgttggaggcggctcgcggcatagatcggaatgccctttttggagccaaaaattgccaataaaggcttgtggtccgtttgcaaaataaattttctgccgtacaccatgcggtgaaatttctgaacggcgaacacaatggccaatgcttctttttcaatttggctgtaattttgctgcgctgctgttagagtgcaggctgcgtgttccaccactttttcctttttgtcggggaatgtgtggcttaatgtggcaccgattccatctttggacgcgtctgctgatacgacgattgggcgtgccgggtcgtagtgggtcagcaataaatcggacgtcattatttgttttgctttttcaaaagcattttgctgttcggacgtccattcccaagctacgtccttttggagaagtttgtcgagcggtgcacgcagttcacgcatgcattttacaaatcttccataataattcaaagctcccaagaacgatcggagggtgcttttgtcaatcggagcgggcattttccgaattgcgtctgaacgcgacgggtcaggacgaatgccgtttgctgacacaatatgcccaaggaacaaaagttcgggctgcaaaaatttgcatttgtcgagttggattcggagaccgtactcttttatgcgcccaaaaagagtgtaaaatgccgtgatgtgttgctccagggttttcgttgcgatcaatccatcgtcaagatacgcgaaaacaccagggatgccagcacaaatttggtccatcaaatgctgaaatattgccggtgccgatttgactccgaacggcaggcgttggcattggaaaagtccgcgatgtgtgttgatggcgcacaattgcttggattcttcatccatttccatttgcaaatacgcatcgcgtaaatccaaatttgagaaaaatttcgcgccattcagtgaggcgtaaatgtcgtctggccttggcagtgggtggcggttcaattccaatgcattgttgaggccggtcgagaagtcgatgcagactctcgtcttgccgtttttcttttttacggccaagatcggtgcggcccaatgactgaaatcaatcggcttaattgcgccaatttgaagaagacgatccaattcggcattcacagcttccatggcgccgtgtggaatggggcgagctcggcaaaatacaggctttgcatcagaccgcaaaatgagatgcgcctttgcctttgagcagtgtcctagtccttcttcaaaaacttccgggaaatcgttttggagtgccgctttaagcgttgacacatcattgatcgatttgtttggcggcttcactgccgaaaaattgtcgatcatttttgtcgcctaatccgatttgttggtcggaaataaa

SEQ ID NO: 28803 - DNA, 1235 bp, Heterodera glycines
taaaaatctgatttttgatcccgacacgcactgaaatttatgatttaaagaaatttagcaaaatgttcttatttttgaccccaaaatcttattttttggccttgatattcttattttgaaaattttgagatcgaaaccctggattaactataaaaggtatttatcccattcacagctattacatttgacatgggtttcatccgttcggataaaatagtaccaccaactgcaagcatcatcaaaaattttttgggacattgagctaaaaatagtttattttagagtgaagcgggaccgggaattttgggcaaaaccgggaccgggacttgccgggaccgggacctcgattttcgtccgggacagggaaccgggaccaaccgggaatttttgaaaattcaaaaaaaaatttaaaatttaaaaaaattcaaattttaatttatttcaagtgtaaataatacaaaattaatttttatattgctatttattttataaatccaaaagttaaagctaaattaaattactgaaaattttcaaatcgaatttacttcagttatttcaaacaattaatcattttatgactcaaatgatcgaatattattagcaattcagatttgcttttcacatcacttttttcggcgcgctttttccaaaaaacttttgggaaagaaagggggtccggcggtgccgataggcgccgtcggggaaattttgaaaatttgagtgtgatttgtttacagattttcaacaaaaaaggttggtttttgggattactatgctcaatttgtacggattttctttaaaaaatgataaaatatgtctcaataaaaaaaactatgagcaatcatatttataggaaacatatattaattctttttttaaattttttcctttgacttcaattttcatcagtaatttttcactcagacccccattcttaccagtgcttgtttttcccggttcccctatcgggaccgggacctgagcttttcaatatccgggaccgggacctcggatgaccgggaattcccggcccggtcccggtccggcttcactctagtttatttcatttgaaaacaaaataaaatagaaaatgtatatcaaaaatttcggaaatcggaattccgacgtccaaaattttttcggaagtcggaattccgacttcatgcaactaaagcaatacaaatgcacgaaaagacgcataaagaaaataagacagactattcgcatgggtaaaa

SEQ ID NO: 28804 - DNA, 1828 bp, Heterodera glycines
  unsure (1)..(1828): unsure at all n locations
aaaatttgaaataggctggcattagtttgacttcaaanaataaaaaaattttttagtttcttaaaatttttgggcaaaaattgctatttttccaaaaaaaaaaaattcatttttgagtattggggttgaattattatttttttctgaggggactgtccncaaaggccaacaccaaaatgaatttcgagatttattctcggcctgaaagtccgcagtctcgagaaataagttaaaattccggaacaaaaactggtcggtcttggagcctcgagaattgttgagtttccagcggcataaaaaatggtgaaattttatttattttgaaacgcatataaaaatggaagacttcgctaattttgcaaaaatcattggtacttttccgcttgggggccccacatttatttattttgactattcagcgcgctttttgttaacgttgcttaatttaaataaagatggggccccaaaagtgccaaatcctttttttaacagcagcaccattattaatttgccacctcttttttgtgctcaaaaagtgtgttgtaaatgtgaaagaattgctgggtgaaaatttgctttgaaattggtcgtccattgatgcgaatgcgttcacggacatggaccaaatggggagaactgtaaaaaatgaaaatgaaatttaaaattgacatctacaaaaaattcaaaattgaccaaaatttccttaaaataaaaaattttcatgtcttagagtgagccaattatagataaaaaaacatttacagaaaagtaagattcttatacagatttcatgaaaaatatttaaatcttttttactttttgtcaatcgaaattattcagcaattctaaattaaaaattaatttttcaaaattttgtaattgggtgccacccacccacacctgtaaaagccagttttgtagccaagggaacgcaaaatggactccagaaaagcggcggttgaacctgtaaaaagaaaataaatttggattttaattgattttttaaacaaaaaaaaacaccttttccttttgtgccggtgatgtgtacaacattcagacggtcaatgtcgtccagctgaaaaaatcttattttttttacaaaaataattttttgcgaaaaataaaatatcaagtggcgtattcgagtgaaagagagaaactgagagacaataggaatagaagaggaacagattgttagagaacgatttaagaaatgcaaaaaaaaagaaaagaaaaattttagcaattttttgtaaccaaaagttacgaatctgtgaaaagcaattttgataaattttcatacaaaaaatgcttacttttaattgaaaattaattaaagcagtaaaaagggatctattaagagcagttatcgcaaagattgggggagcggagatggggattattaaaataaatagcctccctccttaaaatgtcaattattgaaaccaaattaaataataaaatgggaccgaaattccgagaatgtccatgaattccttggtctcctccagcctccattctggccgcgtttcctgttgagttcgtgccaatactaacgtttgtgcgttgctttgcaaggcgttcagctggatgacggctttctggaaaattaaaaaagattttcatttttttttaaatttcggcaatgtgtgcctcgtaaagttgctgctcctcgtcgctctcccgccgttgggtcatttccgaagaagatttttgttggtgatttgtactatcaaatgtggaagcacttcgaagaaaaagcgctagaaaaaatatattttttaattagagaaatttaaaatttgaaaataaaaatggtattaattgg

SEQ ID NO: 28805 - DNA, 1228 bp, Heterodera glycines
ccacggcccaccggcttgggaacaacggcttccgctccggcgatacccgaccaccggtctcggaacggcgtgacccgccgattgggtggccccagaatttgccagtgcaatcgtatgcgtaagtgccattgaaggggccgaggctttccataatctcgttcattggcaaagtccgattccgaggccgacactaacagagagccaaaaaataaacatgcaaaatgccattttcatttttcacttaccaatggccatctttcgcatcgctaaaaaagggactcatttaaaaaaagaaaaataatgacaaatcgacagagaatgaaatggtaaaaatgttacgttaatgtggactacgatttttgtaattattccatgtaaaagttattcattgtcttacttcgttgtttcgtatgctgtgccttaagcaagccaagataaaaaaatcaaaattaataaatttatttttttttctaaaaatgaaaaatcccctagtaagcttacttgccaaatcaatttgatggatccaagacttgttcaaattttcgttatgtgatttgtttttttttgatagggatggaattttttatagtattcttttttagtttatatattaatcgtataattaaatttattataaatttttcggttagtctcggcacgattgtaattagtcattagaattaagttgcaaaagattgtctcataatctataatttttttaaatgacctccaactaagtctgatttatgaagagtaagaataagccgaatagtcatgtaaatggctagcggaatccgtaccctaaaactttcaacttttgatgctgatcaaaagtaaaataatggacttttcgacagtaaatataaaaaaaataactcttttaaaataagttatattgcttgtcagttttactaatttcttttgaattaacacaactaattcgtattgctaaatcattattactagggatacggtttttacgtcttttacttaaaaaatttcagaaaaatacatccttaagaatcggcctctaaaattttcaaaaacacacccctaagaaagatgaaaatttctccaaaacttcatctgtaaaatttatttatttattttcttcgtaagaatttttgattttaaaaattattttatcttaatactgatttggcttaattttgttgctttttggataacacccggggtggatacacccttaaattgaaacttaattact

SEQ ID NO: 28806 - DNA, 1588 bp, Heterodera glycines
ttcatacatcgattttgtcccgccttctcggtgcttcttcctcctcccacattgattccatcgaccgccccggcggggagcgcggtggccgaaagcggcaacgacggtaggaaaagcgagcagaatcgatgcattgatcccatcgaatcccaatcggattttgcatccaaaggatgagtgagtgggtgagaagcgattgattaagcatagatttttggatgggaattgaaggaagaggacgaacaaacggaggaaagaagggaaagtgggacagaaagaaagaagcggaggagaagggggaggaggaaaacaattagtgcgaaaaatgatgtcttttaattatcatatgctaattgcatttgtttgataaacggtgggcagaaaattaaagaaaaaaacagtgacaaaagaaaagagcaatggataaggaaaaggacaaaaagcattaaggaataattaggatttaaaatatatggcatttgcgtataaatcgcaaatgttatgcatcaatttgcaaaatgagaaccattaaatgcccatatccgacaagttttattaaattctaaattaaattgtatttaaatgtattttcaatccgtggtgagtcgaagtgtcaaaagtattgatgtggcttgtaaaaaaaagttgggttgaattaaatttgtcaaattatttgatggtctcgttttttgaagggtcgtgtatactaaaatagagccaaatatatttattattaaaagattgttattcaattataaatgaattaattaatttaattatttaaattaattttctgtactgaaatgacccgtctctttcgatcacccatcatcgattcttttgacacttcgacacagcacctttaaaaacaactcattagtagaaaaaatatcatttttatatattcgctcccttaagaggtcacttgtgtatacgaaatgttcttcaaccccaattttgatggtcaaaatgcgatggaaatggccaatttggcaattaatttaacaatattcttttttctattctttctgaatgattgcaaattaaaattgggtcattgaatttgaaatgtttttccattaaattgcattataaatatacaaaattatctttggtacaatttcttttggtagaagtaagtctttataattagagaatgaatttccaactcaaattaatctattaagtgctaattgaatttgcatttttaaatttcaaattgttgtcattgttccgtagtttttcccgagccttttttacttaaacaccgaatcccaatccgaaggaaatcgctttgtctttgacagccgcctgaacaaaagtgggaattaagcagagtcatttgctatttacaactttgaaccaaaccaggacttttctctaatttcgcccaggggtaattacttttcttaattagtccgcaaatttctaaaacttctgttatgaagagttaaacaaataattttggttttaaatatttttttcaaattttaaaaatgaaaacttctcgcgattttctcgcttgatttttgcaagccattcccttgccttataataagaaattctttttaaatattttaataattga

SEQ ID NO: 28807 - DNA, 1292 bp, Heterodera glycines
ctgcatttgtctgtcctcatgttttgcaaaattgaataaagcggtacgccctttgatcattatttatcactaaaaaagcttatcaatggacaaattgggcacttttatttatttggtgataaaaatgccctccttcctcacattaataaccaaatattacttttttttaatttttaaaatgaaactaattaaacgaaaatatttgccacccgaattactttttgagttaattcattttttgcctttcaaattggtgcttaaaatattttaaaaaataattattaatgaaattaatttaggtcgaagcgttggatgacaaattgggcactcttttggcgaaggtggcacatgaacgtagaaatactttgtactgtgccattatacgtaagtttccgacatttcgatcacatcataattttcttatcgtatattctctaattatcgccccgtcttccggggacaaattttcctcagcctgtgccatattttaatagcatttagtgctctcaagcaaatttcgtgttcccaccaaatttggcttgtgcttggagaagcccaaccttactgaagcggcttccgaaaactataacattggcaaattccgtgcgcacctcgcagaaatccgtgctcatattgttacgagtggggacactcaattgatccaaaaagcgtcagtgtgtaagtttttattgcaaatttggcaatgtgtaattaaaaaatggcaaatttcaatcaacattttcaggtttgcagaagcttattgtttttttggatgaacaggattagctaagaaggataaagccggacggacaactgaattagcaacggaaattccaacaaaaaaggcaaaaagtttcttttatttgaatgatggcacaaaattacactaataattcctaagtgccatacatttaattttaattttacgtctgttactacaatttttgagaaaattttataataatttttgttaattcttaattatgctaaattttgaatgaactgatgcgaattaaactaatatgtattgtcaaacaattaccaaaataatgccattttttgcgcaaattattgccttttgacatttattagtgccgtttttgcattaattcgtgacattaaccgagttaattaatcgttaataaacatgaaaagatcagaaaatgtgctgatcaattaatctcaattagtgttggagtatttcagtggtgtgatgcggtggtagttagcagggatggcattccgaggccccaaaaatgttcggaaatcggaattccgggggtccaaaattt

SEQ ID NO: 28808 - DNA, 1503 bp, Heterodera glycines
  unsure (1)..(1503): unsure at all n locations
tgactacaacgaattggtggacgcacatcatctgcccctcaggtgcagcaacagctccaaacacgcggnctttctgcactcggaagcggatcggagcagggcagcagcgcatccgcggaccaaattccgtccacgcacttccaagtggaccaacactgctcaatcccggcggacggacagcagcacaaagtgagggggaagcaaaaaaacgaatggggaggggaagggaagagaaagggaatgaaaggagggggggggggaagggaggggtgagaagcgggccaactgatgagtttcaactgttgtttaaatcggcttcttctttcttccttccatttttgtcccatttgtctgtccctgttaagctgttccgtttgtctgcttctgatgttgccatttgtcctttcaggtggacattgcgcacatcgaattgacccccaccctttggcatgagtgtgtgccctcccgtctttgcagtgccttcgtttcgtgcgttcgtttgttggcattccgtcccatttctcctctttagtgcccaactcgtcaactcttcccaacttccgcttttgcccggccctctctccgttttcttcaacaacactttcacttcgacggtccccccttatccatttttaatatttaatattattctctctcagactcatctcaacttggtgttacccggtgaagagtttcggtgtcttttgggggtcgatccggcattgaaagttgagtacaaacgggcacaactgtctaatcagcaagtaaagcagccaaatttggcactctttgcacgcaattgaccccaaggtcggcttcatgtcccgctcgtgcctttgcacccatgagcaggtcatttcgcttcgaaatgcaaaagcgtcccaaagctgtcgcgttacggtgcgcgagcccatcccaaaggcggcggatgagaaaatcaaagtgagtgaaacgaattaagaaatttaattgcttttaatttcagatttctctgctgcatcccgacttaaaggcgcagagagcggaggcgcgacttttggccaaggaaagccaattggaatggaccgtcaaattggggccgggcgaacagagagaattgagcgtgaaatggacagcggaatatccggcacaagaggtaaagcgaaggcagaagcaaagtgcgagtgccattctcagagtgtgctcctcagcagctcttccgccccttcggcttttgttcagccgctcgcatcgacgcaattattggcaggacgaacccactgaacaaaagacgcacattccgtgctattactaataaattaattgcttttaattgatatttatttatgccaactttcactttcaattttagtcattcgtttttttttttgcttattttgcaatttcttgacaatgaataaataaaaattaatgaaagaatgaatggaaaaatgaatgaatgaaaacgcaattggacgggaggggcaactgttgacgggagcgacggacgacgaattaattctc

SEQ ID NO: 28809 - DNA, 943 bp, Heterodera glycines
aatattctatcccagtggggaattgaacccacacgaaagataatgaacggcaaaaggtatagccactagaccacgcaaccataaagaagaatcctttaaaaaaattaataataactagggctgccaaaagtatgcaaatgcatattttttttcctggcttctccatgctctaaatagtacgaaaaacactttcttttttgtgtttgcgtataaaaatcgggacttttatttgcatatttttgcatattttgggcctttatgcatattttggcttgttttacattttcatgcatattttgccattttttgtgcatattttccgattttttgcatattttgccatttttcttcaaatattttccgattttttgcatattttgccatttttcataaaatattttccgttttgaatatcccttaagtaaattttggcagacaataggatgagctttagtgccgaaaatcttgagaaattattgattttcaattgcaaaaaaaaccgataaaatttatgaggaataaaaattttttattggatttgcacccctaattttcaagtttttttgtgcatatttggtgcatattttgcgatttttgtgcatatttatgcgcatattttggccacttttcgtgcatatttttggcagccctagttattaattgaatatggaccagagaattattgtcagtattttttttgacaaacaaaaattctgaaatgggttgcctgtgagaatgttctgctgtccttaccattttaatatggtatggaagagaaatcgcaactgactgataacaagtactatggataatgtcaatcaaatgaatgttgtaaatacatgccaatcaaaagataatttgttgatttgaccattttataaataattacatcgaaaagcagtaaattaaaaaaatatatgaaattagtcggtagggtacgatt

SEQ ID NO: 28810 - DNA, 1126 bp, Heterodera glycines
  unsure (1)..(1126): unsure at all n locations
catttttatcaagaaggccataatataaaaaacgatcaaatgaaaatntaatagccctaagagttctctaatagcctgaaaatttcaaggaaacgctaattttcaaaatagttatgacaaaaatatttgaaaacctggttccatgtgtactttttgctataactttgttcaagcataacgaaattttttgaaattttgcatactattagagaactcttaaggctattgaatgatatcaagattcaaaaattagttgcttttaagcaatgttatgggtaattatttgttgaaaattttcatttggtggttttttatataaacgccctttttgagtgttcatttaacgatatttcacccccaggggaaggccacgatgggaagagggggaggaaggatcgataaatgaccaccgaagagagaaggtcaacaacaaatgtcaaacttttaacaaattgcttcaaaaacaaaaattttcccggcggcgcctgtggacaccgccggacaaaaatccccgaaattattttaaaaaattggcttcaatatgcaaaatgtgaacttttttttctcacacatgtgagtgaaccagggctgggcgcaactggattttcaattacggaaatccgcaatccgcaattgcggagattttctcagttacggaaatccgcaattacgggggtccaaaaaccccgcaatttcccgcaatccgtaatccgcaagccgaatttttgtcagaatttttgaaaatttttttttcaatagtgtattaatgaaaatcaaaaaacagattttcgggatgtatcttcttatttttgatttcaattttacaaagaaattataatttttgtctctgaaaaaattcattctttttgaatttttgggttcatttttgaaaattttttgaaagtctgatcattataattggatttatgtatataaatatttcaatattgataagaatcaatagccaaaaaaaaaaatnttcggggggggaacccgaagaactgaactttttggccaaaatttttttagtgttacttaaaaaatttcagcgccggagagcaaaaacaggaattgtagacgttnttagccaaattgggactaactttttgcattttggagtcaaaat

SEQ ID NO: 28811 - DNA, 764 bp, Heterodera glycines
cgcctattggcaccaccggaccaccccccgctctcgaaaagttttttggaaaaagcgcaccccaaaaaaagtggtttaaataacaattaaataattgggcaattaataaagcgtttatttgtaaaacattatattttccatgctttttaaaaagtataagcttttattttcataaaaaatatggatatgaactttattttgcaaaattcataatcccgaacctgaattcgaacaaaaattctaggttcacaaattgcagggaaatttagcgtttatttctttggtactgaagtgtccattttcagtgggactcagttgtcccagtgcttagatggcatcggctcgacttaattccctgaagtttagatttagttcatcaagagctttcgaatgataccaaatttgtttgaaaatttttttattttaaatgggtttttggctgatttttggtgccatttttcgtgatttaaaccggttcaaaaaccggttttttgatttttccgcacctcgggaatagaggattagaggtcattagagattgattggaacccgttttgggcggtttttttgcgggcccaattctatagttttccccagaaattgttgatattttgtgcaaatctaaaaatttttctttttgtacattttttattattgtaaattagatatttttaggttcgtaagcaattaattgattttttcaaacattgttttgctttttaaaacaattttcaaaaaatccaggtccaggcctggatccaggt

SEQ ID NO: 28812 - DNA, 1159 bp, Heterodera glycines
  unsure (1)..(1159): unsure at all n locations
caaccngggagatttcccatttcatgttgcaacaaccgcatttttcacgtttcatgttgtcacaaccggaagactttcatttgatgttgccatgattttccgtttaatgttgccaacaaccggaaaaacaaccgcaatatttcacgtttcatgttgccaactactgaaaaaaacaaccagagatgattaaagtttcatgttgccaagaaccggaagatttcacgtttcatgttgccaacaaccggcagatttcccatttcatgttgcaacaaccggaatatttcatgttgccacaaccgggagattttcatttgatgttgccatgattttccgtttaatgttgccaactaccgaaaaaacaacctgaagatttcacgtttcatgttgccaacaaccgggagatttcccatttcatgttgcaacaaccgggagatttcccatttcatgttgcaacaaccggaatatttcacgtttcatgttgccaactactgaaaaaaacaaccagagaagattaaagtttcatgttgccaagaaccggaagatttcacgtttcatgtttcatgttgcaacaaccggaatatttcatgttgccacaaccgggagattttcatttgatgttgccatgattttccgtttaatgttgccaactaccgaaaaaacaacctgaagatttcacgtttcatgttgccaacaaccgggagatttcccatttcatgttgcaacaaccggaatatttcacgtttcatgttgtcacaaccggaagactttcatttgatgttgccatgattttccgtttaatgttgccaacaaccggaaaaacaaccggaatatttcacgtttcatgttgccaactactgaaaaaaacaaccagagaagattaaagtttcatgttgccaagaaccggaagattaaacgtttcatgttgccaacaaccggcagatttcccatttcatgttgcaacaaccggaatatttcacgtttcatgttgcaacaaccgggagattttcatttgatgttgccatgattttccgtttaatgttgccaactaccgaaaaaacaaccttaagatttcacgtttcatgttgccaacaaccgggagatttcccatttcatgttgcaacaaccggaatatttcacgtttcatgttgccacaaccgga

SEQ ID NO: 28813 - DNA, 1355 bp, Heterodera glycines
tatccgtgaagtggatgtctatccactgctcatccaatgtcccaattgttgaccacgagtatgggtagctaatgctgtgcagcccacacacccaagacccgttgaaattcaaaggttttggaagccggacccggaatttgtttggctgattgtccggataatccgtcacattgctaggcaaaaacacaaagaaactatttgacattatggatttattcaactgatgagaaatacacaaaaattcaaacgcttttatacaatctgagactcatcaatccattctcgttcgggatacccaatgaactttacgagcatctctgtggttccatccggttttcttcgctttctgtacactttttcaattctgtaactggtgtcggcatcttttctcacgcgggccaactcctgctcataaaaggtgccccggaatttttcaccacgatcatcccggagcttgtatctgttggggcgcaccgccttcagcacctcgtcaatttccaagatttcgtctccatagtttggcaaataccccttctcgaactgtcccttctctctgctcatgcgtacaaattcatctttacggaaacgtggcttcttgcgtttttgcggtgattcataaattcgcttccacaccttctgagcattttcaaaattgacatcaattggtcgcattccgtgaacccgtgacggagtgctgttaattccatccactatttgttgtacaacatcaacccaattcagcgtctccctttcggcaaagtatctgtacagtcgctgcttcacatttcggattgcccgctcagcaactgaagctttcactgacgaatgcacgggctcatgtttctcaatctcctgctcctcaaagaattccttcagcaatttgtttttgaattcggtgcctttgtcggagaaaatgcggtgtgggaccattggcatttgcttgacaagctctttgaatgcatccagcatctcctcggccttcttatttttgagtggaacgacaaacaggcgttttgagagaacatcaaccgcaaccagcaggtatcggtgactgcgattgtgacgagaaagcgcttgaaagtcagccaaatccacttggacgtcggtcatgaaccctgctgcaacagtttttgctctcggaaatcgtacccgcctggggcgcatcagggtgtacgtgcggtgtccctccaaatagtgttgtacatcctttttgcgtaaattctttagctttttccgcgcctccttccacagtgcactaacaccggcaaacgcagcaggagaggatggatcgttgtacagcttgtcaagagtggtgttgatcatttccattttttcggctgaaattccttctttat

SEQ ID NO: 28814 - DNA, 1651 bp, Heterodera glycines
  unsure (1)..(1651): unsure at all n locations
ttaatttaaacatagaaaataaattaacttttaaaacttacatagtaatctattatatgtaaaataatctaatatatcttatttcaggaaaaaagncatcaattaaaagtgattttaaaaaataaatggtatatgtaaatnaaatcaaaatatgttaaatatatacttaaataattataanttttttttattntaaaaagagataaaatatantaaaataaantctttttttattttanaattaattaaataaaagaaataataattacaaagacacatttttataaaaataagattttaaaacaaatcataattttatcgaatttcgcaagtaattatttttaactattaattatataaaatttgaaataattgctataaaccaaaaaatatatacaataaattacaaaaagtatataataaattgataaatgataaatgaaagatactaatgtaatcagatttaaaagtaaatcaattaatcttcagtactgtccttcgacggatagacgggtcgtgagattaacgagcaaaaagaaacaaaaaatattaaaataaactaattttacaattataaaagaaaagaaaaaataattacaaaggtacatttttataaaaacaaaagtttaaagtaaattataatcttatcgtatttcgcataaaatttttttaaaatttttaattactacaatggattaaaaaaattgctataaacaaaaaatagtgatgaaaaatttgcaataaaactcttattttattaattttgtaatgacaaaaattagaatatatgaactgacaaaataaaaattatgataaaaagtgcaaagattagcaaactttaattatttttataatttgaatacgatcaatataatcgtttactaatcagcaaatttttgttaatattgaaattctaatgtatagtgaatataaaaaacaatttacgttatgcgctttggctcttgattggtcttcaagaaaaaataaattatgaaatttataaaataaatctgttcgcagaagagaacaacaatattaaaattaattataaaaacgcattaaaattctgatgaatattatataatattcgtcctaaatacagttgtacgtagaataaataaaaaaacgtataaaatatttataataaagctaaaattattaattaaatatgtagcttcaacatttactaaagttgatgtaatttagaaaatttgtcgtgaacattagaaaaataaaaaattttaatttcaaattttgattaatttgattttttaaatattggtactatttctaatgtttgctttaaatcttatttattattaaaattctgaaaaatatggtttaattatatttttttattttggacaagaaaacatattttgattggttgttttaaatgacgaagaatcaaaaaatatattacgggcaaaaaaaatgaaaattaataagatagcaaaaataataaatttattttaaaaaatatatgaaaaggattggaaattttagagaaataaaaaaaattaattgttactcagaatttttttttttgataaattaattttaatatgaaatatggaacttatttaattttccggagagaaataattattaaatcatttccnnaaaagtaaatttcaaattcaaaattatt

SEQ ID NO: 28815 - DNA, 1520 bp, Heterodera glycines
ctgagctcgaaggagaagcgtttgttgggtcggaccttgctccgttttccgttcctccgtccgttgctcctccgccgtttcctcccccttcccatgcgtcgttttctcctcttcttcctccgtcccttctttttctggccttctcctttccactgaattgttttcttcgtccgtaaaaatgcagcagctgagcaactgtttggattgcgattgtccattcaaagtcaattgtgaagaatgctgctgctgcaattggtgctgtttctccttttgagcattgtgcttatttctggctgcagcaggtgccgaagtgttcgctgctgttacattaagccaaattgcatcccataaaagtttgacgaattggtgggcacttgactcactgaaaggtgaaaagataccgaaaagacaaaataaaaataaataaatacaaaccgcgaaagtaaataagcaaaagcattcgtaagcgaaacaaaaacagagaaaccgacagagctcacgaaattatcttcaggagaaaagagctgaacaattgtgaggacacccagcaaaacagtaactgaaaggacacttcggcaaatggaaaaaatcgaagaaagaagcgaaagagacgcagtggcacctaatggggaactcatttaaaacaacaaaacgataaagctggccaataattctttaccaaaacactgcgtgtcaaattgttccaacaaatgcatacacaaagtattgacctaaaagcattaattggctaaaaagggaatgaaagaaaacctgaggaagaagtccaaaggtaaaaaccaatggaagaaagagcagaaaaccagcacaaaaatcatgcaaagacagacgtaaagggagatcggaatacagacgaagccaagaaggatgccaatccagcgaagttcggacggaaaaattggtccaatcgagaaaaaggacaagcgaagagagaatgaggaagtaaattggacgagaataagagaccttttcaaaaattagaaatattaattgtaagcatttaaaagggtataaaatacaagccaattgaagccatggacgggtgaagccgagtcaggttgaacacttttaagtagagaaaactgcggaaggaattcaatttaaaattgccaaaatgaatgggcaaaatcacttgtgctcctgcgacagtaaatgaaaaaaagagcagtgagacttcggtgtatactctgcgataaagcatcagaatggccaaaagaccaacagaaagtgccaaaagaatgtcaaaaattgaagaaacaacagaggaatttctgtcaaaaattgtaatgagggagaggcggtccaactaaaataagaatttgtggaaaattaagcaatttgtagttttcttccaactttggcttactttcaaagtaaaagcccgccgtaaggacgcattgcaattgggcactctcttttctcaaacgaaaggccaccaattcaaccaattgggtaaaattagtagggaacaatatttctggcggggccgactgtgaagcgca

SEQ ID NO: 28816 - DNA, 1503 bp, Heterodera glycines
  unsure (1)..(1503): unsure at all n locations
ccaccagtaccgctgtgcccggacttcactgaagaagcttgacttcgctcttgaaaacattaattcagaatgtcgagaataaagtttcgcttgtctccccctaactcacgatgatggtctttgtctttaagtagagaactgaaaaagttggcgagcattgtgttgtcgccgtggcctttgccgacgtctccgcccggccgccgtggcgattgttgcccaccgccggttgaggactgaccgctgacacttccgtccaatgcgattgtataaagccgggcgagaaaagactgctcgtcctccgccttaacttccttttcgccagtcgccctacatttttagagaaaaagttactactaaacccaaatcaggaagccccaaaaattgtcaaaaatgactaccgataattggagaagggtgacgcatcgctggactgctgggccaacatcggcacatccaaaagatcagaaccgaccaacgcttccttgatgatggacagcttctgctcagagtcccatcccttaacatttatgaacttattcgttaggatttttactgtctttttgctaacagtcggaacgaaaatgcggtctctttccacaatataagcgggagcagtgaatggtagtgagaaaatgcggtgagcaatgtatttgtgcaaaagttgtgtgttcaggtcgtcgttagccgaagtgtaaatataaaatggaataattaatttggggtttcttccattttcctaccaatgcggcgccatgttgaagacaaaacttgcgcacatggtattggagccggtcgagctgttctgcgcttaggtccgtgtgcatgtcgctcttgttgattgctgcgatgagaatgacaccgcaattctcctctaaaatccctttctccggcggcaacaaaagtggcgacgaatccaagtcattggcagtgccattcatcccaccaccccctccagcgacaatagtggcattggactcagccaaagtagctgaaaggaatgtattaatactgattggttgatgtctaacaataaactaaaaggaatcccagctattagattttcaatttcaaaaaaaaactcatcttcacccgtccttttttgtatgatatattaaagtaaaaacaattattcttttgtgccaataggcgccatcgaacatagtttgggcattttaataatttgttaaatatattaaatttcaaaaaaaatcctcttcactcccccctttttggtatgatatattatactaaatcaattatttttgaaatccaataaattaccagtggaatgatgcattgattcaatgggctccatgtattcttgccagaaacggatttctacaaaattgaaaacaaaaaacaatgattacgtcacaataattaaggacggcaaaaaataatagtgnaactgaacaatggtaaccaaacgaagatttagctatttttcagtggagctttccaccccgcccaaatcgaatattcgctcccctttcttacgtgctt

SEQ ID NO: 28817 - DNA, 1405 bp, Heterodera glycines
  unsure (1)..(1405): unsure at all n locations
gtttcctccatcgcttttcgtaattacgcggcttctctgctgcccgctcctcacgcggtttgggacactcagccccaattcaccaaagtgaggagcacattttatggcagaatttcaatttagtttttagattttcattaacaatgaatggcacaattctctcagtggcaaaacatttcccacttttgaccccacgacgagcaaaaaaattgctgacgttcaagagggagacaagtcggacattgatgctgccgtagaagtgagtgttccgttgagacattggcggaagagggcatttgaacattggtgtatcagaaagacccttttctgaatttaggcggcgtcgggtgcgtttcgacttggctctgagtggcgcagaatggacgccgcggcacgggggcgactgctgcacaaattggccgatttgatggaaagggacgccgtccatttggctgttcgtttcatttggtcattctccacaaacctattttaagagtttggaaactttggataacggaaagccctacaaagatgcgtttctggccgatgttccgctgtcaatcgctgtctatcgttattacgccggatgggcggacaaatgccatgggaaaaccattccaattgccggtgattatttctgctacacgcgacatgagccggtcggagttgtcgggcaaattgtaaggaggagacaaaccattattattatgaacatggcccaaatgttgcaatttgtcagtgggcactttaacggctaatttaccccaaattcgacaattaatgtgtattttcttgccttcgaccttcagatcccttggaactttcctcttctaatgcaagcgtggaaattggcccctgcccttgccttgggcaacacatgcgttcttaaacctgctgagcagaccccgttgacggcgctgtacgtagccgaactcatcagagaggttggggtttgtttgtgtgggtggtgtctcgctggggggaagtgtttttgatggggcctttcgctcttacttttattaaacagtttgaagtttgtgcccttcgcggggtcactctttcgtgactacccccccccccattttttctctaattccctcctttttccttttccagatcatttggtgcgctatatggaaagttaccatttttgaaaatttttctcacttttttttggtaaaatttttttttgtttatttacacataatgatgtatattaagcattaccatcacaattatggtgaatagaaagtatattcacaattttttatctcaaaaaaattttgcaaaacaaaagggtccccccttttgtttttgataaaattaaaaatctgtcactataactatcgccaaatttcttaatatgcccaaantaattgtcatatttatgatcagcgatctctaa

SEQ ID NO: 28818 - DNA, 1402 bp, Heterodera glycines
aatgcacggctggtgggtcagttaacggcaaaactaaattaaaaatcgccaaaaatatggcaccctaactaaattagtcaatcaaaataaaaggatccatgaatgaatgaatgaatgaatgaatgctccgctaatgaatcgctccacgaataacgcaattatgtattaactcttgcaaagggtcgacacgtaacaaaatatttgcgaacgaatggaggataaaagggcgttggctctgctctctgctgctgttgctctctccccctttccccccttttctccccttgcgtaatcacttgcgtctgtttgggttgggttggcttaggcgggggggggcggtgaccgactcggccgggtcggcccacgcgaccgcagccgatcgttgtttcttgcgggaaaaaatggcggggtggacagagaacataggaatatgtacaaatgatatgaatacagagaaaagtgtgccatcggggaaatttggagaaatggaaaaagggggggggagagggggaggggagggaagagggcggtgacccattggcatttggtgccctcctcctccttcttcttctcctcctttcccttctgttgctgtcggttcagttactcgccgatatcgatgaataaataaactttgctgacacagctcaaagggttaatcatttatataataatggatggataagagaataaagaagcagacgagaaaaaagaagtttatttccaaaacatatttaatgaaaataaatttaatggaaaaacgaaaaggaaggcaaagggtgaggaggggagaaagagcgagggacagtaacaccaagggcgtagccagacccttggctttgggggggggggggggctgaagtcaaaaattcgatttttagcggtgtattttggttttttgaaattccgaattatggggtgtatttacaaaatttttcgccgtttttcgccaaaaaattaatattttttgccattttggtctccatttttcaaatatgataaaatgggggtccggcggtgccgataggaaccgccgggaaaatttttgagaattttaatgcaattttgtaagaaattttgcggaaaatttttacttttgggtttcgggggggggggaggctttagccactttagccccccctggctacgcccttgccccttcctattatgagcgtaactggaaaagcgggatccccccgacgggttgaaccgactaaaatgaatttaaatttttacaaaaaatttactaaatcaaggaaatccatgccaagacggcactcacaactgtcacacttatgcgcgctgtcgtcccaccggaacgctctcttacacatgcgaatgtttggctggctacgaggacaaatcgccaccagtttggcattcgtctgcttaaatataaaca

SEQ ID NO: 28819 - DNA, 1162 bp, Heterodera glycines
  unsure (1)..(1162): unsure at all n locations
ctttttgattttgattnaattggcagtgaattcggcaaccatttttcctttcagcaacattcggatgggtcgacgaatgcaatgggtcatttcaagtgccaatttggcgatgaaaggcagaatttcactaaaaaaaccggcttgaaattccgattttgacccccaaaattcagttcattaccaaaattgttcccacaattttatataaacaaataaataaataagaataaaaataccacctcagcaatcggttgccgtaccatcccgtgtcaatcagtgctcggagagcggaaaaatccgttttcttccaaccaccgttttctgtcatcgcataggaaaggacgtgactctgaaaatgagttgtaagcttttgcttgcttttccctgaacaactaactcactgtgaagtcgtggaaagtcaacgagggaccagcagagacaatgccattgagagcaactgaataatcaaatatttattaaatttcaaacgaaataaaagtctgggaaatgggtagtttcctgttctgaaggcacacctcatttttttttaaattgcaacataatagacctatttttgaggcataaaagcaacaatttacgccaaaatttcctcaaatgcatcgacgttacgtcgcttacagtcctcgcaccaaagaaactctcataaatacgagtccaatatgttgccatctttaaaaaaaaagtggggtgtgccttcaaaacaggaaagtaccaaatgaaattgtaacatttgtaagttccttcgagtcagaatttaaaataaaatgaacccaaaaaaataaatttatttttttggcttcgcacttgcaattgcactccatcgcttctcgtcatagcagggcaatgtcacgtgaatggacgggttgaaaagctcggaaatgttagcgttggcggaagcgaatgcttttggcaccggaaactgttgttgtcgctgatcggcaccaaaaaaaggccaacggcagaggaagaaatcggaggaagtggcgcaatcgcgcaacggtggaggaccagcagaaacagacgaatgagaagaggctaatgactgatcatcagcggaaagggggataaaaggcagcatttggtgttgactgactagagcctaagaaatggcaaagaaatggacaaaattgggtactttacg

SEQ ID NO: 28820 - DNA, 1607 bp, Heterodera glycines
  unsure (1)..(1607): unsure at all n locations
atttccctcattcatcgcggtggtcatcaaaaaagcctaccacccggtaaacaaaaatgattggcatgatgaacaacgcctgcatggacggacccgcggagtttttcgcgggccgtcgcgatttgtgcgaattgcttgtgccggcctcgtcgttagcagcggtggacggccaagcgcagccccacgcgccaccgccgaaggtttttgagccgacgcagcagaaaaaactgagctacacgggcagtggccgacggttggtggacggaaagccagaagtgaacgaaacgccagaggaaatgtggcggaaagcgatgctcagggcaacctgcacaagagcagtgaaaggtggaggagaatagggggaaaagccaaaattagggggggggaatagggaaaaaaagccaaaagatgaaaattcagaaatgcttggtgagaaacgccgcaaaagctccaaactgagacaattgatcagcagccaaagcggatcaattcgaaacttttttggcacagccaaaaaccttcgccatcggaccaccggcgccaatcaaccgcagcaacaggttgaggccggtggcaaagtgatcagcagcagaacggaggggccgggaaagcccgatcggatgatcatctgatcagagtaaggagaggaggagaaagacagcgcaactgaaagccaatcagtgatcagtggagaaccaatcgccttcaccgaacaaccaaataacctcacatttctttcgcctttccctcaataataaactgaatacattctcattagatgggtgctgaatcactattttgacaaaatttattcaaaatttcgctcaaaattaaccaaattattaatccttgatattatttgaagccctaagtgttcactaaattgccttcaaaatttcataaacttttagaaaagttataaatcccaaaattatttgtgcttttgcaaaagttcttaatcaaaatattcatccgaaggccaaaaaggcaatgaaaaaaatcgcattttgaaaataatttaattattattaacagggcttccatttttatgtaagaaaaatcgcgaaatatgtaaataaaatatgtataaaaaatgctaaaatatgtatgaaatatgtataaaaatccagaaatatgtactaaaatatgtaaataaaattctttctaaagggtgaaataggcacgaattgtcataaaaatgacctaaatagacttagaatcaaatcatcttttagtatttaaaaaattaatttttgatatcccatttcaaaaaaaaaaatattttttttggagcacattttcacaaaaaattctataaattctcaaaatttttgaaaaaattgcgaaattttggatatttttgggggcatttaataaaaaattccttaaaaattctcaaaaaatgcaaaatatgtacgaaaaaatgcgaaaaagtccaaaatatgtataaaaatatgtacaaatgtaatatgtagaaaaatcccaaaatatgtaaataaaagtcccaacttttgttcgccaacacaaanaaagaaagtgtttttcccactatttagagcatggagaagcaggaaaaaaatatatatttacataaaaatgaaagccct

SEQ ID NO: 28821 - DNA, 1335 bp, Heterodera glycines
  unsure (1)..(1335): unsure at all n locations
ttcgcgattttatatccatattttgacagccctagttatggccattatttttggccagcagaccattttaatcttccttttcgcatccctttcaaatatataatgaggtcaaaaagactttttcattcataatacatatcgcaaaaatgaacagacggtgaggaattcttttgaaaaattaaattttcgtttacccaattttttcccatgtttcagttggatttgtgcggatgtttggatggacattctgccatcttttgaccatgcccaactcggcctcaaaatggcattgctttccgaccgtttcgatgttttggtggacacgcattttgatggcaaaagcgaattcacaatttggagagcaatcgaaattgaaaaggaggaagggccaaaaccgaaaatgtttatacgaatcgatggcagttttgtggattttccgttgtctgttcgtcagatgcccaacaaaatttgctttaagaacctttggattgagtcagtcttaacttttgtgtacgctaaagcatttttatctttcttcagctacattgaccattccgtgatcaaatttctccgctccaagaagcgattctttgacaaaagtggcaccaaattggaagtgtttgtggatgcatttgatacggatgtccaaccgatttgggatatttttttccgtgaaatttggcccatttttgcgacaaacattcggcatttggcctttcacggtgccgatgctttggacaatttgcgtcgtcgcacatcgccgacacttctcactgatcttgttcaattgtattcaattacttcctatgaactgtgccccgatggaatttctgacgatgggccaaaagcaactgctggccaagcgttgtccaaatggttgcacacaaagagcaaaaatggaaaagcgaatgaattgtattgctgtgcttatttttgtgaaataacatggatcaacactttcaacgaggtgatcgagactacttaattgttcattaaacgattgactaattattgattgattgcatttgattcgtgaccggaaaatcggtcagtggaaaatgcgtcagtgatacaaatattttaaaataaatttctatggcattagtattgtaatataggactaaacttctataagaaaatcgttctcaatttccaaccccggacccgaactcgaacaaaaaatcgaaaagtcaaaatttcgaaattagattttttcttaaaaatcngtttaatacacgaaaacaaactataaagcatcaatactgcataagagatcatttatgctgtttttgaccaaaaatgctaattaaaaaaatttgtactttcaagtttttt

SEQ ID NO: 28822 - DNA, 964 bp, Heterodera glycines
  unsure (1)..(964): unsure at all n locations
atcgatcacaatcatcatttatcttcttcatatattatcagggcatcatcttcaaacatcattaattaggcacacttccgacactttattcggctgttcgttcattcattttcgctccctcttccccccccccccccgcccatataaaccttttntagcacaaaaaattcctcctcccaccgatctgaaaccaacttttgatcattcattccccttccccacgttccatcgccacataaaattgtaaacgcccataaaaccgttcttcttccatttcctccctcccccttttttctgtccatctcttcaaacatcagccgagtcgacaggacagcagcagagcagtccgtcattgactgatcactatcaatgctgctggcgactgatctccgtgccccatgcaccgatcagatcactcacaaactctcagccgtctctctctctctctctccccccttaactgtcctatcagtcagtctgtcggcagcagtcgtcgtcgtcgtgtcattgcaagtgttgtggtgtcatgtcataatcaccataatgatcatattatcactatcgtcttgcccccccccggcgcacatccgccgccgtaggcattctttagagcagtcagcagccgaacgctttccgttcgttcgtccatccatcacccgtgtggctgtgctgcggcgccggcagagcaccaacaaccagcggcgcaagcagtaaaaacgcagtcagcgccatcgccgattcccccccccccttttagcgttttcaattaacgcgtcgttttcgtttcgtcgtccgccgtcgtttgttgttctcctcctccattcactccttctctaattcccaaaatgttgtggtggtggtgttcgtcgtcgtcgttcttatccgccgcccgttcatttggctttttgtcacccataagcggataagagaggggggggggagaggataagaggggggggggggg

SEQ ID NO: 28823 - DNA, 1372 bp, Heterodera glycines
gaattttttttataattaaattaatagagagcaaaaaagcacgatgtataattattcaaaaaaatttatctatgcatttgttgaacgtttctaaacccgatggaatttttttaaacctttataggaaaacatttattgcaggaaatgacaaattccaccctgggggagcacacatttcagataagcttcctatcattatttcttagaaacaactaataatctgttgaccggttatttcaaaataaatcgaaatatattagcttattatgcatcttcagtgtgcattctaaaataaaatcatttttttgttctaattttatgatttatttgttttctgttgactaaatagtcagttcttatagcaaatattaatttatatttgcgtagcttcaaatgagcattctgccttcaatttcgaagggaagtgaatttttttataataaattgatagagagcaaaaagcacgattgtataatattcaaaaaatttatctatgcatttgttgaacgtttctaaacccgatcgaattttttaaacctttatatgaaaacatttattgcaggaaatgacaaattaacctgggtgagcacacatttcagataagcttcctatcattatttcttagaaacaactaataatctgttgaacagttatttcaaaataaattcgaatatattagcttattatgcatcttcagtttgcattctaaaataaaatcattttttgttctaattttatgatttatttgttttctgttgactaaatagtcagttcttatagcaaatattaatttatatttgcgtagcttcaaatgagcattctgccttcaatttcgaagggaagtgaatttttttataataaattgatagagagcaaaaagcacaattgtataatattcaaaaaatttatctatgcatttgttgaacgtttctaaacccgatcaaattttttaaacctttatatggaaacatttattgcaggaaatgacaaattccaacctgggtgagcacacatttcagataagcttcctatcattatttcttagaaacaactaataatctgttgaacagttatttcaaaataaattcgaatatattagcttattatgcatcttcagtttgcattctaaaataaaatcattttttgttctaattttatgatttatttgttttctgttgactaaatagtcagttcttatagcaaatattaatttatgtttgcgtagcttcaatgagcattctgcctttcatttcgaagggaagtgaattttgtttatataaattgatagagagcaaaatgcacaattgtataatattcaaaaaaattatctatgcattttgttgaatggtcctaaaccccgatccaatttttt

SEQ ID NO: 28824 - DNA, 1159 bp, Heterodera glycines
  unsure (1)..(1159): unsure at all n locations
ggttttatccctatattttgaataaaacaaattcattcctcctaggtgtanttattttttgagtttattnttagngccttcttagagttatttgtataaaattaaaattttttatttataaggtaagaattgttttatgcaattgattttatctataaagattatgtcatattgtgtatttttatatttatatttaatatatatttaataatgtttttagtatctgactacatttcaacaatactctaaatcgaatttttcctgtaataatatttggtggatagctatataatattattttcatttattttattatttaatttttattgattatgtattcaatccaaaatataatttacaaaaattttcatgcaaagaaatataattaacttttattatatttattttctttattaccttatatattttttaatttatattattaaataaatttcttttttattcttataaactttgaataaaaaatgaagttgttttcagggcacttctggaaactgagttttcacaatttataatcttttaaaagattatattttaacatattatctattttttataacagattttcattaggttttctcatcaaaaatttattctgctattttaaaatttaagttttttcgaattatttttatatttttaaattatttttctttatttaaaatgccttttttatttattactcatttaatattgtaattataattttttttatataaatatttttacattatataataatattattgtatggctgtgttggcgtcaaagtgataagtttattaaaaatttggaaaagaattttttatctgtaaaataatgaagataaaataattacacttaataaaaattttatgcaaaagttctgttttaataattaattttgtttttcaaagcttaatttttcctcgtcatataggcggtatatttcattatattcaggggataaaaaatgcaaatttggcgaccgacgaaaagtgataaatttgctaaatttttgaataattcaactcataacttttcgcagacgcaaccaaattgcacaatcttgctatcataagatagcccttgaattgctatattaatttgctaaatttcaaaattttattaagtttttcaaaagttatcataaatgaaa

SEQ ID NO: 28825 - DNA, 967 bp, Heterodera glycines
caccgatcaaactattactagaaatcgtacataatcggtacaatttgatcaattagtctaatgatctcagatcgtaaaagcgatacattggaagattaaattgtcatcttgcgttagatagatcagcaagattgggcaataatcagcgaaattgttgatgattggtgtctttccctaatattagacaaattaactaacaaataaatgttttaaatgagaatcgtcaaatgaatccttttagtgatcatcaagcagttgatcttttgggttcctcaagcaaatcagttcattattttatgaagctaatcacttcgaattcattcggtcccaaattctgcagaaatgccagccggcctccctccgccttgttgacaaccaacagttccaaatgggccaagcaatgcgcgtcgaatctgcttccctttggtacacttttgagcgtcagttggcccgtctgtacgtgacacggtggaagggctttcgagtcagtcgttccgaaaaatgccattttttattacgcaataaataaaattcattggtgccgaaatgcccgagggggtgcgatcttagctttctctatcctggtcaaatcgtttctttctttgtattttttttgctgtcagattgaccaaatggtggccgtcacttgtgtgttcgagggcaccgccgaggaagtggaaaggcagcagaaggcactgataaaattggctgatctgttcggcggaatggacgccggcgaggaaaatggactctatgtacggacgccattctttccacttgctaacaagatcttttaatccaaccgaaccgaattggcaaaaaatcaagacgctcacaatcagtttggttcgctgcggcgctcgagattctcgagtcccggctttaatccacgttttgtttccctgaatccgctttgtctgttcccctccggaagttgccctgcttttagggatatcgactcactttt

SEQ ID NO: 28826 - DNA, 1563 bp, Heterodera glycines
ggggccgaaacaacaagcagtaccacctcctcaaccgccaccgtcgaccgccaccgtttccgtttatcagacagtggtcgaattacttgccgccatgccacggtgtcccataggcactttggcatttgccatttccacccaacaactgtttttgcgtgttcactccggatggcaacaagtgctggtgagtttctgtcggattgaaagcaccggttattgattgatcgggtaagggctttttgattggtcggaccgatcggctgaataactgatcaatgcacttcatcaaatatatgatcaatttaattgctttgtcttggtcaagttggacccaaatgtgctgactgatcatcgtccggtggtgccgtcgccccctcggctccttccgcccgcttcgtccctttcccatcgtccgtcttcggtaattgtcgtcccatcattttccatttgcttcatttgtcccatttccgttaacatttccttcgttttgcttttccttttcctcttaatgctttccgtccttttccgcttttccccattcgttcgcttaagcatcattccgttccgctgatgccttccgccgactccgagctcagtcggctggcttattgggtgggttatggcacttcgcactgcaaattccctttcccccaccgcttttcccccattaaccctttgatccttcccccaaaagttggcgttggatgagccgagcggtgcgcgagacgatgaagagagtgtggcgggagaggaggacgaggaacaaaaagaggagggagagagtgtgggagagagagggggagagggcgtaagtgacgggagagaagggccgtgtaggaagcggagctcagttagcgcttcttttcttctttttttttgctagtgatactcgggaacggactctcgacaaaagcggagggattctcgagactcgggactgaaattgccccccccccccgagacgaccctttttcgagaatgagttccttcccgagtatcactattttccttttcgtttgcgcttttcttttcttttttaaattaatttttggaccaaatttaattcaaaaattaattaattaacaaattcaatgctttttaactgcaaaatgcttttcaaaatgcccattaaaatttgctctcagttcgccccaattggccgtcctccgccgcccaccgcccctccggcgccgcacagccgaagcattgcgcagcagcaggcacagccgtggcgcattgcgccagaacatttgtcgcccaaggaatggaaagtgccgcgcgaggaagagacggaaaagacatcgatcagacacaaagacaaagtggtgagtcattggggggatggtgggtgagaggtgagagaggagaagggagagagagagagaaagagtgggtgattaggagagagagaaagggggagaggagaggatacagacaggaggagagagagagagagaaagagtgtgtaaagagagtgattaagagaggaagagagagagtcagaagtcagagagatagagggaggggggagggagagaatttttgggacattttggcaatatt

SEQ ID NO: 28827 - DNA, 882 bp, Heterodera glycines
  unsure (1)..(882): unsure at all n locations
ctcttttacaaattttaatatccgtcccaatgatgccttcttgaaagccaattccaatgacccagggcattgttcggagtgaccgacactcactcgcgattttccatttccttttcttgcatttccactcaatttacgagcagccattttttgtgtcaatatgtgatggaaacgcaacaaagtaaaattataatgttactttttcagttattagcgcctgttttctagatttttattttgaagcctaaaaactttaaaaaaaattttgaaaactatattttggcgtttttaaagtttatttaaaaatgcaataaaaataattcacccttgaaaatcgaccccaaaaaattcttctgcaaaattaagtgaaaaatcctcaaaaattattttttagatttaattcttaaatatgagtagtcagcaacaacagttggatgtgcttattgtcatagatggtaccaacattgataagccttgtgtattttttgatcttttcaaatttcaacatttaacttatttaatttaaaggttgatattttttcgagttctggctttgttgcttcttgtctcaattgggtttcaaagcttcattctcctaatgtaattgttgcgttatccaatcaaccgaatgatgtagcagccgaacttttaaagtcggtttatataaatgaaataaaaaatgtttcaataacttacagaaaatgggcttctaaattcaagcagcttcaggtactacttttattttanatttattaaatgttctanatgaacttaattttgcaggcatttggtgtttcaattgccaatctttnaacgatngtcttcgtgaaagtgattttcgacaaatcttagaaatgatttcatgctcatacaanatttagc

SEQ ID NO: 28828 - DNA, 1117 bp, Heterodera glycines
ggccgcttcgcgaccgttttttaaatttgtttgggccagacgggcgcttcgcgcccgttttttaagttagggctagacgggcgcttcgcgcccgttttttaatttggtgatttttaggccgctcgcggcctcgtacgggcgcttcgtgcccgttttttaaatttagttggggccagacaggcgcttcgcgcccgtttttcaaatttttttgggctcggacggacgcttcgcgatcgttttttaaatttgtttgggccagacgggcgcttcgcgcccgttttttaggggtacaacagtgattagaagaggtgcaacagtgattagtaaattcattaaattaaaatgaaaatttttttaacaaattgaattaagaaaatacatgaaatactatcaattaaaaaaataattaatttaaacttttaaaatttattcatcaaaaaaaaattaatttgaatataattttttatttattaactcaacaaaatattttaatttaattaaaatcattgaaaataacgtaaaaatgcacagaaaaataatatacaccgtccggattcgaacctgccgccccccccccgtcagaacatgtcccagaatccccaatcacacagggattctgaggtcttgacgatgtcaaaagtaaaatctgatcacgtattcgtgatcagcggcccaaataacgactaaagacatgtttttggaagattttgggtgaaaaaatttttacactcaaaaatcctgtccaccccctttggtcccgaagcacaaaatcacttttatttttatatcttttttgaaagaagtgataaaaataccaaataaaatttatataatagagcaaaaaattgcggatttttgtagtattttacttttcccgaatagcttttcagaaggcagctacgaatttttttctgaaaaatcgaaaatttccagaaattctggaataacttttttcttttttgtgataacaaactcatataaatcccataaaattctctttatttttctctatttttacagctttattatagttaaatcgatgaaaccatcaccgagctatgaatattccaatattaggtcaaaatcccgaggaccaaaaaaattaaaaatattttca

SEQ ID NO: 28829 - DNA, 1208 bp, Heterodera glycines
aattataatgaatgaaaatgactctttagcaattcaaaccgattttgcgggatgattttttcggtagcagcaaaaaagagaaaactaatggaaattccattgatggaaaaagagataaaaaaattcgatgacaagatattttgaatgaaaaattgaaagtataaaagaacagtaatgtgttaatggactaactttatttaattttgtattccgtacataatttctttacaatattcaaaaagactttcctgcgcgcattttcaaaattatcttcaaaaaatcaaaaatcaatttgttcagataaaatttcaacgaattttcccattttctccgtcacggcatcggcagattcattcttttttataagggtaatggagtcaattttcaaattattttttagcatcagtcgtgaaaacttgtattttaaattcatctaagccaaacaaattaatgaaaaaaatgtaataaccaaaaaaaaaagaatgattgcccctgatcagaaatttgttttttaatttaattatgaatgtttaaattatggccatgacggcacaatgtcctacatatttgttcatagattaaaattttttgacttaattataaattttttcacagtttctttttatatttataaacaaaatttttaaataaatttaaatttcaaaagaaaaaagaattgatcaaacggtgccgccgagaatggcctgataattttttctaattaatgaaattttaccatttcaataaaaaattccgtctttgtgaacagagttgacccattattcgtgaaaactctactgtttgtttaaatttgaaattaatttttctgacttttttaaacaattattttttacaaaactacgtcttcttaaacaacgaaaattctaatttatttagcttctaagttgaaaaaatttctgagttcacttgaaccatttaatttgggtaacaagccgatattcaccaagcatattcctttttatttaatagttggagtcaatcttattcgtcctgctgctgtccgacattttcacttggatttgttcaaatggatgatgaataataattgaaatcagtcattcgttaaatgcaaattcaatcattttagcaaaatgaatagtctagaattatataactgattaaaaaaatttttaatttcaaaaattaaacatttaaattattcccatctttatttaaaacattcatat

SEQ ID NO: 28830 - DNA, 1712 bp, Heterodera glycines
tttgaaggccataaatccggatttgaaggattcgtaaaaattctcaagcaatatcacttgtcaaaagctatgaaaaaaaaggaaataaagacacatctacatgaacaacttatgcataaaggcatacagatttctatatgcactttgaaacgctacctgcataagataaaaattgtttttgcgcccacaaaagataatgttgattcatcacctaagcttgaagtggaaaaatgcttctccaaaaagctgactaacactatttatataattggaaatggatcaaattggagaaaatccgcgctcttttcgcgattttttgctgctttccgttgaagaattttccccaaaaaattttaaaaatgttaaaattattcactgtaattttaaattattaaaaaataatttaaatttaatctattttaattgaataataattattttaattaattattatcattgatacttttttaggatcgccccattgatacttttttaggatcgccccattgatacttttttaggatcgccccattgatacttttttaggatcgcccacattgttaatttaaaatatcgtttaaatataaatgatagttataaaaaatattttttaaatgccttttataattttaattatttggtgctgaaatatttgtcgccgagacggactacaaatcaaaactaatacaaataatcaacaaaaccatgtgtgctttacttaattgaatcgtagatattattattaaaacattaatttttatatcaactgaaatatataataaaaatttatgtgatttttcttttcacaacaacgaaaaaaaatgcaaaaaagaataattttataattaaaatataattatataattgtttatgaatgattaaatctaaataaataaaggttgttttcaaaaatctgttctatcctaatgatattgcatatttattgataagctgcgcgccgcaagcaagctcatggaccatttgaacatgagacgaaaatagactcaaataaaaacaaatttaatttattcagatttatattcgaattactttaactaaatattttaaaaaaattttctttacaattttattttgtaaatttcgaatttgaaatagcttagttcattaatttgattacaaatattcaaaaaaatggaaaaattaaaaaaaatcgcaaattaaaaaaaaattattaaatttgtttaatttttctaatataatagagatttaatgcaattatgcatttgctcttggtctgactctgcttgtaggatagccttttattattgattttgatatatgatttaatttttattaatcatttgatttttttatgattgtttgtgtcaatcaaagaactatttaaagaaattaaaatatgtaattagtttattaatcatttatattttaattatttttctcaataaataaatttactgacttaatttataatttttttttattgcaaatataaatatattttttaaactcttgacgaaaaacatcttttctgccatttttccaccgagagcaattcgttaccgtcccattagatatataaattaaattactgatttaatactttattttttattataaatattaatatttttaattcttttctacattcatgttatttaagtggtgaaatgatttgtggaatttaataatttagaaaattacatttatgtaagtgaagaaatattgaccta

SEQ ID NO: 28831 - DNA, 970 bp, Heterodera glycines
  unsure (1)..(970): unsure at all n locations
acaaaaacaaaaaaaatgtgaattggaaatgaaatgccgagatttttcggacaaatttaaattgggcaatttaatgtttgactgttcgaagatgagacttcgaaattttcagtccaaactgaacttgattgccttttttgggaggaggtggggacagaaattcaagaactgattaattctggatgagaccagattaatcagacctccccttggaaaaaaaattgaacccgcctgtgcacaataggtcgccagttgtccggagcacgtcttggtaaatggggttggccggcgcgctgagacgtgcaccaagacagtgcactcaattggtcctcgatgcgtcaattgtccgatgcgtccaatgtccaattcgatgcgtccaatgtccgaattcgatgcgtccaatgtccaaattgttcggctcgtccaatttgcaatttgttcggctcgtccaatttccaatttgttcggctcgtccaatttgcaatttgttcggctcgtccaatttccaatttgttcggctcgtccaatttgcaatttgttctgcgcgtccaattcccaatttgtccaatgcgttcaatttgcaatttggtctgtgcgtccaatttccaatttgccaatgcgtccaatttgcaatttggtctgcgcgtccaattcccaatttgtccaatgcgttcaatttgcaatttggtctgtgcgtccaatttccaatttgccaatgcgtccaatttgcaatttggtctgcgcgtccaatgtccgatttgcgcgatttgtctttgtccaattgtcggcgtcaatttgtccaatgtttcccgattgtccggcgcaatggttgtccgtgtcaattggtcgcagtggtcgaattgagtcaaattcccttggtgaggtgagaatgtgatttgacgaaatgagtgaaaatcaaatgcncataattngnntaatgggtttccgctcttttcaaaagtttgtgatt

SEQ ID NO: 28832 - DNA, 1245 bp, Heterodera glycines
tgctgtttgcatatggtaacaaagcaaatattaaatacgctctcaagtaccctttcaaagggccaggacattgttatgtcgagtgcaaagaagagtccggcaataaaattggaattgatgagccggctcaatatgccaagatgaacttccgtggtgcaacggaagcatatgccattgttcattcaatgccatttgccaaactttcacatcaggttgtcaaacttagcatccatatgcctaatcaacaaccgattgtgtacagggcttttcagctggtgagcaaagctcaacaaatccagcaaggcgaactgccagagacgcaatgttctgcctattggaaacaatggcaaaatgaatggaagcatgatccgaagctcaaagatatgctttttgaaaaagtccctgagcattttatatgggcaaaggacaaatggaacaaaaggaaatataacctaacaaagagaccaccaatcggtcgaattgttcctgtacccccatcggacccggaaaggttcgcgctctattcacttatgcgtcactttcctggagacccagaccatcttaagatggttaatgggttgctttgtacctcattcactgaggctgcaataatgcatggtcttcttgaagacgacaaaatttgggacaaaactctggcggaggcagctctatcgcgctggcctgatcaaatgaggtggctcttcatgagcatcctcgtttatggccggcccagtaatgccgtcgaattatggaacaagtacaaagaccaaatgtactttcctcaaggcattaccacaccggcacaacgccaagcagcagagcttgaagccctagctgacattgattggcggctgcacagctgctttaacttaagctgtgcattttagcctgccagacccgccaaactcaattgccaaaaatacaaatgcggcaattgatgaatttttctttggcgatgatgatttgaatttgccgcctggccaaccaaatcctcggcctcagcaaatcactcctccgccactcaacagcgaccaacaaacggtctttgatgctgttgttaaggctattcagtcggacccaagggattcgactgtcccccgccgtttcttcatatacggcgatggaggcacaggaaagacattcctgtttggccaaattattaggcgcttgcgaaaggccccatacacctacaaagtgcttgctacggcatccactgggtgtgcagccattttgctgccatatggg

SEQ ID NO: 28833 - DNA, 1459 bp, Heterodera glycines
  unsure (1)..(1459): unsure at all n locations
aaagaggccaaacggacgcacagcgacctcaaatcaaaaaggcgaaaccgccccaaaaaaaaaacgtgtccctaagatgggcgttcctcttttaataacccttctcaatcatntagcagatgtttctgtaattagtaacagttaattgcctttgtctaatccttttgccattcatttggctttgaatgctttccttttgtcccccctttttttgctcgtcggttgttcagcgttatttctaagaataaaggtgaaaattaagtcctttcttaggcttcacttcgttaagctgggcagaaatccataatttgctatttaatgttttttttcgttggcgaaatgttttatttattgttttcagcgattggcccttttctcacgcaaacgttcgatgctttttgttggtcctggggaactttgtccgattcccggccccgcctcaacgaaaagcggacacatggccaaaggaaggaaagcgaagtcggcccagaaccaaccatcgaattgagctaatagaataaccaaattctgatgcaattttgatttgtgcctaatgaatgtttttacccttttcataaaataggttaacgataaatgagcttaattatctaaaggattttattattaagattaattaattaattattgtacaatgacaatgtccttcttccattgtcaaattgcctttagtttatcaataataattgacaaatgtttcattccccgtgatttttttcatcccatgacccatccaaaagcaaataaaattgaaagtgtgacgttatttggacgggggatgaaatttcaaattaaaattaatcaactgatgactgaaaaaagtaaggagagaaaaagaacgtccaattgggagttaattaccattgtattgaattaactaattattggcaattaatagttggtcctttccccaaaatgaggatgattcttctaactaaaaattcggacatcttaaggactgtactgatatgaagttcaattgcaatcgaaaaactcaccaaacttttgcatttgaccatgaggtgaataaatattcaggcaaatctctcggaaagtgagtcgcgcacacgaagagcagcgcaaagtgcaggtcgtttcggcacaagtgcacacaccgttctgaaggcacacagtctcaatgacctaattgggatggggatgatcagctgatcatgatgagaatatgatcacatcggccgaaggctgtctgcttcggtccaacaccatcatttgcatgaaagaattccgcgaattcggagagccctgaagggatttgggaagaaagaactttgtgtttcattacactcaaaattggcaaaatgttagaccggcgaatgcgcagaatcgagtcgcgtcagaaatgacttcgcgtgnggtccagatgaagcaaattgtccattttggtcggcttcccctccgaaccatccccccgttgatgctg

SEQ ID NO: 28834 - DNA, 956 bp, Heterodera glycines
tactacacatctacataattgtacacaaaatgccaaaaaaggatggcattttcgttgtacgttataggatagaaagagagagagagagagagagcttttgcaaactttaaaatcactgtatttggcattctgtatacagtatgtattttatagtgtttacgatctttgtgggtcttcaaaatcgctgctcccattcccttttttggcattctgttcagtatgtttttgtgtgtgtgtgtgtgttgtgggcttttgccattttaatcaaatccaaaaagaagacactttctctctacatattaaaattttttgtatatttttgagaaattaaagaaaaatttgaaaatttagctcttttgaaaaccatttaaaccagaaacgtaattcttcacaaaaaaacgaacaaacaaataatgtctgacaacaaagaagaactcgtccaacgggctaagctggctgaacaagctgagcgctacgatgacatggctcagtcgatgaaaaaagtcggaaaaaaacgaaaatttcgatgaatttttctccgttgaaggttacggaattgggcgccgagttgagcaatgaggagcgcaacctgttgtccgttgcgtacaaaaatgtggtcggcgcgcgccgctcctcgtggcgcgtcatctcgtccattgaacagaagacggagggctcggagaagaagcagcagatggccaaggagtacagggagaaggtggagcaggagttgcgcgagatctgtcacgacgtgctggtgtgttgaacaataaatcgaattttttggaaattttggacctaacttccgccaatttttttcaggatttgctcgacaaattcctgatcccaaaggctggcaacccggaatccaaggtgttctacctgaagatgaagggtgactactaccgctacctggccgaggtggccaccggtgacgaccgcaacggtgcgtgtgt

SEQ ID NO: 28835 - DNA, 1657 bp, Heterodera glycines
ttttcctttcagtatccctgcaaagtttggggcgcttctgataagtttctgaaaaaaagttaagcctaaactttttggcctgtttaaaaaggaattaaaaatttttaaaaattttattcatctccctttttgatagaaaaagcatcagagtgcctaaactaacatgtaaataaaatttggtgcgtttcagaaccctttctgaaaaaatatttaagaattaattttgcaaaaaataaataaaaacgaaagactcagattttcgaaaatttttttgagccagctagctcggcgctcatttcagtgtaagttagtcctttaccggggagtatccctgcaaagtttggtacgcttctgctcaattagcaaaaaatatgagtgatcgaattttcactaaaaaagttaagcctacattttttggcatatttaaaaagcaattaaaaaattttttaaatgagaattcatgcgagattttctggaaataagcttaatagggccttgttaagctgtaaaaaaaaatttggggcgatttgaaagagaatagaaagaaccaggttcgatgaagttttggtaagccaaaaaaaatccaaacatttaaaaatctataaaaaatttaaaaatgagaattcatgcgagattttctgaagcttaatagggcctagttaagctgtaaaaaaaatttggggcgatttgaaagagaatagaaagaaccaggttcgatgaagttttggtaagccaaaaaaaatccaaacatttaaaaatctataaaaaatttaaaaatgagaattcatgcgagattttctggaaataagcttaatagggcctagttaagctgtaaaaaaaatttggggcgatttgaaagagaatagaaagaaccaggttcgatgaagttttggtaagccaaaaaaaatgcaaacatttaaaaatctataaaaaatttaaaaatgagaattcatgcgagatttccggaaataagcttaataggtcctagttaagctgtaaaaaaaatttggggcgatttgaaagagaatagaaagaaccaggttcgatgaagttttggtaagccaaaaaaaatccaaacatttaaaaatctataaaaaatttaaaaatgagaattcatgcgagattttctggaaataagcttaatagggcctagttaagctgtaaaaaaaatttggggcgatttgaaagagaatagaaagaaccaggttcgatgaagttttggtaagccaaaaaaaatccaaacatttaaaaatctattaaaaaaataaaatagtgaagttttaaaaattaataaaaatttttaaattaagagttactggcgttagcatcatagcggtgcttttccttgtctttttgatgcccttgcaaaatctggtgcgcttctgatcagtttaattaaaaaaagttaagcctaaactttttggcatgtttaaaaagagccaggttcgatgaagttttggtaagccaaaaaaaaatccaaacatttaaaaatctataaaaaatttaaaaatgagaattcatgcgagattttctggaaataagcttaatagggcctagttaagctgtaaaaaaaatttggggcgatttgaaagagaatagaaagaaccaggttcgatgaagttttggtaagccaaaaaaaatccaaacatttaaaaat

SEQ ID NO: 28836 - DNA, 1993 bp, Heterodera glycines
  unsure (1)..(1993): unsure at all n locations
agaatttatgtaaaaaataataattatcttttaataaacaatttcatattttttttaattgaatttataaaaattaatttcatattaatttaaatattcaattattgtacatttcaaaattctctttttaattaataaaaggaataattaatttattttttaaaatttataataaattgcattcaatttttgtacctcttctaatcaatcacagttgtacctcttctaatcacttttgtacctcttctaacaattttgtacctcttctaatgactgttgtacctcttctaatcactgttgtacctcttctaatcacttttgtacctcttctaacaattttgtacctcttctaatgactgttgttcctcttctaatcactgttgtacctcttctaacaattttgtacctcttctaatgactgttgtaccacttctaatcactgttgtacctcttctaatcactttgctaatcgctgttgtacctcaaaatttaaaaaacgggcgcgaaacacccgtatgagttcaacgaatttaaaaaacgggcgcgaagcgcccgttcaaggctaacaaaaattgaaaaaccgggcgaagcgcccgactgaggccgcgaagcggcctaacaagctaaaaaacgggcgcgaagctcccgtctgaggccgcgaagcggccttaatagcccaacaattttataanacgggcgcgaagcgcccgtataagcccaacaaatttaaaaaaacgggcgcgaagcgcccgttcgaggccgcgaagcggcctaaaagtcccagataattttttaaaaattcaaaatctccacaaccatagcttatctaggtagcgaagctcccaaagcgcgaagcgctttttcccagctaaatagccgacggttcacgcacccgctagttactatatatgttatattgacaaggagtttcgttgctaaaaccattttctcccggccgaaggccgggagcgccctgaaagtagtggaagggtcttacaactttttgaggcgcatccgggaaaactatagaaaaaaattcagcgcggacgactgagtcccagggacggatttctcactttttcttgcagtttttcttctacgaaattttttctttggaccgggatcgcttagctcttgctggtaggattttaagtcagactatccccgacaactttgccagcaaaacctaagccctacgttgggcgcccaaggctgtagccttggctaattttttttacccaaaagtgtacacttcagtatcaggcgaataactcgccaggggttgctttgaacgaaaaattgtttctgagcaaaaatgtatagtatttgaaaggctatccaaccaagttttaaaatttcgaaaattttcaaaatttttcgagctaggcctaaaaaacggttttcgggtttttgaattttaagattttttaacgatttttcccgggaaaacggagaccacttccaaaacatcgtttttcgagctctatcgactggtattttttccggaaaaatttcgattttttccaggaaatagaaaaaatttttggcctgagcgggacatttgagtcccgggtccataactcgttaggagttggttttatcgaaaaaactccttagggcaaaattgtagagtggggtaagctctatataatggtatactatatgaagggaaattttcaaaaattttcgagctaggccccctagaaattttcaaaaattttttttgggttgaaaaagagggtttaataaataaaaaattatatttaatttaatttttttttgataaataaattttataagtttaaattaattatttttttgattgatagaatttcatgtattttttaaattaaatttgttaaaaatattttcattttaatttaatgaatttactaatcactgttgtatcaatttatatttaaagatttgttgtaaattaataataaaagaatttaaaggaaaaataacaattatcttttaatattgtgcctct

SEQ ID NO: 28837 - DNA, 998 bp, Heterodera glycines
cttttgactatcggaccggaatcattggccgggcatttcgaagggaaaactttcagtcggcacattctttcattttgtcctcaaattgtccatcgaagcatcgcagtaaattcggcagcagtgattccctctctcgcatcagcataaatctgcacaacaccaacaaaaacaaacgctttgcccccgatgcattcatcctcccctttttcatcctcccccatttcttcttccattcccttttcttcctcctctttttcgtcttcctcctcctcccattgttcgttcccttccatttcctccccttcgtcccgtccttctttttcttgcgcttcactttttcccacaaattcggcccaaaatgtctctgatcagtcccaactgaatcatcaacatcagcgggaacaagaagaagaagaacaagaacagctcattcgactgctgacagtcacttccgactcttctgccgatggccaaaaagagaagcaaaaggaaaaacgaacgcaaattccaagcaaaggttggaggaatttaaaaggaaaacggaaaggcaaaattataacgaaatgatgccattggcaggcaaattaatcaccgctttgatcgctaacactcgccggtgccgctcccgccaaagtcagttgggttaactctcaatggccattcgaaatttgtggaatgttgatgctaatttaagcacatcagaaccaaatgacgcagttcagcgcgagctttttagccgggcaaaacgaacaaaaattaaaagaaaatgagaaaacgaacagcacaagaaaaagaaaacgagaggaaaaggagggagaggaagaaagggagggacagaaaggagacgaagagtttgagagagaagaggaggaaggtaataaagagagagagaaaagggaggagagagagagggggaggagagagaggaagagaagggggaggagagagaggcgggagagagatagaaagatgagagagaggagggaaatgggagggag

SEQ ID NO: 28838 - DNA, 1496 bp, Heterodera glycines
ctttatttttctactaatgatttagcaaattttaaaattaaaattgttcaccaaaattcctccttccatttggcagtcgattagataacagatcaactcagcgataaggtcgcaatccacggagtcttcccattggcggccaccagcatccaaataagtctaaaattatctactttttatgagttggatgtaaaaatcaagctaacttcgatcaaagcgtctttcgtaatgcatttgttcaacacttcgcgcacgcgtcgcacataggtgggcaagaaatgcatgggacggtctctcaacagagcactcaatttttgattaattcccttaaagttttctcttcaaataattgggaaacaaatgcaaaaatacaggctctgctgaaaatgcactgcaatcattccacaaaaagaagccgtccaaagaggcggcggcagcggtcggtgaaacgaaagggtccggcggaaccatttgaagttgggggtgtgtggtggggaagcattggccggaggggaaagaagtgaagccccagggagaattggaaaaagagccaaaacattgtggccgaggttgggaagaagcggcgaatgcgttgacgggcacagcggaaggaaacagaggaggcggaggggcagggaaattctgctaaattggaaaatattaaaaaaaacaaattaccaaagccaaacgcaccgtcatggatcgctcgtcaaacattccgccgtagtgggaactcggcatataaccggtcatggcaagcatttcagccaaatgatacacttccacggaaaacaattgagtaggcactgcaaaaacaaaacgattgaaaaggatgtgcccaaaaatagaaaattcctaaaaaataaccatcgacgcatttgatgcccgtctcgcgaaagtatcgcatgaatttgttccgattgtcgcccattgtggccgacatcagcacgactttcaggtccttccgttttttcagcgcttcgcgaagtgcaatcaaaagatagtccgtgttcgtctcgcgctcgtggacttcgtcctgaatttttgtggtcagcattttccatgtttaaaaattcccattagtttcagcaaaacctcacaagaatgacgtgggtggcttctgtggccaattcgtcattagtcaatttgcgcaacaaaacgccacttgtgcaataagtcaaaagggtttcggcggagcaactaaatttataattatttcaaaaataaatgtctttaggatcaaaaaactgttttaaaattagggacaaaaatcgcagaattccattgaaaaactgaaactaagccaatgtcagaggccatactttgactcaagccgaatgtgatagccaacggtggcaccgaaacgctcgccacgttcgctggccacgcgtcttgctatggcaattgccggcagacggcgcggctgagtgcaaaaaatgcgtgtcggacgccactaaagggaggcattatccagcagaaattggggaacctgaaga

SEQ ID NO: 28839 - DNA, 893 bp, Heterodera glycines
cagcttgctgcctgcggtcgccacacccttcaccgcatcatcgccataatacacaccgtttcccccccccaaatgttcggtttgtccgtcgtcccccccccccctccccctcttcccgaggtttcctcatgaaacagaggcatcggaagtgctatccctccccctccccactttcttcgaccgtcgcttttccctcgcgccgctctctctgctaacaataagcactatctctcccctcagtcctccccccccccctccttctcccgtccattgaaaccaaaccgtctgaagcggcggcgaatgatcgctccgtccgatcattcccttcgctaccgcacctcttttatcatttttgggattccgtttttcaattctgtgtggtatgggcagaatgattaatcaaaattcacttaattgccctcttttggcgataattttcccattgaaaattgaatgtccgattctttaacagatcaaatgttttggaggcataattaccatttcttattaatgaccggccaaccactgctcactttgttgtcagtctttgctcttttgttggccaatcagccgctgatcgaatccgctggtcagtcagtcgttcgctgatcattctgatcgcttcccctcaatccgtttgatcacttttgctgatcactttcttccctcctccctcatccgttttcaccaattccccccccccactctctgaagatgcacctgctgcaggagttgacctgtgcaaacgccaacccttccgtggccgctgtccgcccggtcccaatggcgtccaaatgcggtcccaatttgtgcttcgctattacgttcgcaacggggaatgcatctcctaccactgcggtatgcccattggcactttgacatttgaattttcg

SEQ ID NO: 28840 - DNA, 1738 bp, Heterodera glycines
  unsure (1)..(1738): unsure at all n locations
atttatatatttatctctccttaaaaaaactcagggcacataccatgatgaaaaaactccttggttcaacagtacgctacaagtgtggattagttttgaaatttaaaaattaaaaaaattgaaaacattggtaattatgaaaaatatttaaaaatatggttaaactatcgcatattttttcttcttcttttttaatgagtggagcaagaagtgcaataataaaatacctaaaataaattatttgtattttaatatttatttaaattttcaaggccgacgtgcgtggtcaacagttggagtcggcccacctagtgcaacgctcagactcaacgactttaaaaatgatctgaaagcgaatgatgtgcgcttgcaggagatgaaccaaatcgcgatacggtcagcagaagatttttggggggtttttcatttaataatccgagcattggatgaaaaggtgggggcagaggcgtaagtggcatgaaaattttttgaattgtgctataaattgtaatctctaacctctcatatatgttgatggggctcaacattcgctgtcatttgacttggcccatccgatttcttgtctttgaacaaaattttcttaacgaaaagccacgggggatgggatgaataggtaaaaaggaaggaagaagctggtggacttttcattcgtgtaatcattgatcaattcaaaaaattccgaagttttagttttgagtttaaaaaattatctattgagaatctgtattaattttcacacattttatcgctatttttctcccctcacacttcggcacattccgtgactatgacatgcattttcaaaacacaatttgcacaacaattaaataagtcacaatcgatggcaaagttattttttaataaatttaacaccggccagtaagaaaaatggtgagggcatataaaaaatatataaataaaatggacacaaatagaaaaaattcaaaatttggcacaaccatcaaagaaaatttatgcaaaataaaagatggataatctgagatctcattttgtgagttgtaacagaaatataaattaatattactttttttattctagttagtgtattttatttatttgttcattttttctatttttatttatcaattattatgattttattgcccgtttttgagttttaacttactacccagattgtcattgcaaatactaattatcatttacttgccaatgcccttcccgttgacattttactggtgttacatttgtcaaatgtcataaatttatcatttttaatttttaaaaattagaatttttctgatgatccgaaattgtcccattttattaaatttcataaggaaaaaaacattttcgtgccaacttcctctcccctccctttctcaaaagaatgacattcgcatgagggacttttttttgcccatcttctccaccctcgccgaccccgcgtaatttgtattgtcgtcgtaaagcaaatgttgctaagatagtgttcgtgccagctgccccctccctcgcattcattcggcacaaaaaatgtcatttgatttggcccatccaattttttttctttaaacgaattttccttacaaagccacggcggatagcacgaataggcaaaaggaagaagcagccggacccgcttctattgtgttgtgctggcattttgcgacaaaatatggagattaaaacaatagaaaataaaaaattttctcaaaantttatcccccaattttat

SEQ ID NO: 28841 - DNA, 595 bp, Heterodera glycines
  unsure (1)..(595): unsure at all n locations
gcctacacctcaaaatttttaaaaggtcaacaaggggcttacaaggagggantttntanatttnnatagnataanagacccataaaggtanttttttaatgaattttgattaataatgtaatttttatgaaataaaaatttggaatattgttgatatttaaaaattttgaggtgtaggcccaaaaccgaaaagtaccaataattacttatcaaatttcttgttttatgaattgtaagaatattaaaagtgaacaaaatatgttcttgtgcgccatgcaatttgttaatatatagcaattgaacctcataaaaagactaattagtgtggccagcctcgatggtcatcttcgaatgccaattaaaattaaaatattttaaatacttcaattaatgatacagaattatacgttgtttcactcattttgattttttttttaataaattaatgccaatgtgaatgatgaatgnaatttttatttgataatttttatttggtaatgaatgtaaaagaaaaaagtagtagtgaaaatagttataataattatgataattgaattgagaattaattaatgaaattatattttttatttagggt

SEQ ID NO: 28842 - DNA, 912 bp, Heterodera glycines
cacccccctcccccccccctgcccaccccatgcccacctaaaatgttgcgttattttttatgaaaaaaataaaaatgtgataaatataggtgaaaaacaaaatcaatttcgaaaaatgtgctcgttgagccttctctgctggttccatgttgaacagccggccactggctcttcctccagatcggggtccgccggcggcaccgctgcctcctccacctccacaagcatttcttgcaccggctcggccctggcccgcttgcgcaccggctgctccagcccatcgctctcgccgccagcgtcatcactgttcgcgtccgcctcctcttccccctcctcctcctcatcatctgtctccatttgctgcgcctctgccgaacaccagccaaacggtcgcgtgcggatggacagaggcgtcggcgtgaccgcttcagcttcttcctccgccgcggctgcctcgcctcccgctgttggtggtggtcgcaggacacgccccttggtgtagacggggcggtacacgcgggtggagcgacgcgtgaagatgtccgcctgtcgagtgcgcacaaagcgttgacagggcacggcaatggtccgctgctcggtggccgcctccgcaatgtcgcctccgcccccaccaccatggttggcgcgctgctcgggcctaagaaaaaaaaaactgtgcatgagtgtggggtggtggtggtggtgcttgtgcaagtgtcgtaccgatttcggcgcctttacctgccaaaatggttgatgaccagctggcgcatccgtccgtactgcagctgttggtccgccgcgtaggtgagctcaaaggatcgcaccttgcgctccgccctcaggtcctggcccgtgcgcgcgtccacgtgctggaacccgtagttcttaggcccatcagcgaagaagtcg

SEQ ID NO: 28843 - DNA, 1442 bp, Heterodera glycines
acgagatagtggtagaattagagcgtggtgtatggctcttccctgtgaattgatcttttaccgatcgatcgagaatggtcgttgggtttagagatggtctcggctggcgggaatgggaggacaaaccaccggcggcagaagcagcagcaacaaatggtggtcgttgttggagttacattttggtatgggggagagggggggggaggggagggacaatgttcgggacttggccggcggccaacttcgtcgttttacacattctcgacttccaactcttcaaatgtgtgtggatgtgtgtgtgtgtccttgaaattcaatacaacaatcgcctgaaatgagagttattgagttggaccggataatgggaggaaatcagcggcaaataaaaataaatcaaaaattattttcaaatttgaaatcggcggcaaaaaaaaataataaatcaaaaataattgtttttattgttttatttcttgtttctcatagactgctaaaaaattgacaaatgttaaaccctagaaatatgtgaaaaaaattgaaaaatttaaaaaaagaacaatttttcttccattcaagatttgaccaaaaataaataataattgaaacatataaaataagattttttagtttttttgaaacaaaaaaaagattaaaaaatgttaagcgttttaagcaagtatataattgcaaaattaaatgttttatttctgtttctcatcatacacagataaatttacaaacgtaaaccttgaaacattagcgaagaaccgctttaattccatttaagatttaatcaaaaattttataaaaaaataactgaaatatataaaacaatattttttattttaagacataaaaaattaaaatgttaagcaatgtatttatgtataagcaaaaatgatggtcaccttgtaattttgaatttcagtttttaaaaaaagaaaaagtaaagccatatattaaagagccaaataagaatggcacttttgctggctgaattttagaggaattaggcaaaaaataaatataatttaaaaccaaagatcatattttaaagaattaagaatattttgaagaaaaaataatgcaatttttaaaattttttcccgaatatcggtgaagcgaaaataaaattgttaggtgccggcaccggcggcacgggcgatgggcaacggcacatattaatgggcgagagagaatgagcttcagcagagcgaagcaagaagcatccagcgagagcgggcttaacctcacccacccgacactttatgtgtcctctcaattggactcgctggtcgtcactcgccgacgacctcaatgctcgccatccgtcccccatagtcgcccccgccgcccctcccccctccccgacacgggtgtcccaattcattcatttacggggcagtagtaatgggtaaaatggtattggggggggggggggg

SEQ ID NO: 28844 - DNA, 932 bp, Heterodera glycines
aaatttattcaaaacacgtttaaaatgttcaaatgttgtgtttttgattgtccatgatcaatttgagcaattttttgtttgaaataagcattttgtgaaaattgaaaaaaaacggttgtttgctccaagcccgtagccagaaaaaattttcggggggggggggggaatctggactttttttttgctcttcgggcaaaaaaaaaaatttttttctattgttattatttattgttttaaaaaaattcagcgcccgagagcaaaaaccagggaattgtagccgtttttgcgccaaaaaattgtcaaatctttgcaattttggggctaaaattccaaaaactatgtaaaatgggtgtccggcggtgccaataggtgcagccgggaaaattttgaaaatttgagtgtgatttattacgaaaatacctataaaattcaaaaatgaaccaaaaggttttaaaattttcggtcggggggcgagaattcctccccttcccccccccctgctggttacgggtctggtttagagactggaaatttcaaatttgcgggtcctgttgcaggattggaattcaaaattttttacaggacaggatccggcaggattaatcctgcatttaaaatcttcctgcgcaggattgcggattttaggaaatttcaaaaaattctgtattataaaaaagtctttcaaagtataaaaaagtattcaatatatttttaaaccaaaaaatgatgaagatgaaaaattaataacgtttttttcagggttgccatccgtccttgaatggcaaggacgtccttgaaaatgagcatttggaaaagtttaaaaaaaatcaaagaaatttgagaaatctttgtaattttcaacaatatccccccccccccctcccccctggacgacggcggcggcggcggcggcggcggcggggcaatgccaa

SEQ ID NO: 28845 - DNA, 1646 bp, Heterodera glycines
gaggagaaacgaatgatcaaaagactgatcgaaagcaccagagggagccatttctttgtcggggaacagacggacgagcagcgcatcggcagagattctgatcagttcagtcaaattcgacggttggtttggattcctgaacaaatttcgtcatcgatcaatgttcacaaaattccgctttactcgctgttgaacaatccgaaaaacagcgccggggccctctgcggctgaagtgaccttccgcccctccacgcgccgtgctcaaagcgtacccaaatgctcaaagtgagtgaagcggaagtgaaacggaaaggaatggaaagcgcggcacgggacggttgctgggcggactcgacgaagcgcaggtcgaagtcgggatcaatgcgcttctcacagttggcaccggtcactggacagaagagaaaggaaagcaatgtaaaacggccagaggaaaggcctcactattgaaggggcatttgcagtgaaagccgttcaccaaatcaacgcattgcgcgaccataggacacggagaaggacggcactcgtcgatgtccgtctcgcattcgttgccggtgaatccgggcggacaaatgcatttgaacccgcggggaccaccttccggcaatgccgtagtctgttgctgatggtcctccacttccacacacgtgcctccgttacgacatgttccggcgcggcatacatccaaacggtattggcatccggggccgccaaacccttgcgggcatgcgcattccgaatgggaaccgaagtcgccgcaaactccgccgtttcggcatggctcgcccaaacatcgattgggtgccaattcgcaattctttccgcttacgccctccggacaaacacaaaaatagtcgtccaccaacggaacacatctgccggcgttctggcacggcttgcgctcctcgcacaccgactccatctgttcgcatcgctgtcccttccatcccggcgaacaatcgcattggaaaccggcgcccaagtcaacgcatgtgccgttgttggcacaaggtgccgactcgcattggttcacgtgccgttcgcacagtgtgcccgcgtagcccggccggcaatggcatcggtacccattcacaatgtcctcacatcgttccgtccccgtcgcgtcgcacggagacatcgtctcacactcgttcaggttatgttcgcaatgcattccatcaaagccaagtcggcattggcattcgtaggtggggccgtggttgacgcaagtgccgttgttgcgacaaggagagacagcgcaatggtcgaccatatattggcactgaaagccgtggaagcccggggcacattcgcactcgaagccgttctcctgcaacggcaattaaattaaattaaattaattgttctaccaaatcgcgacatgtcgccccgttcttgcatgggttctgctcgcattcgttcagttcctgctcgcaaaatgcgcccgtccacccttgtcgacacacacaatgccgatcaaaaagcgtgtccacacattgaccagcatttaggcacggggttcgggtcacacaaattgtcctaatttggcattgacacgcttttgctacaccaatgtcatccaattgaagcaccttaatttgacatcgtttcccgctgaatcccatgcg

SEQ ID NO: 28846 - DNA, 983 bp, Heterodera glycines
  unsure (1)..(983): unsure at all n locations
tttttctctatttttaaggctttattcctgtaaaattgatcaacccttcgatttgttatgaattttcaaatattaggccaaaatcccgagggccaaaaaattgccaaaaaataaagaatttttaaaatattccaaaaaatctgaaacttaaaataaacatcatatttgtgctcaggaccctaatttaccccagaaaaatatttttcaccctctttttaaacccaaaaaaaatttctgaaaatttctagggggcctagctcgaaaatttttgaaaatttcccttcatatagtataccattagatagagcttaaaaagctctacaattttgctctaaggcattttttggctaaaaccgacccctgacgagttatgggcccgggactcaaatgtcccgcttaggccaaaaattttttctatttccggaaaaaaatcgaaaattttccaaaaaaattaccattcgatagagctcgaaaaactatgttttggaagtggtcttcgtttttctgggaaaattcgttaaaaaatcataaaattcaaaaacccgaaaaccgttttttaggcctaacttgaaaaattttgaaaattttcgaaattttaaaatttcaaaaaatcgagctttcaaagctctacaataagtccgctggcagcccttcggtcagatcaaaccctggcgtggcattcatctggtactgaagtgtactttttgagcacgcttcagttgccattttttgcaggccaggggtttgctcaaaaaaaatttttaaaaataccagcatttagaggacactttggcggagtgccctcacagcgggcactttttgattcgagttttacaaaaaaagttaggggccttcaaatgcaaacaaaagtgacaaatcagtccccggtactcagttggcggtcggatcaaaaaacctatagttttcccgngattctcctcaaaaagttgtaagacccttccactactttcagggcgctcccg

SEQ ID NO: 28847 - DNA, 956 bp, Heterodera glycines
atttttctgagaatatctattcttagttatggagccattttccaaccgaccatttgtagggctcaaccgtatatagtaatgcgttttcggggaaaacctcatgttgaaggttgtagaaaaaagagatagccatttttctgagaatatctattcttagttatggagccattttccaaccgaccatttgtagggctcaaccgtatatagtaatgcgttttcggggaaaacctcatgtggaaggctgtagaaaaaagagatagccatttttctgagaatatctattcttagttatggagccattttccaaccgaccatttgtagggctcaaccgtatatagtaatgcgttttcggggaaaacctcatgtggaaggctgtagaaaaaagagatagccatttttctgagaatatctattcttagttatggagccattttccaaccgaccatttgtagggctcaaccgtatatagtaatgcgttttcggggaaaacctcatgtggaaggctgtagaaaaaagagatagccatttttctgagaatatctattcttagttatggagccattttccaaccgaccatttgtagggctcaaccgtatatagtaatgcgttttcggggaaaacctcatgtggaaggctgtagaaaaaagagatagccatttttctgagaatatctattcttagttatggagccattttccaaccgaccatttgtagggctcaaccgtatatagtaatgcgttttcggggaaaacctcatgtggaaggctgtagaaaaaagagatagccatttttctgagaatatctattcttagttatggagccattttccaaccgaccatttgtagggctcaaccgtatatagtaatgcgttttccgggaaacctcatgttgaaggctgtagaaaaagagatagccatttttctgagatatctattcttagtatggagcaatttcca

SEQ ID NO: 28848 - DNA, 1270 bp, Heterodera glycines
  unsure (1)..(1270): unsure at all n locations
tgaaaatgagtgaaaagtaaagaaaatgatgatgaattaatgaacgaattatgcgcaaaaatcaaaaaaatggggcaaatgaatgacaaaaaaaacgaatattattgcaacttttttggagggagtgaaaaaacactgcgaaagtgaaagaacaaacggacacaacaaaacaaaatgatgaagttagacatttaagaatcgtttttggattatttggcattgatggaagtgccgttatcgtcggccgttggactcagtgagtgccacttcttcgccttattgtcacactacttcttcctctctgtccttctgatcactttctctccctccctctgtccgatcacttttcgcttctctctctgtctgataatttcctttctctctttctctcccctctctcttcattttcgtgctgtcactgctccccctttccctccgcccgccgttggcaatttagcgtaaacggtgtctataggcttcacttcggtgttccgttggaatgtcttgcgaatttgcggaaccgaccagttcacctgtaattggttttaccgtttctttgaattttggcattggctaatattttttggccaaatgtttccgtaattggcattactttagcattgtcttttttgcccaatatcacctccaatttgtccaacaaaagttcctccgctgtcctttttggtggtatatatttcgtcagatggctttgcttctccaatttctgcggtgttttcgcacttttcgtcgactcttccaaaatgccatcgttttttcccaaaaaattgctgccgttggcacaaagtgccgaagttgaacaacgcctggccacctcagaagaaagtgccgaaaccttcgtcagatttggtgtcactgagggcactgccacgtgacaagtgttcgatgccgcctctttgctgaaagtgttttgactgacgaagtctttgacaccgatcagccgacgcttttccgtctgaggagtccacggaggacggcacactgaagagaaaaatgaaaatcggaattgttcgttgccaatggcaccatttgttgggctaaatgactggacagtggcgagcggttgttgctgaacacgaggggaaagagacttggccacgaccaaattgttggcctcggcctgctggaaagcattttttgtaaatgataagccaaaagatnggcaacaaatgccaattggcacctgctcaatcagtcgcccgtgcctccgcgcaattcccctnggcaccgctgcagacgctgccgaactgtt

SEQ ID NO: 28849 - DNA, 1139 bp, Heterodera glycines
actagagtgcagcgggaccgggaattttgggcttaaccgggaccgggaccttttctggttgaaaaaccgggactttttggctgggaaaaccgggaaaaaaccgggaccttggttctcagttgtactcagttgtccgtgtccaggtcccggtcctgctgcactctagatagtacgccaaagtgagagaaattacaaaggaaaaaagaaacgatgagatagtactagacttttctctgcacagtggaattgacccatagtggcgcctgttgttagctcctttaaatggtgcattttagttcaatcaaatgttgcttaaaatacctaactagttttatacaatcaagcaaccatcaaacaaagcaaaaagtatgttgatcgtgaatcatggtaaataaaaagtcggataacttcgcaagtgttcggttgttctcagtctgaatttttcgggcgcaatatccacgggagcgcacacagaagcaaaagagaggcaattagactttgttggccaagaaaaaagaggacaacgatcattcccatgtagggatagaactctaagttgcctttgcctttccccttctccaatgttattaattttccatttttctgagttttctttgattttttgtcatcatttccttcgcttttgccatcgtcggctttccccttgtttttaagaaccgcattgaccaggtcgctgggcttcagctgctggttggccttggcctccatgtcaatgccactttttgccttttgttcgggtgccaatgccttcgcacactctttgaacgatgcgtcaaattccgcaagtttcgccatgccctcggcattttgttcctcttgaatttgctcctcctccgtttgcatttgtgccaaaacgcattgtccggtggcaattagcgccgatttcccccaattttgtgcaatttccttcgcttttgatgttccacccgcgcacatttccatcattttttgccccatttcttctcctacacattcattggcggtctttgtccccaatttggccttttcccacaatttttctgccatttcgcaccctttggccaatgcccaatccatcgtctgctctgagaaacttgcgatcatttctaaattgcattttatttattaatatatattta

SEQ ID NO: 28850 - DNA, 1167 bp, Heterodera glycines
cgcatcggttcggggggactgccccgaaaacaaaaaatcctctactggtcaagtgtccgtttggggtactcaaacaattatcggtggagcaaaaatccaacgcagaattaaagtacaggctatagggaagctattcccgaaggattcggtctccccataaatctgggcgcatcggttcggggggactgccccgaaaacaaaaaaatcgatttttttcaagtgtccgtttggggtactcaaacaattatggggagcaaaaatccaacgcagaattaaagtacaggctatagggaagctattccggaaggattcggtctccccataaatctgggcgcatcggctcggggggactgccccgaaaacaaaaaaatcgattttttcaagtgtccgtttggggtactcaaacaattatggggagtaaaaatccaacgcagaattaaagtacaggctatagggaagctattcccgaaggattcggtctccccataaatctgggcgcatcggttcggggggactgccccgaaaacaaaaaaatcgattttttcaagtgtccgtttggggtactcaaacaattatggggagcaaaaatccaacgcagaattaaagtacaggctatagggaagctattcccgaaggattcggtctccccataaatctgggcgcatcggttcggggggactgccccgaaaacaaaaaaattgattttttcaagtgtccgtttggggtactcaaacaattatggggagcaaaaatccaacgcagaattaaagtacaggctatagggaagctattcccgaaggattcggtctccccataaatctgggcgcatcggttcggggggactgccccgaaaacaaaaataaatcgattttttcaagtgtccgtttggggtactcaaacaattatggggagcaaaaatccaacgcagaattaaagtacaggctatagtgaagctattccggaaggattcggtctccccataaatctgggcgcatcggttcagggggactgccccgaaaacccaaaaaaaaattttttggataaaaattatttaaatgaactgactagataatatttaaaataggttatttctcttcctttcagtatccctgcaaagtttggtgcgcttctgatcagtttctgaaaaaaaagttagcctaaactttt

SEQ ID NO: 28851 - DNA, 1642 bp, Heterodera glycines
ttcttaacaaattcattaaaaattcttaaaatttttccccgtcggcgagtatcggcaccgccggccccccaaaaatcctactcttttccttaaaaatttgaccaaaaatctcaaaatttcgtaattttttagacaaaatccgcttataaatagcattaaaatttaaaaaaaaatttctcggcgcctatcggcgccgtgaacccccctgttcccaaagttttttaaaaaccacgccgcaaaaaaatgcgtcgacttgctaaaaaatcgcaaaatttgccagttttttggtgaaaatctgttaacaaattgcactcaaatttttaaaaatttttccatcggcgcctatcggaccggccggaccccccccccccccccccggttctgcaaaggttttttggaaaaagcgcgccacaaaaaagcggatatgaaaatcaaaaattttttcgcccgaagagcaaaaaaaagctcttcgcgaagttgtttctggctaggggcctgaagaggacttcgggaagtttcgactacgaccccccccctggacttcaatcgtatgaagtggggtgacaccccactactatttcatgcatgtttataaggatggaacaaacttgcatttgtgatgattcctcactacattttgatgtagctagttgaggagtgagaggtattatggtttatattagtatattccgttttccacttattcattatgtccatagtttcttagttattgtttataaatttttgcaaggtttttgaaattattaattcctagagaatacttaaagccataaaattttcaatgaaagaatttagttgtctttagcaattttatgattttatttttccattttaacaccatttggaggatttataaaagccctgcttgctgattatgaaccgacctatcagccaacagtttgtggttttttatgggttttgaaattttcaaaaactttatcataattttcgaaatttcctaaaaatactcattgacgcatcatcggagccagtttttatatcaagtttttgtttttttaattcgctaatgtggaaccctttcgccaaagtcatcatcattcatcaattaatcatgcaatgaaagtcgtccttcagcagcaatttaccaaaaaaccattaattaccccattttatttattaagttagagaaatcttttctctttttctccaaaaataatttttgaaattacaaatttttgtaataaacaaatttattaattaatgataattagtgaaaaatatgtttaattctatctccttttgaaggaataattagaaaaataaataatttagagaaaaaaatgcttattaaaccattgtttactttctcaattttgttggcgttttttggccaaatattttgcgacattttgggccgtgaacaaagtgccggtgccaaaggtttgctgacatgtgagggaaaaccggcaaaaaatgtgaaggtgaaactgtacgatgatgaccgaggtgaaattaataataaattcaatttttaatttataaaatttgcagggattgatgcggacgatttaatggtgtgaaaaaaacaaaataaatttgcatttaaccctatttaaataattttattttaaatttgttgaattattaaattaagagaaaa

SEQ ID NO: 28852 - DNA, 217 bp, Heterodera glycines
cgcggtatgcggcagaatctagggccgttttccgtgtcgagccaccgcaatgatccagcaagaccccggcaccctgtattccgaccacctggccgtgctgtgccgacgtgccgaacaggcgctggcccgcggcggcttcgatcacctggtagtgcccagcggcaccctgcactaccaggtgttcgacgatcgcgactacccgtatgcggtgaatccg

SEQ ID NO: 28853 - DNA, 867 bp, Heterodera glycines
  unsure (1)..(867): unsure at all n locations
tttcacgttaaccaaccggcaagcacaaaacaggccacggtggagatgaatccggcaaggaacgcgttaaaagggaaagtgccgacgagcaaacaatagacaaattggaagacaccggttaagaaaatgtagaccatgtaagcatcgatgatcttcaacttctttgccgttgtgcgttgataatccgcgtaaagtttgctgagagagtcgaacacttcaaccattttggaaattaaatcttaaataaaagaccaatttaaagacaaatccatacaatttttaaacatattaaaatagaaaatgaataaaacataagcaaaatcagcgagaatattgtgacgttcatggaaatgtatgcgccaaaaccaaacaaaaaatcaaacaaaaaagtaacaattacaaaattcaaatcattctccggtcggtttagtgctattataatgttccccgagagtgtaggcaaatttgtggtaggtcacaatgagaggatggccagaaaacacttcgccaaatttgattgttgctccgtccgcgtgaagcacttcaataggacagcgcaaaacgcaactcaatgcacgaagctgaaaatggtaggaattcaaagtcaattggcagaagaaaagctcacttctggctccccgccccaagttccgccgcttgcgcacattcgcgccactttggagcagtagtcgtcaaactgttcatctttgaacatttctccgttttcgttagccaaaaagggaaggaaatcctcgggattttgctgaatgtaatccgccgccatccgacgtatttcgaaggcaganaacttaatttattaagaataatggccacgttgtgggcattgatttaatggnngatgacgac

SEQ ID NO: 28854 - DNA, 1130 bp, Heterodera glycines
  unsure (1)..(1130): unsure at all n locations
tggaaaaaaatttgaagaggctctgcggacagatagnncatcgnggttacgagatagaatattgtcctaaaaagagatagccattttctgagaattaattcacaatttccgcagctcttgcggtaatggaaaaaattttgaagaggctctgcggaacggattagcatcggggttacgagatagaatattgtcctaaaaagagatagccatttttctgagaattaattcacaatttccgcagctcttgcggtaatggaaaaaattttgaagaggctctgcggaacagattagcatcggggttacgagatagaatattgtcctaaaaagagatagccatttttctgagaattaattcacaatttccgcagctcttgcggtaatggaaaaaattttgaagaggctctgcggaacagattagcatcggggttacgagatagaaaattgtcctaaaacgagatagccatttttctgagaattaattcacaatttccgcagctcttgcggtaatggaaaaaattttgaagaggctctgcggaacagattagcatcggggttacgagatagaatattgtcctaaaaagagatagccatttttctgagaattaattcacaatttccgcagctcttgcggtaatggaaaaaattttgaagaggctctgcggaacagattagcatcggggttacgagatagaatattgtcctaaaaagagatagccatttttctgagaattaattcacaatttccgcagctcttgcggtaatggaaaaaattttgaagaggctctgcggaacagattagcatcggggttacgagatagaaaattgtcctaaaaagagatagccatttttctgagaattaattcacaatttccgcagctcttgcggtaatggaaaaaattttgaagaggctctgcggaacagattagcatcggggttacgagatagaatattgtcctaaaacgagatagccatttttctgagaattaattcacaatttccgcagctcttgcggaatggaaaaaatttgaagaggctctgcggacagattagcatcggggttacgagataaaatattgtcctaaaacgagatagccatttttctgagaataattcacatttccgcagctctt

SEQ ID NO: 28855 - DNA, 1055 bp, Heterodera glycines
  unsure (1)..(1055): unsure at all n locations
aattatgccataaaaatgcatttntggctaatttagcgatcaaaaaaatttttcatgaaatgcaaaaccatggggtcccccctatggttttgagtttcaaaatcacaattaattttataactttttttaaactcatggtaaaaacatgagataaagcacattagattgggcttttaattctctacaaaaatgctcttgcatgactttttgctaaaatcaactcctgacaagttattgcgccagaactgaaattgaggcctaccaaccaaaaattttctatttccaaaaaaatttttaaaaatttttctgaaaatgacaccaatcgatagagcatgaaaaacggttgcttgaaagtggtctccgttttccccggaaaaatctgtaaaaaataataaaattaaaaaacggaaaattttcgagggggcctagctcgaaaatttctgaaaatttcagaaatccaaaaacatggttggatagagctcgtcgagctctacaaaaaagccgcttacaccgacctcctcaaatcaaaccccggcgagttattcggccggcgctgaaatggcccaaaaaagtatgcaatttttagccagtttttcggaaaaactgacaagaccttggggtccggtcaagaaacaaaaaaaatccaaaaaagtccaacttaaaatcctatcgaggccgatttttcaattaggcctttaaaaaatttttgaatcccaaaaacggcaaaaaaaatttttaaaaagtgacttttctgcgcctggcgctcagttggccctcggatcggaaaatctatagttttcctgaatgcgccgtcaaaagttacccccaaggtcgaaattttgaaccccttcctgcaaaccgtaaggagattttgtttttggaacgaaactccttgtttctttagttatatataaactagggtgcacagttggctttgttgtattcagttgagttctgttgctgtggggaaagcgcttcgcgctttgggaacgcggcttcgccgcgtcgctagaaagtgatgtaattttagcaaattgatcgcaggctcaagacgg

SEQ ID NO: 28856 - DNA, 774 bp, Heterodera glycines
  unsure (1)..(774): unsure at all n locations
cctttctttggcaaaatagagaaatgggaaaatttaaattttatactttttgctcgaattcgggtccggggttctacataggtcgaaattgatgccggattcggattctcctacccttaaaacccctaatacaatcttttctcgaaaaaaatttcaaaaattttattttttgaaaaagggggactaccatcggtactattacctatgattgggaagcttttaactctgattagtagggcttccttttttaggcaaatgcctaaaattttgcgcacttgatacgcaaagataagcacgaaaaacgcgtttttcgcttggtttggggtgtctacgatgacttttataatgcctatttttgcctatttcgtggtttttgtgcctaaagtgcctattttaggctttttgaaaaaatccataagaaaaatgcaataaaaacgaaaaacacaccccctaagaaatgacccaaaaaaaatttcagaaaatacacccttaagaattgaaaaaattttcaaaaaaatgatcccaaaatttaatacaatatatatttttcttaataaaaatttttggtttaaaatttgtccttatttaataatttcatttacaattgaaatatttaagttttacttgttttaataatagagtgagcgggaccgggaaattttggcaaaaccgggaccgggaccttttcaggttgaaaaaccgggactttttggctggngaaaccgggaaaaaaaccgggaatttcccggtcccggtcccgctcaactctagttt

SEQ ID NO: 28857 - DNA, 1192 bp, Heterodera glycines
caccaccattttttccgcttctgctagcttcatatattttttagttgttagtaataaatggttggaaaggtattttttcttttgcccacgtttcagttacaaaaactaattcaaaatcttttagggctataatcgcagtaaattcgttaagcttattatttagggatcgcatattgataaatgttgagtataaaaaattttgttttttatttagtaaagttttcgaattttctatggggtgttcaattttcctatatttagtttgtaaaagagataaattaaggttattgcctcgtgagtggtcacccaaaacacattaagatttgttatgacaaatacatttaaaattgaggtcagatttaaaggcgggaatgtcgtcgcgggcaagcacatgccccgcatagacaatgtaatcacaggatgggtcattttcacgttgagatttacacagtgtaatgagtcgggcacggtcaatgagatcacttttagatagggaggggcgcaacaaaactttggaaaatttgttaaaatttttgattttgtttttgttgcgcaaaaataaattggtatggaatttggtcgggagttcaactttgagcaaccttggacgtccgtcggcttgttttttgcccattctgtacacttgggtcggcaggcattcgatgtcacaatggtccatcagttctttgacattcgccaagtcatcggttgcacgttgagttggcgtttggctgttgctttcctgcaattgcgcgatgacaacgctgtgcagtcgtcgttcttcgtcaaaaacactgttcgggttgcttcctccgtcctgctcgcgtaccatgaagatcagctcgcggcacattccaaccatttggttcaccagtcccaacattgcggaagcccatggaggcgcatcggtaagatgctccatgtggaattgttcaattgctgaggcggcaggtcgttactcaaaaaccatcaaaatgcgcgtctcaaaaaactagggttcggaccccgcccccgtcacccccgcccctgccgggggcgggacaggttttttggcctcacccccgtccccgcccccgcgactctgacccccgccatcccccgcccccgcgaccttcacccccgctggggcgcgggggtgaaaatacacccctaagaatgacatattcatggataaaaggcaaaaaatttatac

SEQ ID NO: 28858 - DNA, 1656 bp, Heterodera glycines
cgcattcgagttcccttttttcacaacattcttaacccttctttgggcaactttcggcatcaatacttttttttccacctatatacattaaacaatttaaatacttaaatatttttaattacgggtgccaatccaggaattattttcttagtcgccgtagaaaacaatggcgcaacattcggccatgcgatttgtgatggctttggaacaatctgatgtcatttgtaattaatactatcatatgtaaagggtttttacagatcttggggcatcagaattttcggcaatcattttattttcaatgctttcccagcggtccaacaatcgacgacggagacacccgatgacgtgcccgcccatggttatgcctgcaccaccggcatccatgatttcggctatcacaccattgatgtgtaacagctccgtcacattgtcacgaccctttgatagattttagtcaaactatttaatagaaatttgttaagaatatgaaattttaattacttatttcattttattttttattttcaatttgttacatttagatgaatattttttattaacctcaatgggctttgacaaaatttctagatcgtactcttcagcacacttaagatccagtttgtgaccgcaaatcacgagcttctttggagttatttggacaatcaaataacgcatcttggcgaagaatttttttggggatagaaagggaggaatagctgatatttagagttttctgaaattataaaaattaaattaattaaacaaaaacaaaaattcactaacaaattgtgggaataaatttatgtgtattttaataaaatattttagtgtcgattaaatgatttctaataaattgcaaatacaggaagtcatcaaaatttattagttaatgactaattaattgctttattaagaataattgtgtgtttagtaattaatattttgaagttttaatttggaggtgcatgaatgaatatttgggaattgtagattattattttatatagtagaaatttcattttgaagagaagcgttgcaaaaataagctcacaacgacacaaataatgaatagatgtggaataattatcttgaagtggtcttttgtcaaattttgcagcataaaatccagcatatgaccatatcaacatacgcttggaattcatgtcacaaaaaagtttttttccgtggaggtatctcactccagttcaatacaatgcgcattttgttcaagtattttggaataattttgataaatattggttttcaaaagggaaatttttttacggattttttttcaaattttataacaatgttttgtgaaatagtccatttgaaatcatttactggtcgatggaccataaaaagcggagtcgtcaccctcgtcaaacgaatcctaaatttatgttaactaattcattttaattggtaatttactctttggccacgcgaacgtttagaccaagatttgcattcgtattgaaattgaacttcgtcctaaatagtttattattttttacaggatttattgctattgcacctgctccttttggtcaattccaacgaacgcgctatcgtcgcactcatcgaatgaatcctatatttattttgttaataattattttttaattttttattactctcattcccaacgct

SEQ ID NO: 28859 - DNA, 1259 bp, Heterodera glycines
ctcgagcgcttttgtaacgtataaaatttcacaatatgagagattctctttttttggggatatgagataaattaaaattcttatgagaaaataaggggcgattgcgcaccccttctctctcgctctcgagcgcttttgtagtgtataatatctctcaatatgagatatactcttttctcttggatataagataaatttaaaaattctctgagaaattaaatggcgattgcgcaccgcccttcctatcatgctcgagagcatttgtaacgtataaaatttctcaaaataagagatagtcatttttcttggatataagataaatttaaaaattctctgagaaattaaatggcgattgcgcaccgcccctcctatcatgctgagagcatttgtaacgtataaaatttctcaaaataagagatagtcatttttcttggatataagataaatttaaaaattctctgagaaattaaatggcgattgcgcaccgccctccctctcacgctcgagcgcttttgtaacgtataaaatttctcaaaataagagatagtcatttttcttggatataagataaatttaaaaattctctgagaaattaaatggcgattgcgcaccgcccttcctatcaagctcgagagcatttgtaacgtataaaatttctcaaaataagagatagtcaatttcttggatataagataaatttaaaaattctctgagaaattaaatggcgattgcgcaccgccctccctctcaccctcgagcgcttttgtaacgtataaaatttctcaaaataagagatagtcatttttcttggatataagttaaatttaaaaattctctgagaaattaaatggcgattgcgcaccgcccttcctatcaagctcgagagcatttgtaacgtataaaatttctcaaaataagagatagtcaatttcttggatataagataaatttaaaaattctctgagaaattaaatggcgattgcgcaccgccctccctctcacgctatagcgcttttgtaacgtataaaatttctcaaaataagagatagtcattttcttggatataagataaatttaaaaattctctgagaaattaaatggcgatgcgcaccgccctccctctcacgctcgagcgcttttgtaacgtataaaatttctcaaaataagagatagtcattttttctggatataagataaatttaaaaattctctgagaaaataaatggcgattgcgcaccgccctccctctcacgctcgag

SEQ ID NO: 28860 - DNA, 1422 bp, Heterodera glycines
  unsure (1)..(1422): unsure at all n locations
tttacccactcaaaaatagtacgggagttagtggtttgnagtgtggaaattgggatcggattgggtccagactttgccaattgaagaaaactacttactgatcagactttcagcaaaaataatacttgaattaatgtccacggggaaagtaacaccaatttgaaggtttacttaggaatttaaaaaagtaatgcattaacgaaaataataattgtagaaatcaatgaaaatggaaaattaataaatttgaaaatatttaaatagatttaaatagcgcgaaaagaattgtaataaaaaataataaataaagtaaaaaatcaccgttatttatcccacgcggtaactccgaaccttttacggaagttgtgtatgatcccaaagcttcttactgcaatgctgtgctaataactgaaatcacaggcaattggtttggtgttatttttttaaattctttttaattcattcataaacttaggaaacttaaaacccttaattttcttaaataaatgttcgaaattacaaaaaatatatttattttaggttttaaatattgtcataatcttttttgagttctttcttagtttttacgggtgattacgcaaagttttaatgcgggattgcgtaagttaaccccgcttggcataccccgaaaaaatttttgagatgcagcggaatctgcaaatttgaaatttctgggctccagtccctaatatagcttgagattgaacatattaaagcttttaatacgggattcaatagatgtgaaaaaagtgcggggttttttttgaccccgtaaattatcaaagactaggcccggtcccagcattttcaaattccggtctttagacccgttaattttggctaacttttcatatcttttttttccatttttcataacttttggcgcttttgttagaaattaatgtttgtttaattataaatttaatttattcctataattttcataaaatggtcattttttatgtgagaataaaatttgatgaaaaaagcaatattattttttaactataaaaatcaattaaagaaacgtttttataatttgttaaacaataatttaataagaaaaatttattaaaaatataatttcaataaattaaatcttcaataaagcttatttgttagcttttaattttacacttttttatttcgaaatcattaaaggaataatttttacagaaaacatttaaaaaatatttaaaataaaatgaatttattcattttattctttttgaatattattttattttgatcgttaaaattgatcaaattgaaacagttaaaaaaaatagaacagaaatcattttaacgaaatgtttgggaaaatgaaaataacaaaaagaatggaataaaacaacgaatataaaaagcgctacaaatcataaattgatgaaaaaaaatgaa

SEQ ID NO: 28861 - DNA, 966 bp, Heterodera glycines
aaataattttttactatgagtgttggtttggaaactgtctaaaatgttccggtcgcccacattgcacaatttcttgaaaataccatgaaaaatgctctaactccaagagacttagttgagcgcactgcaaggagaaccctaacacagttcagcacaaaaaaattaactattcacgcttgagaacgcgaagtttgctgcggagaatggcaattatatgcagaaagtcaagtgcatatatctcagcgcctagtgcatgaataggagcgtttttactgttttctgagagcgcctgaaagcagctttcgaatggtatagctgatttttttggatctggaattttcgcagagatatatgcaaattagtaaccagtgtttcgtttcaaattatttctcgtattctaacgaaataattttttactatgagtgtttggtttggaaactgtctaaaatgttccgggtcgcccacattgcacaattttcttgaaaataccatgaaaaatgctctaactccaagagacttagttgagcgcactgcaaggagaaccctaacacagttcagcacaaaaaaattaactattcacgcttgagaacgcgaagtttgctgcggagaatggcaattatatgcagaaagtcaagtgcatatatctcagcgcctagtgcatgaataggagcgtttttactgttttctgagagcgcctgaaagcagctttcgaatggtatagctgatttttttggatctggaattttcgcagagatatatgcaaattagtaaccagtgtttcgtttcaaattatttctcgtattctaacgaaataattttttactatgagtgtttggtttggaaactgtctaaaatgttccgggtcgcccacattgcacaattttcttgaaaataccatgaaaaatgctctaactccaagagacttagttgagcgcactgcaaggagaaccctaacacagttcagca

SEQ ID NO: 28862 - DNA, 1891 bp, Heterodera glycines
tgcaggtcgaaaaaaacataaaaaaaaatttttaccagaaaaacaaaaaagatatttaagttgtttttagaccaaaaatgcgaattttaaaaatttgaattttcgacatttcgtgcgaattctggtccgtgatccggaattggccgaaatggatgccttatacgtgatcagcgacatcgaataccacagaaaaattgtttttctggcaaaaaattctaaaaaattttttcaaaaagggggtaaaaactacaaaattaacgctttttgtttgtaaaatgagcatagaagtcgtatatatttttatatcgtatcagctttttccatccatcacaccggttttttaaaatataattcaattattgaaaaaaactgaaccgtccaactgaatgatggccatattcctccgatataaatcaccgacaacgcgcacgttcatttgcaagccatccttgcaaatgcatgggttgtctattaacggataaagagtttccttatcgaacagactgtttccaaagagataataatcttttctggaattataatattaatcattaaattaataaataataaaatattcggataaattctattaattgtgtaaacattatcttgacgaaagaaaagtctcggattcttttttggatcatgattaaacagcttttcaaattttaatcttctttattagactgatacattttacacattaatttagtttctcgataaaattaaatatttttaatattcttagagactggcagagaagcggcgccaggaagatccagtgtgagaattattatttttatgatttttgcttgtttttgagattttgagaaaatttaaaaattttcagttataaaatacttcaaaaaattttagtttttttataatttttgaattagacacaataattggaaaaaataatgtaaaaagaaaaaagtcgtcgcttttttaagaaatctttttggggtcaaatctgagaatgtaagcatttttgtctaatttaaaaaaacttccagaaaaagccaaaattttgtgcaaaccctatgaaaaaacagggccaaaatttcttgatttcctggcagctcccccccccccccccaaaaaaaaaaaccaaacgaaataattgtttaaaatagaattgctagataaattatactataattaataaatgtaaattactctaattaatttaaaaaataaataattttaaaaactcggttagtctgttaaatgatcaatagtcgagattgggatccgaatcacagaaatttctcgagtcaagaccctgacccagacgctcaaatgtactgcattaatataactatggctcacagttcatgcattcgctgagtgcttaacaatttcaaaaaatggcacgccgagttgcgttcgcatccgggctgcatctgacaaatattcctgacagaaacatctcctctgtatgatatggtggcattaatccaggcgaaattgactagaaaatcacaacttcgtcggctcaaccatgcctgtgaaaaatgaacagcgtgccatatattagaactctaattcgtttcgtaaattttgccacctcggatatttataaacccaacaattcataaaccgtgctctatattttttgtaaaattgctcaaaagcctacagatcatttttaatttctttcctttataaataaggcgattaattttgaaaatattaattctattattctaaaaattgatccaattggtttttatttcacgttatggcattttatgtagcaaaaattttacttcgggtttgccaagaatgttaaatttaattgtatttttggacattaataataaagctcaaaataaaataattatttttttcatcaaaagagtgtaaatttaaaagttataatctttgg

SEQ ID NO: 28863 - DNA, 540 bp, Heterodera glycines
cggcgggggagtgaccggtcccggacggatcggctaaatagcagtcggcataatggggggtaatgggagccgccgccgccgggtggggcttgtgtatttgttaagaatacgccctccccccccccctccccccgcggggttcttttgccgttgttttggcccatttgttgcttcggctcacctttttcctccactccatcagcaccattcccccgtccctattattattattatcattcgtcttcttctccttctcctctcttccttcagtcgtcatttgtcgtcgtcattttggcagctttttgcttaatcggaaaacattttgaacataacaaaaaaagaaaagagagaagcgattggtgggggggaggagagaaattgggtgggaatcatttggaagaggaagataaatgggaagggatgaagaaaaacattctcgcgggataacaacaatggcggcactgcaaaaagctgctgatgaaccctccggcgatggggggggggagagtgcgcactgcgcagtggcgggggagggggggg

SEQ ID NO: 28864 - DNA, 1646 bp, Heterodera glycines
  unsure (1)..(1646): unsure at all n locations
ctttttaggcgctaaaaataaaagcctagaaaataggcactaataactcgaaaagtagcttaacaacaacccaaaaaaacacgtttttcgtgcgtttcagaccacggggagctcagaaaaaaaggttttttgtctaaaaatcncatccctagttatgaatttatgtgttatacattttttgtttttctaccccttggcggttttgagaaaacgcccatttggcggtttttaggaaacgacctagcacccttacaattagcaatgctattgaattttctggactagaatcaccgtgctcagatttacattcaaacccaaaaattccgatttccagttgaatatatttttttgatagagtagaacgagaccgggatctggtactaaaaaacgtacaaatgagtacctaagtcccggttttgaccgtgaccgggaaaagtcctgggtttccttgccaaaaagtcccggccccggctttgctcaaaattcccagtcccgctatactctatttttggataagaaaattttatgggaaacttcggggtttttgtgcttcgaacttcaaacttcgccttcgaataaaaattgggcttcgccttcggctcgtttcaaattgtcattcgtttcaaattgtcattcgtttcaaattgtcattcgtttcaaattgtcattcgtttcaaattgtcattcgtttcaaattgtcattcgtttcaaattgtcattcgtttcaaattgtcatctcccaaaaatcaatcgatggcaaagagaacggcggcgaatttttcccctcccatggacaacaccgcaccaaaaaaattcttaacttcccttgaccagcttcaaattccccccgaaattgacaacgacagcgccattcccgactacgcaaaactgcttattaagcagttgcactcgctgctggccaccgcttcgtctctagttcaatctcaagtgacggcgaatgacgcgattgaggaagactgcagacagcgaaccgttgttatcaccaatgtgccggagttccaatcctggaaagcgtcggagcgtggggaggcggacagagcactggtcaatttgattttggacacagtggacctcgaccaaacgccagtggtgttccgtgtcggcatgcgaacgcccaacagagcgagaccgctcaaaatggaatttcccacgcgacatgcggctcggcatgtgctcagaatgaagggcaaagctttggcgttgaatgctctacatggtgcgcgcatcagggaaagcatgaccaaggagcaattggccgaacgccggaaattaattgagcagtgcgcaaagaaaagaaaagaagacgcaggagattggattatctacgcgaatcaggtcatcctgcgcagtgacattgacacaattcgtaaaaatttttaaattttcatgtcaaatcaccaaaaaatcatataaatttttacaaaaaaagtttttgctttttccggttggtagaaaatttttataaaaaaataaacaattttaatttcttacaaacagttaaaaggggatgttaaattatttaaaagngtctaaagctgttgtttaaattaatattcgttctataatgaacaaaaatgacgaaatatctttaactttaacaaacaaaatacagatttattactaat

SEQ ID NO: 28865 - DNA, 1949 bp, Heterodera glycines
ttttgttttgtaacctcctgaatttgttttaaccaaattttagcattttttacgcctaaaaatcttttgcgttagttacataggtaggtattgaaaatttaagtgataatagaataaaaatttaaaaaccaaaagttaggaggggtgacaaaacaaaaaatatacgtataaaattggtaccatttgaagaaaccacaaatgacagtcttttgaacattgctagtaatgcattctgcagctggaacatcgagttcaaacttcaattggtctaagtatttggaaggaatttttttatgtttaataatctttttggttgaatccgattgggttttggctggagacattgtgagtattctaatttaattttctctaaaaatttatccagatgtaacgttaaatattattaccatatacattgtatcacaagctttactgactcacattaaaccggacacgctaaagcatcttcacatttataacattttttttagatgaatgactcctaaggaatagaatttagcttaaatgggcagaagtttgagaaaaagcaaaattttttaaatttttcaccccgggaaccgttgtcggacccggaatttaataattccgttttggccggttttgaagaggccgaatgcggataatgtcagcccgatcaaacaaaaaaatttttcaagaagaaagaaataattttttggaatgaattttatggaaaaattttcagcataaaatcttaaaagcttcaaatcaagcgtaaagatcgttttactggtttatttcaacgtattaagtgtgcaaaaattcaggcatttgcctaaaattccatccctcaaaaatagaaatccactggctctattaataactagctttttcaataacgcctcattttgacaacaaacggggctagttgtgattggtctcttctgatccatttccagatcacttcctgtctcttcatataaaaaaattttattgaattggctaatatgcggcaaaaatcaagcaaggcggctatttgttctatcccagcttactgtttgcgtggaattggttgtcgacatattctaattggcgggggtggaggaagtgcaaaaactggagttcccaaccaaattcaggcaatttaaacaaattttcaaatcttttgcgatattagcaattgaaatgataccgaatttagctttttttgcttgggtatgatagcaatttcgaccttcaaaagggaatctatgaatcctctaatcaaatggttgcgcgactgagcgatgttgttgacacaggccaatccgccagcatgaacatggactgcattgcgttgtcggatgagccgtattatggccaattccttattgtagccggccaagatgaggtttttcggggtttttttttttttgctaaaagacacggagaatatggtgaaatttaacgaccgatcgagtccgcttggtcttatctatgactttttaagttctgcgcattgtatgaaacaaaacatttctcgttgtctgaaatggatggtgtggtgaatttcgaccgtcgttttgatgctccgtcgaatttgtcttttaatgtccaagaattggtaagagtacagactgacaagcacccgggcgacgattcttaccaggcaattttattttattagagtaaaaaatttttctatcaattcacaattttactaacaagcaaaacaatggttaggtaattacatgggtactttttaagtttacctaatagattttcttttttggttttaagaaattaatgaaaaataagttttaaggggatcactaataaagcatcattttttgccattttcgaacccctttaccccaactcaaacaaaactcaaaaattttaaattttcgggtttcaagttttttgccaaccatatcttacataaaaatgattttaaaacatccttaacagaataaaaattattttaactc

SEQ ID NO: 28866 - DNA, 1199 bp, Heterodera glycines
ttctttttcatttttcatatctttgatgaacctaatcaatgtcagatttttaatgattaaaaataaaaaaatttaatgtctatctttaagactagtgattttttgaaatttttcaattcgttagttttgtcgtagattttagtaaagaaattgaaataaaaatattatttttgactgcgtggcgcaaatatccatttttgtttagcgccgcaaatatccgcggcgcaactgtctgcggcgcaaatgacgcggcgcaagtgtcgactttgctgagcggcgcaaatgtccatttttgctgacggcgtaaatatccgcggcgcaactgtctgcggcgcaaatgacgcgacgcaagtgtcgactttgctgagcggcgcaaatatccatttttgtttagcgccgcaaatatccgcggcgcaactgtctgcggcgcaaatgacgcggcgcaagtgtcgactttgctgagcggcgcaaatgtccatttttgtttagcgccgcaaatatccgcggcgcaactgtctgcggcgcaaatgacgcggcgcaagtgtcgactttgctgagcggcgcaaatgtccatttttgctgacggcgtaaatatccgcggcgcaactgtctgcggcgcaaatgacgcgacgcaagtgtcgactttgctgagcggcgcaaatgtccatttttgctgtgcggcgcaaatatccgcggcgcaactgtctgcggcgcaaatgacgcggcgcaagtgtcgactttgctgagcggcgcaaatgtccatttttgctgtgcggcgcaaatatctcatcacgttagtagtataagaccccgaaagcgagcgggttccgagcgggtgtttaccgcagaatcccaaacctatgggaggggtgcaggcctttgaagatgccgcccaaataccaaaacctatcgggggtgttcgaatcccgagcctatgggagggtgttctttgaagtctgccgccttggggattttattttccccaaatcctcgcgggtgttttttcattttccctccccgcgccgcgcagtgccgcggaaggtcatcaatcatccgtctgtcaccaaagtgacgggtggaggaaattcaattcttgcaaattaattccaaatctttttgctcgcacacaaaccttttgggcggttttattttacgaaatcctgagattttttatcatgatttttttatcctgaaattaa

SEQ ID NO: 28867 - DNA, 1047 bp, Heterodera glycines
atgcaaatttgaaagcgaccatttgtagggctcaaccgtagatagtaatccgatttggctgaaccccacatgtctaatgatgtagaaaaaagggatagccatttttctgagaatatctattcttacctacaatgcaaatttcaaaccgaccttttgtagggctcaaccgtagatagtaatgcgatttggctgaaacccaaatgtctaatgatgtagaaaaaagggatagccattttctgagaatacctattcttacctacaatgcaaatttgaaaccgaccatttgtagggctcaaccgtagatagtaatgcgatttggctgaaacccacatgtctaatgatgtagaaaaaagggatagccattttctgagaatacctattcttacctacaatgcaaatttcaaaccgaccatttgtagggctcaaccgtagatagtaatgcgatttggctgaaacccaaatgtcaaatgatgtagaaaaaagggatagccattttctgagaatacctattcttacctacaatgcaaatttcaaaccgaccatttgtagggctcaaccgtagatagtaatgcgatttggctgaaacccaaatgtcaaatgatgtagaaaaaagggatagccattttctgagaatacctattcttacctacaatgcaaatttgaaaccgaccatttgtagggctcagccgtagatagtaatgcgatttggctgaaacccaaatgtcaaatgatgtagaaaaaagggatagccattttctgagaatacctattcttacctacaatgcaaatttgaaaccgaccatttgtagggctcagccgtagatagtaatgcgatttggctgaaacccacatgtctaatgatgtagaaaaaagggatagccattttctgagaatacctattcttacctacaatgcaaatttcaaaccgaccatttgtagggctcaaccgcggatagtaatgcgtttttgctggaaaacccacatgtacaacggtgtagaaaaaagagatagccatttttctgagaatatctattcttacctacaatg

SEQ ID NO: 28868 - DNA, 783 bp, Heterodera glycines
tttttgcgattattaagctcaattggtaggattttcatttaaaaaaggataaaatatgtatcaatttaaaaaaaaactatgaggaatcatattttctttataggaaacccacgagtatacaaaaaaaaaatgaaaataatctaatttctgtagagggattgaaccaggggaaagaagcaaggaaagtcaaggagactagccactaggccatttgcacacttaggagttttacttttaaagaatatattaattattattttttatttttccctttgactccaattttcttcactaatttttcactcagaccccccattcttaccagtgcttgtttttcccggttcccggttgccctaccgggaccgggaccgggacctgagcttttcaaaacccgggaccgggaaccgggacaaacacgcactggtaagaatggggggtgggagggtggaagcccttggcacatcgattgcaagtcgggcctgaacccggcacaatcgaattggttcggccttagctttgcctttgcccaattaccgtcgacccccggcttgcaaatgcattgtccgcttgtttggttgcaattgcgcgacaatgagccgatcggatggcaaagacaggctgaaaaaaacgttgtccttaatttgttgtgttcctttttcttacgtttgcacgccttccgatgagagatcggtttgctctgatcacgaaaataaccaaagcgaccaatactgtaggaggggagaaagagcaattaggaaggtcaaagagccaaatgttaaattg

SEQ ID NO: 28869 - DNA, 1061 bp, Heterodera glycines
tttcattaagattttgcatcgtccaaagttcgtccgatagaattcaaaattcaaatgcaaatccgccattcccccccccccccccttcggcgcaaaacaaaacattggccatgaccataaactgatgattgaacacaatttttatgttttagttccgttttaatttatttttcccctaattttgtaaattaaatcagaaaatgccaaaaatgaaaaccaaaggaacaatcgcttaacaattgaaacgcatgcgcatgacttctgaaacggcattttgaggtggaaaagcagtctctgctttgtttgcccccaccctttcctttctcattgacttcccttttttctttttgtcttggctttatttatgcgttcattaattggacaaaatgagagaatatacaataatctgaatgggagaagcactgcttctcctgctgctgtgcttcttctcccccccccatttccctctttcctttccctttctttgcttttcattttttcttatttttgtcagactttttttatttgcttcaaaataaataaataaatataaaagccgtcgtcttttggcacttttccaaagcaattgatcaatcaaattgatcaattattcaacggcgtctctcacccccccccccccgtcgtttttcctctcttttccatgggatggccctcccctcgtcgcatttgcccaatttggccatttcattccattcaaatccattctcattaaagcccccgccctctccaaatttgttcagcttctctccaacaaagtttggtcttcggcccgttgccgttaaggtttttcagtcatgaaattttgaattttcgagtcgactttttaggggggggggcaaaggaatgattaaatgagaagcatccattcattcactctttcgttcgttcattcgtcgcatccttcccaattttggatggatttgtgaatgaacggacgaatgaatgcataaattccatcccttcgctgcccatcttccgtttatggcccactttttttacgtcgcttcggtgagcattgatgagcagcacccgccgtaccc

SEQ ID NO: 28870 - DNA, 767 bp, Heterodera glycines
taattagtaagcaaaattcattttaatttttcaataatttttatttgtcaaaacgaatgttctttttccatccattccctcgcccccgccccatttaaacccaaagcgcctttttggacaaagaaaagcattgctagcatattcgtggtcaatttgttgcaaatttggcgcgctattggcccaaaaaaacactcagaaaatcggacagaaaaattggacagaagaattggacaaataaattggacagatgttggcttagccccaggggaagcaaaaaatatgcaaacggacgaaaggactaaaaagagacattttatgcaataaaacgaattcgaagtcgcaaaaaaggttttattaattgcgctgatcagtgaacagagagaggggtgctatgtcgttatataaaaaccatcaaatggagattttcaagataaaactgtccataacttttgtaaaaataaaccaaattaaatattattcatatcattccatagccctaacatttctctattagctcacctaaatttcaaaaaatttggtcaaatttgagcaaagttatggccaaaagtacccaaggcaccgggttttcaaacatttttagctataacttttttgaacctaacgaaattttttgaaattttgcaggttaatagaggacacatagggccatcgatagcaaaaaaataaagaacaaaaataatttctaacagaaattttttaataagaaataatattattttgatcatcaaaaatgctgatcaaaacat

SEQ ID NO: 28871 - DNA, 1459 bp, Heterodera glycines
tcaaaataaaaaaaatttgctttttgagtttatcagttcataacttttttgaaacttaatgaatttttttgaaatttcgcaggataatagaaaacacttagggctatatatcaacataataaaatttgattcattttgggcgaagttatgaataatttctgtcaaacatttttaatttgatggtttttgggtaacgcccattttgatgggttttgaataagacccggcaccgtcagaaatagaggagtttctaattgttgtggaaatgcggaattttccgcgctttggaactctgccgcatttttgaactcatgcgccgcttttttggttatttgttttggaaaccctggttaaaaattctgcaaaatgctccccgatttttaaaatttaactgaaaaaattaatttgtctttttcttttgctgtggcgccaattttgcactgcaccgattcttcaattgtaccaaaattttcaagctttggttttattatacccgttttccaccaatttcaagccgggcacccccattttgagatcaccacccccatcgattagacataaacaaaatattgaatattattataaaacaaaatgattgaaaataaataaataatataaatttaaaggaaataatcggctcaatgggagtttgtgccttggacctatttttattcacatgtaccatggagaatgttgaaccaaatgatgacattcagcagaacaatatgatgaacatgttcagtgttgaattcagcaacaaaaataacaacaacacatttgacatgaaaaggcaattgaatgtgcgcgatttgaatattaaaaaaattaccgtaattaaataatagaaaaattaattaatgatattcagctgagcccaatgcagcccagttataagccacgtgcgcttgttttatgtattagccggatttttctctttgaaaaatggcaattgctaattgcatgtctggaagcttatcgtatttttaaagtaattttattggattcatttgaacgcagcaaaaaataaaatgtttgaaaattaaaattcataatttttatttaaaattttgaaaattggaattacactttctgaattatttcaatcattttgcacaggttgacctggttgttgcctatgttcaaagtgccattttatcagttttcgagttgatgcgagcatatgaaaaggatggcatattgaaaattcggcctggcatccgtttcccgcaccatcgcggcatgaaatgggacccaaatgcggaaacggagttggaacaaactaaaaaataacattacccattttccgatgcctaggtttaatggccaaattctgcttgcccatgaatgcttttatgaacaccgggaaagtgcccaattcattggcctgctcgacttggacgatttgctggtgccgtcaaagaattttgaggatttgcccgcggcatttttggccgctttt

SEQ ID NO: 28872 - DNA, 1764 bp, Heterodera glycines
  unsure (1)..(1764): unsure at all n locations
aactcaaaaatgttggtataaatggtactttactaaaatgctttcaaaattatctacaaaatcgtacatttttcgttagagttggctctgcgttttctgatgaattcncatgcttaagtggtgttccgcagggatcaaatttgggtccgcttttatttntaatttacatatcagatcttcctnaatttttgtaaaactgaaaatgttgaaattaagctttttgctgacgatcttaaggcctattctattctctcaaaaaatactatttctccactccattcttttataagtattaacaaatttcgggaattactgtgaattaaatggccttaaaatcgctcctaataaatgcatagtttcacatcttgggcctaaaaaccccaatgaattattactttataaataatattccaattttaaaaagtgaaaaaggtgaaccagttagagaccttggcatttatgtttcaaatgacttaaaatgggaaaaacatatagaatttattaccaaaaaagcaataagaacatcttttgctttactcaagtcacttaaaacaaaaaacccaaaaattcttataaatatatttaatgtttattgtcgatccattttggaatttggttctccggtttttaatccatatatgaaaaaagacatcgatgctcttgaaaatgtccaaaaaacatttttacgtattatttttagacgtaataataacaaggatgatatacccgggtataacgaacttcttcaactctttaaacaagaatcccttttaaaacgcagaacaaaaatcgatttaaaacttttccatgatataattttgggaaagatccatattcagcataatgattctttttcaaaaatatattcaggactgaaaaacgattatattataaaaaccgcttattgttcaaccaatgttcggtttcattcgttttttattcgtacctctcgcctctataggagtttgcctaaagaggcgaggttacttaattctactgagtttgctaaacttcttgacacctatgatattgatgttttacttttgaaaccgccccatctcattcagtgaccaattttattttatttattttgttttaatgtcggtgtcacgcttttgcgtataaattgaattgaattgaatatattgcattacaaaaactacacttttccatttttcggtggaagctgacaccagcggaagggggggggaggacaatcgactggcacgagggaggagagaaggggggcgaagaccacccaaacaaacgtaaaaatagcagaaaaagaacgaggggggagacggttgggcagaacgccacgatatagaaaaaagacaagcgtttggattcaatccattggtgttgttgttggttgggtgcgtccgaccgagcaaaggccaaaatgcgatggggagacagaccattttgtggttatgtatttattatttaattttatttgtgctactactttaaattttttttaaattaaaaataaaatttatagctttttagtcgaaaatttggtaaatattattattaattcatagctcccaaactcaaagctcaaaaatggactgaatcaattccaacagttagagcagttttaagtttgggagctatgaatatgatgaatatttaccaaattggctcttgtccgttttctgtatccctgccataattaaagacggattttgagaaatatggcctttttctgcccactaatttccggatataaaaataaaaaacagtgtttcacttcgtttg

SEQ ID NO: 28873 - DNA, 693 bp, Heterodera glycines
ttctttgcgataatggatgtccagcagctgcaccatgcgttcgctgtactcttcccattcaaccgcccgcaggcgaaattgctcatcgcaaatcacccacagtggacccagtggcgtggcaattttttcttcaagtaatctcagcatccgttctctcttaagacaaacgtgggtaaatacccggacctatcggcagaccgacaagataccacgccagcaacatcagcagccataccaccaaaaagataagtggatagggcaagactaacgaatagtaagtacccagtttcgcgtctggtttgtagcgttgcaggaatccaagaaacagtggaacaaaaggagataccggcgctaaaggcaatacggatgagtcggcaatacgaaagaggatttgcgcaaatgccgggtgaaagccaagtagcataaacattggtacgaaaatgggggcgagaatcgaccagattgcggaaccgctggcaataaacatgcataagaaagaggaaagcaacgccagaccgacaaacgccgggatgccgctaagccctgaactttccagtatatcggtcagccccacggcgatgaatttccccatgttgctccagttaaacatggcgacaaattgggcgaggggaaaaaccatcacgataaatcccgccatctctttcatcggttcaatcattaaatgcggtaaat

SEQ ID NO: 28874 - DNA, 1405 bp, Heterodera glycines
tgaggaagataaggttgatatctgttctccgcccccttgactcaccagagttattgtaccacacattcttaccgtatttgctgtagaaatgctctgaccgtaccgcaccgccgttggccgagatcagctgtccgtccttgtcgtgatagttgtcggggttgttgaactgctcgaagtcgaagtactccgggccgaccactgtcgtctcagtcgtcgcttggtccaggtagcgccgccacggcaccgtccggttgagcagcagcaaatcgccgatgatgatcattccatggctggcgcgggagatggcgacgtctacccgcgcggcataagcccagaagggctgcgagtcggctccactgtcgaggacggagcatgttgtgacgacgacggcaagtgacgactcgtgcccctgtgttgcgtccgctgttgtcactaaaatgtccgggatttcttgttgggccaccaaccgttcgatctccagggcttgcgcggcgtagaagcaaatgcagcggacgagtgtgcctgggaaggcccgcgccaaacgccacagtgctctcatcgccgtgtctgtttgtccaggattggccgaagaagtggacacttcgtcgcgttgcgcaggcgtgctctgatggaccaaaattagagggactccctttttcggcaatttgaaggccgcttggtcggtcatgagtgcccgctcggagtcgtcacgtcctggtgtcaacagctcgccgtgcggtttgtaaaagccggcctccgtgcagcggaccagagcagaatgtgagcgaaaacagaccgacaatgttgtgacgtccgtcccttgcgcaacatccaggttctggatgaccgtgtccatgccgaagccctcacggattgcgatcggcagggagggcaaatggacacgcagttggcggcgatcgccggtgatcagtaccttggttaggcaggggagttggcttaccaagttgaggatttggacgtatggcgcctgtccagcctcgtcgatgatcaaatgcgtcgtctccccaaatagtgcaggtagttgctcacaaaaggacagagtggcgaagcacaggcggcgatttttgtgctcctgcacaatttgaatacaaaaagcacaacaattttcaaacaaaaattgctttttctcattttgtcagcccaacaaaaagcggccgaacaaaaaatgacacaaaaaagtgaaaagaaaaaatttcgcaatgttttgcgtcgaccaccacccctcggttttacactttgtgaatgtaacaattaaaatatgctttgaacaaattaagcattcattaatgggcatttaatgatcaaattagggtgcaattggaatcggggacggtgtactgttgcagtggtttgaggatgggtttactgtaggtgtcgatgttgg

SEQ ID NO: 28875 - DNA, 1434 bp, Heterodera glycines
cgcatcggttcggggggactgccccgaaaacaaaaaaatcgattttttcaagtgtccgtttggggtactcaaacaattatggggagcaaaaatccaacgcagaattaaagtacaggctatagggaagctattcccgaaggattcggtctccccataaatctgggcgcatcggttcggggggactgccccgaaaacaaaaataaatcgattttttcaagtgtccgtttggggtactcaaacaattatggggagcaaaaatccaacgcagaattaaagtacaggctatagtgaagctattccggaaggattcggtctccccataaatctgggcgcatcggttcagggggactgccccgaaaacccaaaaaaaaattttttggataaaaattatttaaatgaactgactagataatatttaaaataggttatttctcttcctttcagtatccctgcaaagtttggtgcgcttctgatcagtttctgaaaaaaaagttaagcctaaactttttggcctgtttaaaaaggaattaaaaatttttaaaaattttattcatctccctttttgatagaaaaagcatcagagtgcctaaactaacatgtaaataaaatttggtgcgtttcagaaccctttctgaaaaaatatttaagaattaattttgcaaaaaataaataaaaacgaaagactcagattttcgaaaatttttttgagccagctagctcggcgctcatttcagtgtaagttagtcctttaccggggagtatccctgcaaagtttgggtacgcttctgctcaattagcaaaaaatatgagtgatcgaattttcactaaaaaagatgcgagtatcgtttttgttatcgttaaatttatatccatgtttggcatggcatgattcaccgctaaccggagtaggatagagagctaatcttgagggtagggtggattccatgagataacaatagatgacgacatatacaatagaggtgcaaggcgatatcgtgacagatgttagataagatcgtgtgatataatgggcgtatcagtcatgaaggaaaaacctagcctcttaaacatcagaatatgtaccaaaataacaagtaaaaataaaaatgaagacttttaatcgaactaatcttttgagaactgagttttcataagaagcaagaaaaaaaaaaacaaaaaaattgcatatagcggattcgaacctggtgcgactgatactaaagcattacctctacaccatttgacaatgcgactggatcgcaacaattatttaatttggtcgctcatcaaacaagtttggcacgtcctatctcggcactcatgctcattcgacaaaaatagccaaaacttcacaattagaacctgggcgtccatctatcccacccaccaaatttcatttggaaatccccacggccccttgccgacccctccttt

SEQ ID NO: 28876 - DNA, 1035 bp, Heterodera glycines
gggggggctgtcggacatacaccgtcggaaaaaacaaatgaaatttaaaagaaataagtcaacacatccaaacattcgccaaactgggattttaagttgatacttgaaaaaattaagtaagatattgtggcccgacaggcaccaaattatttttagaaataattttaaaaaataaaatgaaaaaatctaccattttcggggttgaacccaagcaaaaatgacttaccaactaagctatgtacatcaagatcatgtgattaacaccacccttaaattggtcctactcatctttttccagaaaaattttcataatcccttataaatttctttcgaaaattttcccgattttcagtgtattttggggtgtgcaggtcaccatgaaggagtagtctgatcaagttggtgtaaaatatgttcttttttgatcaatatcaaaatttagcttattgttagcaggataaaattcagcagcagaagcggggaagcaaattgaaactttatttgttttttaccggcataaataattacaataaattaatttccttcacattatgaatttgatttgattgttttttccaaaacaatccttactcaaacattagtaaaaccattaaattaagaaatattaacattataaaaagactctttttgaataattattaaaaatactgaatcgattaaaacggcatttaatggtcactcattttgaattaattgcctccattgacacgaaaaacaaatgtttgggaaagggaggacaaaatgacagaatcttcgcaaaagtcagcaatgcaaatgaatgcattgtttatcatatcgattttctgtttataattacggaaaataaaataaacatttttaaaaagaaattaatggaaaccaaaaaagataatgactagggagtccacaaatatgcaccaaaaatggcaaaatatgcacataaaaagtgaaaaatatgcacataaaattttccaaattaagcgtaaaatctctcaaaatttcttccaattcgttaaatttaagctaaaatagcta

SEQ ID NO: 28877 - DNA, 983 bp, Heterodera glycines
ttgttctttcgctctgttctagagtccttaatttaattatattcatattgacgtattttataaatttcctatccatttcctatactatttccccgtgcttttcctgtctgcttcatttggtcatcacttaccgcgttcgttctcttcctcttccccctcttttttctcctcccttactctttttcctctactatgctttatcttcctctctcctcactgtgtcctgcttcgtcttccttcctcctcctcttcttctttgttgtgctctgctttatcttcctctttctacttttcgccatttttcttcttcctctttgttgctgtactgctccatcttctcttcctcttcctgtgctcctcttccttttcccccctcccatttcctctgttccacttcacaaaatggacctcgaaatgaacttggaataagaattgttttgcgcttctcctccgtccatcctctcttcccccccccccccgcccgccccgcgtcgcttttgtgtgtgtgttcatcccgcgccctccgtttgtcgcgtttccgtccgtccgttttattcctccgcccctccggcaacggcggcgctgaccgttttacgcgtgcgcgaaaaagaaacgcaaaagtggaagccaaacaatggacggaagatcggcggagggagaccgaacgacgaaagttggccccctcaattcgtgtccaattctttcattcatttgacctcccaccaccgccggcggtcagcaaatgatgaccattaggaaaaggacagggcaaaaaaaatattttttaaattaaaattcaaaatttggcgacagaatttgaaaatccatccaattggaaatgtgtgaaaaagacttcacatagataagcaggctatatggaaaattgtgcctgccgttttccaaggcttccgaattgagggttcagtaattgtcaaattttttatagaccccactttctagcatttgtaaattaaatataaaaa

SEQ ID NO: 28878 - DNA, 1034 bp, Heterodera glycines
ttcttcgacgtggccatcagcgggttgtttcgtgacaaaaataaaccagtttgatgttattcgaatgagctagacgcgctctacattttcaaatgtatcaacaaagggtctaccgccactccctggcgagatatggcctgtcaaagcagaacggggccaataaatttgaatttttgttaatcttcggcagttgcctttatttcgagcctactctacttgtgcatcttttcccaatatggcactgcttccgaattattgaactgtttcacgactgattgttgagataatttttttttccgattcctttatctccaagcatgagccttataagtgattgttcatatccttctcttgaaaaaaattgtcactaaaaaaaacacgttttctgaatattaacaacaaaaatttttagacactttctaaagaggaaggaaaaaaatttttcatttgcctaatatttatttatactgttgaactgttggaaatgcagctgatgccgtcggaaaagctccgattttttggggaagtttttttctttcagtttcaccactgattgttgaggcaatttttttcgccaatttcttttgtctacaaacattatttattgcgtttcatcctgtagtgtgtaaaaaattttcagtaaaaaaaacttgttatctgaatatttacaagcaaaatttaagaccatttccaaagaggaaggaacaaaaatttttgcctaaattttatattatattgttgaattgtttgaaatgcatctgttgtctgccgttttgaaatttttcaacttttcgcgaaaagatttcccagaaaatgcatgggacaaataaaaattaaacttctattatgatcaatttaaatttcctatcagtttcgggtttgctttaaacacgctggcctatgaaaaaatggagttttatggatgtcaaattttggaacttttcttcgacgtggccatcagcgggttgtttcgtgacaaaaacaaaccagtttgaaagattcgaatgagctagacgcgctctacattttcaaat

SEQ ID NO: 28879 - DNA, 835 bp, Heterodera glycines
  unsure (1)..(835): unsure at all n locations
ggtcagaagaaaattttaaatgaaatccttgcaaccactaattaggcttttaccggaaaattagtatataacctcaagccagacacgagaaaatccttcctcagtttaattgacacaaaatgccttacaaattcatcatggccttaattgggcaattaattcctaattgatccaaggaaggcttgacaaaatgccaacaatttttcgggattttgatgccaaatttctcctcgagttttcacatagtttgttatcccagtctcggcaccattgctcaagagtctcgacaaccttgtccagtctcgacacccccactcatttttggaacccataaattttcttgcccaaacattgaatcgcttttcaaatttatttgttttttttcatcgcttggcattctgtggatgtgattggaaaataaactttgttgtgcccttgtctctctctctctctccttctgcttcttctgccattggcacctctgaacagcagcaggtggcggaggcgcttcattaattttgtcgccgggggcaacaaaatttgattttatttttttcttgccccgggccaaaaaatgccactacaattttcaaaaaaattccctgttgacttgtttgctttatgtagctgctgaatttttcttggaagatttatttttgtgagtgggagggggccaaaacccaaacatttggagaaggggggggggcacccatcacccatcaccacgaccaatcggtggcggatcgactcggtgccatatcatcaacaaattggcccattntctgcggacccgtgattattgccatgagaacccccggtggggtttgctctcccc

SEQ ID NO: 28880 - DNA, 1889 bp, Heterodera glycines
cgtgttcatttcctgtgccgacgacgacaaatttgtgttgtgccaaccttggcattttgccctttgcctccgggggcggcgatttccttttgaccaaaactcttttaatggcattggcccaaaataaatttgaagaaatggccaagggatggcaaaaacaaaaaattaagggggtataaattaatgagagcggatttttgtgtttaaattggtttaaaaaaattttttttaaattaatttggcattaaagtttataaaggtgagaaaattgcaaattttaaatttttaaaatttttaaaaaaaattttaagcaaaattcaatttaaaaatcaatgaatctttaaaatctaaattaaaaaagcggtaaaagaggagagaattttgtattttttcaaaaaaaaaaaaatttaactaaaaaaaaatttagaaaatatttatttaatttaataaatttttaaattcttataaattgccatttaaagagtttggcctcaaaaaaaaaactcggcgaatgaatgctgttcaaatttgcacctttttggtgtcactgttttttggcacaacatttcaacaaattcccgctgacccttcgtcaattgatgccaaatatgggccgctgaggatatggcgccaagaccgttttgtgaggtgctaatttcagctaaaaatttaaccatggcttacagggggaaattttccaaaatttttttttttttgaaaatttaaattttaaactaagggaattcggaatgcgaatttcagctgagttttcccgaaaatttttttttttaaaaaaattttaattttaaattcaggggatgagaaatgcaaatttttgatcagggcctataggaggctgattttttttttttgaaaatttaggaagcgaaaagcaaacttcaattgaatttcccgaaaaaaaattgtttttttttcgaaaattttaaattgagagacgccgaaacgcacccaatgaaaaagaaacaatcgtgtctatcttaaaaataataataaatgtcccatgttttgatcattttttcaattttttcgtgtcttgcgttaaatttaaaattaaaaaaataaataaaatccaaaatttaaaacctattttgaatttaaaaagatgcattttctgcatgaattatgacgattacaacaacttgagcacgtacggttgtgatcggcgccgagttgcaacatgtgttggcaacatttgctatatgcgtaagggtcaaaaataaacatttaaattttttttattaggtgcgaaatttgctaaaaaattttggaaaattaaaattttaaacggaaaaaaattctaaatttaaataaaaattttttttgataatttttttattatctttttcaatgacatattaattcttaaaaaaaaaaaattaaattttcaaaaaatttctggacttaattttcttatgggcgagtgagagtgtgggtgaaaattctatgaatttatttaatttttaattttttggcgattttttttttaatttttaaggtcagcacaagaagcccgaatattttttgtacaccagcggttgtgtgaatttgacttggtccgatttggtcacaattcgggcacaaatttcggcacaaaatgaccagggattgttattgttaaacaacaacaacaacaacaacaacagcaacaaattcactttgaacaacaacaacaacaatgaaacgcaactttgcgaggcaaaaaaaaaaaaaaatttatttttaaattttttctattacaaaaatgttttagctaaaaattttttaaaacaatggtgtttattaaattaaaattaattatcggacaataattaatttggaattaattttaatgatttttttacagaaaaaataataaataatttgtttag

SEQ ID NO: 28881 - DNA, 1597 bp, Heterodera glycines
aaatacggttgaacggcatctatggcgccggcggtgctcagtgacgagtagcgctcgtggacagcgccgacggacgacggcacgaccggcgatgggctggccggcgtcgaccgattgtgcgccgtctttttctgtacgaggaaaatctaactgagtgccggtccggcgctcaaatggcaatgccccaaatgagaaaaaacaatgaatcaaacgcaaaaatagcactcaaacggccgtgtacccggcgctcagttggcaggattggaacccatggagcgacggtttaagtgcccgacacttggtggcgcctagttggttttttaccaaattgctgcgtttgctccgctgcggacagtcgccgtcggggccacccgcggcgccggctgtcgggcgccggccagcgcgtgggtaactgcgccgcccgacgccgccgagcaccggcgccatcgccggcggcgccaaaactttgcccgatgcaacaagctggacgctgccggtggcggaaagagcatcctcaaagcaacaagacggttccatgtagacagaactgaattttttttatacaatattaccgtatgttttttatattgcctatacggtatgtttgggtattgtaatcactcaagcaaggtccttttctttcttacccgagctctttggcggttgccgttactgtgtctccggcgccggccgtggtgacataatcttccgcaaaaccgtactttttgaccgaccgttccgccacgcgtgtgctaccgtaccctcggttacggtcaccgtcatcattgtcattgttccacaacagaagtgagacgaccaacaacagcgtgccaagtgccatcagtgtgtgcagcacggcttggccaccctccaagtggctgaaaaaattttatggggatgttgagatcactaattgggttaattcgagccgaggcgttgagccttcgcgatagcctaggattacggtaattaagagtctcgagcaacgacagttaatatattggcaaaatgagtctttggacttgagaaaatacggagatgatttgaaaagtgcggtactcgagagtctaggtaggagtaaaaatacagtaagctaaaaccaaccaaaaaaagaaaagattcagagagagatagagacagagtgagagagacagagacagattgagagagattgtgagagagacagattgagagagattgtgagtgagagagagagagagagataaagaaagagacagaaataaataaaatttaaattttcaccaaattacagtatctgactgtgtctgtgtactacagtaattgccccacctgtactgaattggacagtgctccgttgtttgctgttgctccgattgttccaccgaatcactcaaattgaaatgcgattcgcacaacggcgtgtgccgtagaaagaagctgtgcccaaacggaaggccaaacgagagctaaacaaacaaaaaaaatgatgtaaaaaaaatttcaatttcaaattttctgatttgggagggttcgataggttctctctttctgatcagtaaaatacagggaaacaaaaggttgagcaagcattgaactctgctaaaatttttagagg

SEQ ID NO: 28882 - DNA, 922 bp, Heterodera glycines
  unsure (1)..(922): unsure at all n locations
caaaaatatttttcntggggtattttgatatgctgagcatgaatctgatgttaattttcagtttaggaaattttagaattttttaaaaattcaaaaatatttggcaattttttgaccctcaggattttgggctaaaatttgaaaattcataactcaatggaggaccggtcaatttaagtgaattaaagctttaaaaatagcaaaaaatcgggagaattttatgggatttatttgggatttctatcttctaaagaaaaaaagttattccagaaattctggaaattttagatttttcagaaaaaaattcagaactcccttctgaaaagtcattctgtaaaagtaaaatactacaaaaattcgcaatttttttctctataatataaattttattttacatttttatctcttttttgcgaattgttataaaaataaaagtgatttttggtttcgggaccataggggggtgaccaggatttttgggtggaaaaattttttcaccgaaaatattccaaacacatgtctttaggggtattttatgacgctgatcacgaatacgtgatcagattttacttttgacatcgttcagacctcagaatccctgtgtgattggggattctgaggcatcattttgaggggggggggggaagttcgaatccgggcggtgtacattatttttctttgtatttttgggttatttttaatgttttaattaatttcaagatttttataaatatttaattaatttatttaatttcattatttattttttgaatttataaaaaatgaatttcatttcaaaataaatattcaattattaattttcaaattatatttaatgaataacaagaatattttattattaaaaaaattttaaaattaaaatgcaaatccgatttttataaaaacttttcattatttattt

SEQ ID NO: 28883 - DNA, 1497 bp, Heterodera glycines
  unsure (1)..(1497): unsure at all n locations
gtacgattttgaaattgagtaccaacaaacattggagttcggcctagccgatgtgctttccctacttattgcgaaaactccgatgccagaagacgacataattttggccaaactctctacgagtgctacaagatgaaatttctgcgcactcagtggcccgacaaaaagacgatgcggaggacattgtcccttttcaccgacggagagaagcgttgtcaatcgagaatgattgtttgatgtatgccgaacgggtcgtgattccaaaatcacttcaaaaagaagtgctgcaacgattacatcactgacacccgggcacaaaacgcatgaaaaatctcgctcgtcagtatgtctactggcccggaattgacgatcaaattgaagaaatagtccgttcctgccaaacatgtgcttcggaggcaaaagcaccagtaaagactatccttcattcatggccaaaatccgatggcccatggaagcgtgttcacatggactatgcgggaccattctttgggaagatgttcctcgtcattgtagacgcatattccaagtggcccgaaatattcgagatgaattccaccggttcagccgccacgattggtaaattgcgctatctttgcgcacggcatggactgcctgaaacgttggtcaccgataacggtacccaattttcatcgaaggaattcaaggaattcacccgactcaacggcataaaccatttgttttcggcaccttattgtccgatgtcaaacggacaagccgaacggttcgttgacacattcaaacggacgtgtcgcaaattaaagaaggaaggaatcaccgaaatgttgaacacatttttagccacataccatgtcacgccgaatgagtctttgcctgaatgcaaaagcccagcggaactgttcctgcagaggaaactccgatcgacattggaccttttgaaaccaaaaaaccgtatcgtcatccgcgatgaagcaatggagcgtaagttcaatcgacgccatggcgcgaggccgagatcgttcgacttagacgatatggtctacgcccggcatcgactgtcgcaggattggcgacccgggcacatcacccaaaaaaaaggtgtaatgtacgacgtcacttttcaggacggatcagttggacgattccatgcgaaccaacttttggttcgacattctgatgttgatgaggaagatcccctcgacattttgaatgatgcctttggacttccattggcacaggccaatcaacaacttggcgatgttgtggcacaaccagctggaggagtgattgagatagcgccaccatctccgcgtcccgatcagccacagcagctaaacgaggtcaatgaagaacgtgccgttcaacagaatgttcaaaacgaacgaccccagcgaaaccgtcgtccgcctgatcgttattcgcccggatgaaagaacccacttttaaggnggaggtngtcgggatgggaccgttaattttgtaaattatattatattt

SEQ ID NO: 28884 - DNA, 1072 bp, Heterodera glycines
acaaaaatggtcattctcatcccaaaggcattggcctaaaggatttattgcgtaataagtaaatcaaacgaactctttgataacggagacaacgaaacgatatgaacgtaggacaacgacggatcagaaacaacagaagcagcagcaaatggaaactttggcagcagaaaatgccattccgatgccccaacaatcccttacgatggaatgccatggcacaaatattctttgtgttcaggtggtcattctcagcctatatttaatgaggcatgccacaaacagagcgagttcgacctgcgcactgtgcgcgtcgcggcacagtgcgacgcgccggccgtcagtccgtcgttggtccattctgaccccaacctttgccagaaggacgtcgcttcagccgcggcagcactcttcgcatcgcccggcactgccaacaacgcattaacggaagagcacggttttgatcgaacggacggaggaggaaatgccgtggagggcgaaggaaatgcagcggaagaagacgagtcgcgcggcggagacgcggcggacggaggcgcggcgcaccgcgtggagggaagtgcgccacgcagtgcgacgtcgagtcgcaagtcgtcggtgaggtgagacggacgagggaagatgcatcgaaaagccaagaattgattgacctcattaaaggtcaattggtcggatggcaaaagattaaacccataaaatgccaaccgatccaaatgccatcgattgatcacttaagggggcgcctgcggaaccaaagcgaattggaagtgaacgcgcagcactacaaaatgcaaaatgtgtacaaaagtcagcgggcgcgcaaaggcaaaaagttgctgacagacatcgattttgagggcattttgcgaatcatcggcggttgttcgacttggcaaattctgatctatctgatcatctcggcccaccaaatgccgcacgccatgttcaacctatctgttgtttatttcacctatttgcccgaccattggtgcaaagtccgtaaaaaagggcaaaaaaagggggggcaaagaaatggccaacgaaaaatggaagtgat

SEQ ID NO: 28885 - DNA, 995 bp, Heterodera glycines
atatcatgatgcgacccaataatcaatttagttatctcatgattaacatgcaccccaatttctgaggaggaattcagattatgtagcaaaatttttccagatgagactctggaaatttatttaccaattgaatagtatataagaatatgaatttaaattaaattaaaaatgtataaatttagctccgaagtgaaggagaatacagtgttcctaaagaagcttgcctccaccagatcagaacaaaagaagaacgaattaatcgaaaacgctacagctgaccaaattttggcaatcgttgaaatttgtgcaaatatattgagttttagttttaaactaacgaacaaacaaaaaagaaggttggcacaatacgccgatttttatagagaaattgccaaatctcgttcagagaaaacggcaagaaaaaggatacaacaggggagtggtatagccctgggagctgtcttggtcccggtactgagtgttttagcccaacatttattagaaaaaataacatcatgaaatttgcaaagaaaatgttaatgattcccgaggcggaatatttggctctacggagtgcgatgaatagtggtgattatctccaaaatgaaaaagcgagtttagacgcaaaaatttctcagaatttacaagaccccgacataagcgaggacctcaaggcgaagagacatgattggctctataaagaaagacgtacggtaaaggggatacttgaaaatagaccacagaaggtagtgattgagaatcatgtaccaggtccaaatgttgcaccatatctgggcctcaataaccaatccaaaccacaggagaccgaagaaccacggaaaataattattcctaggaaaagacttgaagagcaaactcctgatcctgaatcagataatgatacacttgaggagttaactccggagccccaaacaacatccacattaaaaacacccattacgatcaaaactattatacacccgaccctttaaacg

SEQ ID NO: 28886 - DNA, 1019 bp, Heterodera glycines
aaaatcgcatgtgatctaagcctagaaaaaatggtctaagtaaaatcgtaattacgctcaaaaagcttctcaaacaattttagcgcttcaaattccttctacaatcgcctttatacatcccattatgagcgctaaaattatcagagtgccgaaaatcgcatgtgatctaagcctagaaaaaatggtctaagtaaaaatcgtaattacgctcaaaaagcttctcaaacaattttagcgcttccaattccttctacaatcgcctttatacatcccattatgagcgctaaaattatcagagtgccgaaaatcgcatgtgatctaagcctagaaaaaatggtctaagtaaaaatcgtaattacgctcaaaaagcttctcaaacaattttagcgcttccaattccttctacaatcgcctttatacatcccattatgagcgctaaaattatcagagtgccgaaaatcgcatgtgatctaagcctagcaaaaaatggtgtaagtaaaaatcgtaattacgctcaaaaagcttctcaaacaattttagcgcttccaattccttctacaatcgcctttatacatcccattatgagcgctaaaattatcagagtgccgaaaatcgcatgtgatctaagcctagaaaaaatggtctaagtaaaaatcgtaattacgctcaaaaagcttctcaaacaattttaacgcttccaattccttctacaatcgcctttatacatcccattatgagcgctaaaattatcagagtgccgaaaatcgcatgtgatctaagcctagaaaaaaatggtctaagtaaaaatcgtaattacgctcaaaaagcttctcaaacaattttagcgcttccaattccttctacaatcgcctttatacatcccattatgagcgctaaaattatcagagtgccgaaaatcgcatgtgatctaagcctagaaaaaaatggtctaagtaaaaatcgtaattacgctcaaaaagctttctcaacaattttagcgcttccaattcctctacaat

SEQ ID NO: 28887 - DNA, 1793 bp, Heterodera glycines
  unsure (1)..(1793): unsure at all n locations
gagacgctggcacatacaaacaacaacaacaaattctgtttgaatgatgcggattatcccatggagggcacggtcgaattgttcgtgcgcttcgctccttgcagctcgtccgtgcaacctcctcgtcctgactcggccgatgtcgacatgcgcttgaacgcttattgagccacattttgatcgattgttatcagtccctttgattttgttacaaataatcatttttgagtatgaccttagacttattgttagctattcattatttctggaataaaacttgaaaacaaggcttatccaaacaaaaatatctgttaaatgctgaaaatatatttactgacggttggaaatgcgatcgaagttgtgcagtgggttcttgtcaatgttttcgtaccattttatgtttactttagtgagaggatttttcagtaccggcactaaaaagcacttaagaacagggttcggatcgaaaaattttcaaaatcagaacatcgggtccaaaaaatcagattttggggtcgaaaatcagaacattttgcaaaattgcttcaaatcttttatttttacaatttattcgatcaaaaatgtattanatattatatttttcacctcccatgatcatctttaaaaattttggtgaggaaattaacaaatcgtaaatttcagtgcactcgggatcaaaaaatcagatttttaagaatttttttgcggcgcatttttccaaaaaacttttgggaaatgggcgaggggagagggtccggcgatgccgataggcgccgccggaaaattttttgtaatttcgttctgatttgttaacagattttcaccaaaaaagtgccaattttgcaattaaaagccaagcgacgacttttttttcgcttttaaaaacgctttttttgcggggcccttcttccaaaattttggaggacagggggcccggcaaaaatttgtgattttagtacgatttgttaacagatttttgtccaaaaaatgaccaaattttgccataaattttatatttttttctaaaatagtgacattaggccataaaattttaaaattatgagtttgtttaagaaatcagaacaaattttgatcgctaccccaaaatcagaacatttctgataaatcagaacagatcgcccctgggataagcggaggaaaatgaaaaatgtccaatgagaagggaagaccaatttaacatttacaaaatatgaaaaacttcttgaagtaatgagcccacgaggcctaaccttggaatattcaattgtaaggagcagccctcgtccccaaccctttttaaggcttcgaaaattcaattaatttttctcgcaactttttaagcgattggtggggggtgacgtgcagccaattcccgtgagaatgggagagaaagacaaaaacagaagggaatcatacggcgaacaaagaaatgtcagagggatcagctgatgtcggggagatgaatgtttgttggccaatgatcagctgaagagaatcccagtcgagtaaaaaggacgaaaatttacggagaattaaggaaaattgggggggggggggggaagcattatgaaaaatatacaattaaagaatgaatggcataatgataaagggacggatcaggatcagtaacatgggctaaaatggtgacattgtttcctgacaaatttaaattcaaaatccgttcccaaatggaaattgcaaaaaaaggacaacaaaagttgcctttgaaacgcactttgaatgaatggaatcgtttgggagaatgaacatttcccaattcgcatgatgccact

SEQ ID NO: 28888 - DNA, 997 bp, Heterodera glycines
ttgtccattttaggagtcctcaatgtggtctttggaagtcccagacatagacaattttgaaaccttgagaaacatcatggactcctcaaaacggcaagactatttgccaacaattcaatgggtgaaagcgaatcgaggcgaagacaacgaccgacacgacttgctgtttcgccttcaatgccagcatgtcatccgattgttggaaacaagtaggaaagggcaaggaatggtctaaaaaagtcaaattgtattaactgactatttttggatgggtttctccgaatgttttttgatttgtttagatggtaaaagacaagctttgggttatgtgaaggaaatgcaagacgaagagaaggaaaagtacaaagaagaattggtaaatcgaaaaagaaatgagaaaacttagaaaacgaaaagtcttccagaaacatttgatgttcgtcgtgatgacccacccgcagaagggcccccacgactatttgttcaacgagggccgtcgctttgaattggaatggaaattggccaatgcgataacggactatcgctcttcactgtccacgatgtaccaatggcatttaatcgttttaatcccaactattttaggcttaatgctggtgccaaaaccgtaccctctctcatgacaatgcgagcctttctgaatacttcccgaggagggatggcgacactgcccgacgaattgccggtaaaacaaataatatgaattaaaagtcgattaattttacgcataatttgagtgcaatgtgccggtgcctgagcaagtgcattcttcattttgctgtccaattctgaaggtgcaaagcacagaaagcgtaaggcttttttccattaggtgtacttttatttgctcattgacagaatcccccggttcggctcaattgcggccatgtgatcaggttgatttcatttatatttattagaaggagtgtttgaattgtttttggttaataacgatttttcttttttcacccaatttttt

SEQ ID NO: 28889 - DNA, 1754 bp, Heterodera glycines
cttcccgacttttcctttccttcccttcgttctctgctttattttctttctttgcttagctttacgttcccaccgtcgaagacactttccatgtccaattcggcgactttcgttccgttgaccaaatgccgcagcgctcacttctcattcttttccatgacactgctggcataacggactttggcagcattgagttgagaaaaccgtaccttcaggttattatcgtaataaaaggatggggaaattcgaatttccttgccaaggactgagtcaccaaaagaattccgacccgtccggggtttagtcttcaatactccaataagaccgtgtaaacaatttagagaaaaataagattcaaaagaacagtccccccccccccacaatacactccctcgagctaagcaattgccattttgaggttgccgatgcctttctgctcgtttattccgttttggaccctttggctttaagtcaaatggaagcgttgaaaaaatatttggagagggaaaagaacggcacgagcaaagaacggaaggaagttgccctttctgtgccaatgccttcaaaaaaatatcccttcccttttcaggtaccaattgccgtggtcggaacaaattgcgaaatgtcgggcaaaaaagtgaacacggaaagtgcacttctctgggcgagtcgtgtgaaaaaggtgggaagatgaataccatttaaatttatgcaattgaattcgaaaaaacgctaaaagggtaaaaatggtttcaatgtgctgaagaattaggccgagaaattcgccaaaaagataaaaaacttattgctgcttcaattgtaggtaattgaaaacaaagcaagtaaaagcttagctaattaaagcttttacttatggtaagattggaaaagagaaacgtaacgttgtttagtcaaactgttcgaagtgtccgcgaatgaccgaaaatcagtcgccgaaattgcgcagcacctcagcgaaagactcatccattcattaagtgggccattaactttgccctttttctgtcggtctttttgcatctcattcacaaccagcgatcaaatttgcaggagagtttcaggcatataaattaacttttttttttttttacttttcatgtcattttctcagttttttcgaatgaaacggcatgaaatacaaaaattaaatgcttaaaaatgcaaaaattggttgcgataatctgttacttttaacagaagactcgaagttctcacttagccggaaactgaagccagagaagtcaaatgcacagattgtgatggacttttaatattaatacattgatttgaccaatgtattttattatttcattatattgagaaaaatggaaatcctgtaagcatttgctccaaataacaaattcggtcaccatattttgctaaatcattatttatttattcaaaattttaaaaaatgcattttcgaaataaagctttttttatttgagagttatgtgtgattccttctttttttcattcgtttcaggcgatccaatatttgttttaactttgtcactttacaatatttgttttgacacaatgcccaatactccgccgcctccgtaccccgggggtccaaccgcagagccaacgaaaatgcaacatgggggcattccagtgtaagttcatttggggtaaaaatcagttaagaatgctcacatgacaatttgaaacgatacgaaatttgcctttcctccattttccctgtcattctcagttatccgcctccccca

SEQ ID NO: 28890 - DNA, 1771 bp, Heterodera glycines
  unsure (1)..(1771): unsure at all n locations
acagcagggggagcagctcgtttcccgtttcccaccgccgcccgaaaaaatttaaaaaaataaaaattcaaatagaaattttccaagaaaaaatcttagaaaatttcttgnataagaaagttccaagaaattctatccttttttgaaaattttttaattaattaataagggttttttaattttccaaaaaatccctgaagtttttttcattttttctttaaatttctttaaaaaaaaatttaagattttttgaaaattttcatattttaaaattaaaaaaaaaatgtttgtggaagcgggataaacgataaagttctagcaattaacaatttttcatttctttgaattatacgttttaacaaatcaattattcactaaatataaaattaatttttaaaggaagattttaaatataaaaattaataattaaaaaaaacaatttttaacttccattttaaggctttttcacgcccgtgttgcccaagccattgagaaaagtcagcagcagcacaaccaaaacaagttcaaccagtccagtgccaaaaagccatgtcacaacattaccaagacgtacaaaagcatggacaacaaaacgaacaacaacaattgcaacaactgagacgacaacaccattaacaacaacagctccaactgttggtgggtgatttgattttaatgattagcccagttttgcagtgcatttcaaaaggacaaattgatgaagcaaaataattggggagtaattaaaggaatgatcagaaggccaagagaggcccgtagccagaaaaaaaaaccggagggggaagccgaacctttttattgttgttcgttttcaggccagaaatttcaaaaaaaaatttttctccagttttgttttcaaaattccaacgccgggaagaaaaagcaggaatttttagccgttttcaccaaaaaatgacaatttttgctatttgcgagtcaaattttcaagaaaaatggtaaaatgagggcccgtcggtgttgataggtgtaaaattttgtaaatttaaagcaatttgtaataagcatgtgcgaattgttttggcaaaaagccaaatggtcttgaaaaatttggacccgatcagagcaattttggaattggcatagaaatctggcgaaatgcactgccatttttagcttttccatcaattttttttttgttgctcgcttttttatcaaaatgttttgtccattttctgttcttttttcttctcttttttgttatgcttcaatttttacataaaatttgttcattttttttcaataattttaaattttttaaaaaactttcgtggtggcactcttttcacgcacagtcgtccactcacattttcattattatttccacataataattgtagctacggaagcgccgaaaatttcaaaatttatttttcgtgttattaatagagcccctggattttgaaaaagtcgggatcggaattcgggattggcatcagattggtgtaggattagcgggattgaaatccttgttttgctcccgattttgtcgggatccagatcccggctcttttttcaaaaaagggccgggatcgagagcctgggaaaaccccggcggtatcccgattcgtgtctgggctctaattactatacaaatattcaaaatcaaaaaactgtgaacacatattaaattggaccttgactgagattatatagctaatattntaatacantaaaatttaaaaaagaattntataaaatcatttccaaaaatgccaaaaaaaataataat

SEQ ID NO: 28891 - DNA, 1250 bp, Heterodera glycines
cggcatggaaaagtcggttcaacactttctgaatggcaatgcgataagaaaaaggcaacactgaatttggcttggccacggcaaatgccattcccaattcccacccccttttgtggccgtttctgctgagttggcactgctcaaaggcattctttttggtcttacgctgaaaatttacgtctttttggaccaaaatggccaaattgaaaaaacagaaggaatattattgggttgaatggaatggcattggcacttcctttcccactcagtccaacagaattcccttggcaaccgatggaagggaaagaggtgggcgaagaaaaaaaatgacaacgaaaaatgtggacgaagggggggggggaaatgggataacgaaacaaatttaaaaatgaaaaataattaaaatataattaaaattaaacattgtccattcccgtcgtatgagaaaggaaaggacgtaatgaacatgagcaggtccaaaaacatcacctttttcagtatttctaaattatccaaatggaattggtcaatctgaaaagtttaattttttaaataaatattttcttaaaaagttttcaataagggaaaagaacattcagattattgacacccgaatttcgcattcaaaaatttgaccattggcttttgttgtttccattttaggaaaatttttgaacatttaaaatgaccatgttttaattcgttcatctttttaaaaacggaagtcatctcctaactttttgtaaacttatttgttagttatattgtcttattaattccccattttggactctatgcaaatcttttaattaattacaaaatattaaccctacaattaatttttattaattgatggtaaaggaaatggtttaaatttttcttttttataagaggataaaaacaagttcaccgtgaaaaaaaaggaaaaaaagaaaagatactttttaaaaggcacatgagagagaaagagtgttagagagagaggagagaaagagagaggggagagagagggagagagagcgagagagagaggagagaaagagaaggggaatgggagggagagagaagggagagagagggagagagagcgagagagagaagagagagatagagagagaggagagaaaataaggggaatgcgaggaagatgagatgggagagagagcgagagagaggagagacagagagaggggagagaggagaggaagagagaaacatagtaactaaaaaaggactggcgaatacggtat

SEQ ID NO: 28892 - DNA, 1009 bp, Heterodera glycines
gcacgggtccggcacctccttcaacacgctgtgttttttcgccgttgggccatgaaatttgtttttgtaattccaaaacaatgggccaaatgcaaattcaaggctttgttcagagacttgattatttgctgtatcaactgccattttctttatgtctgcccatttagcaaaaatatatcgaacatttcgaacaaatggcgttccgtttacatacgtttgctcatattcttttccttcagcacatatttgggcgaaatctgaaaaaaaaaacttgcatgacgataaaatcacttgctgcgaaaaacgggtagccaattttaaaaaaatagactgtttgaatttggatttgaattttttcaaattctattttttcataatcatttaattagtatggttaaaaatttaagccatataaaattcagaaagtttgaaaattactgaaaatttgtagtggatccctctgataaaactttctaatttattttttgcctaaaaattttcatccttaataatttttgtcttaatacttgcctagtccaaaatcacgagccaaatcccacagcttcgcaaattttgcaaaaactactttcaaatattccacatcttttctttcctttttattttcctttagcactgtataatcgtacataaattgttcaattgcattaataaaattaattttaacagtatttttctctttattaattggaccactcggattaaatgttccaacaaatgcgcctttaagaaattaaaattaattgactaacagattacaaaaatggatttgaagaaattaatgaatttattcggaaatacctgaaataataactagctaaaagtctatataatagcctaattgttttttcattaatctaaaaatgatcataattttgtgatcaaaataattttttctcggctctcaaaccggcactccaaactccctcaaatatcatctaataacactctatgaacttaaaaaaaattcattaagtaaatcacgcctaaa

SEQ ID NO: 28893 - DNA, 1028 bp, Heterodera glycines
gttgcttagaaaggcacttatatggttctcaggggcgctgaacacgttatgacatctatttagaccaatttcgaaccccggaaacggattcgacctaaagccgaaatccccaaaaagtcggaaattcaaattttttcaacaatgcggcagtgaaattatcaattcgtccatgatttaagaaagaatgtttaagtgattaagaaaattatataccgtatttgctctaatgatcgccccggggggattattgttatcctcagaaagggggggattattagatacggggggataaatggagacggagggattattgttcaaactcctcagaaaggggggggggcaattggagacggcggattaatggagacggggtgataaaaagagcaaatacggtatgttagttgcagtattatatgaatgcgaaaattgattccccattattgttgtttctgtgcatttggttatattgttgaaaaaaatttttgagtgattttctaagcaacctaagatgatttaaaaaattttaaatttgtggcgtacgaaccatatacagtaataagttccttattttttcttgtttttctttcgttctctctttctcttccccctcgtcgacccttcactgagtactgtttttcggtgggcctgagtggtaagtgataagaagattaaattataaacattatgccataaaatatttagttgctttaaaatttgaaaccgtaggtttcttatagcaatggctgcatttaggttgaatctacaaaaatcacttttccaacaagacggcgaaaggttattgggactggcaaatgttaaaaaagactccaaacggaagaaagagctactattatgatatgtataaatgactgatgctccgatacatatttgttgatttgcacttattgttagcctgcgaaagtgatttttaggactttcccctcccccctttccactgtttcccccttcgttcccccctcccctgttttccctcccccttctccccctttttacattcatactgttcc

SEQ ID NO: 28894 - DNA, 1029 bp, Heterodera glycines
ggtattattttgtagtctttttttccacaataaacttgtcaaaccatcatttttcgcaccgtgaatgttatttttattgaattctgaaccggtttgagtagattagactagaaaaaattgaaaattttgaaatcatgtttcccagtagattagaatttgaaatcatcccttctcccaggggtattattttgtaaagtcttttttccccaataaacttttcaaaccccttttttcgcaccgtgaatgttatttttattgaattctgaaccgttttgagtagattagactagaaaaaattgaaaattttgaaatcatgtttcccactcccttctcccaggggtattattttgtaaagtctttttttccccaataaacttttcaaaccccatttttcgcaccgtgaatgttatttttattgaattctgaaccgttttgagtagattagactagaaaaaattgaaaattttgaaatcatgtttcccactcccttctcccaggggtattattttgtaaagtctttttttccccaataaacttttcaaaccccatttttcgcaccgtgaatgttatttttattgaattctgaaccgttttgagtagattagactagaaaaaattgaaaattttgaaatcatgtttcccactcccttctcccaggggtattattttgtaaagtctttttttccccaataaacttttcaaaccccatttttcgcaccgtgaatgttatttttattgaattctgaaccgttttgagtagattagactagaaaaaattgaaaattttgaaatcatgtttcccactcccttctcccaggggtattattttgtaaagtcttttttcccccaataaacttgtcaaaccccatttttcgcaccgtgaatgttatttttattgaattctgaaccgttttgagtagattagactagaaaaaattaaaaattttgaaatcatgtttcccactcccttctcccaggggtattattttgtaaagtctttttttcccccaataaacttttcaaaccccc

SEQ ID NO: 28895 - DNA, 1015 bp, Heterodera glycines
tcggggttccgatttctgacatttggggtcggggtcccgatttctgacaattggggtcggggttccgatatttgacatttgtggtcggggttccgatttatgacatttggggtcggggttccgatttctgacatttggggtcggggttccgatttctgacatttggggtcggggttccgatttctgacatttggggtcggggttccgatttctgacatttggggtcggggttccgatttctgacatttggggtcggggttccgatttctgacatttggggtcggggttccgatttctgacatttggggtcggggttccgatttctgacatttggggtcggggttccgatttctgacatttggggtcggggttccgatttctgacatttggggtcggggttccgatttctgacatttggggtcggggttccgatttctgacatttggggtcggggttccgatttctgacatttggggtcggggttccgatttctgacatttggggtcggggttccgatttctgacatttggggtcggggttccgatttctgacatttggggtcggggttccgatttctgacatttggggtcggggttccgatttctgacatttggggtcggggttccgatttctgacatttggggtcggggttccgatttctgacatttggggtcggggttccgatttctgacatttggggtcggggttccgatttctgacatttggggtcggggttccgatttctgacatttggggtcggggttccgatttctgacatttggggtcggggttccgatttctgacatttggggtcggggttccgatttctgacatttggggtcggggttccgatttctgacattttggggtcggagttccgatttctgacatttggggtcgggggttccgatttctgacatttggggtcggggtccgatttctgacatttggggtcggggttcccatttctgacatttggggtcggggttccgatttctgacttttggggtcgggg

SEQ ID NO: 28896 - DNA, 1972 bp, Heterodera glycines
  unsure (1)..(1972): unsure at all n locations
tgccattttttacacaaaaatagagaaataaggaaaaaatgaaatataaaattggcattttcattaatgaatttatttgaacggtaaaatcataacagcagctggtgaattgcgaaaacaagtgccttaaaaagaaacagagaattggcattttaattaattcattgttaattaatttttgtttggttgttcagaaatttgtttttatcaattttgtttttataattattttcaaaaataggacaaaaatggaagcggacgtcaaattagaaaataagttttcgtgtttttaaacaattatttattattcatctttttattaaattatttcattaatttatatgcatacccatatttattattttttttaattgcttttggttggaatgtgtaaaattttattttgtttttgtcttgagagaaaaaacacagttcatttaaaaaatgtcaattgtaaaaccttttactcaaacagaattttaatttagctgtatattttttttattgatatagaaaattttaattttaattttactttttattttaaataaaattttttttacatattttaaatcaaaaattgattttaattttaatataagcattaatgcatcttttattttattaacgaagaaatctgctatccaatgttaaataaaaagataaaattcatatgcgttaaattttcctttttttcttaaaatgaaatttctgggaaaatttttacaaatttatttttgcctttcgtttttcgttgaatttatttggtcaatgcattttctgcggctaaattccaatttgggagcattccgtcaaaacgcttacatcgatgatgttgtcattgctggactaattgaggcgaattttcgccaccagcagcagcagacgattaaagagcaattagcaaaaagaaaggcaaatttataaaattaattaatttttattataattaaagaaaatttaaaataattaatgcaatttataatttagaacgagactgaaagaggacagcggaaaaactgaagttgtcagcagaaggggaaaatgccggcaaaactcgaagatggaacgatgccaaaaaaggataggatttctgaaactttaaaatcaaccacatttatgcgatctttaacatatttcataaatacctcacattcatttttgtttatttattttattgtaaataaagaaaaggtccacaacagtgaaaatcatccgcttacattgaggacgtgaaaataaatttaaaaatgtcctcttacgaacgagaaaacaattaaaaacggagttaccacctaaccccgaagaaaattaatcgagtcaataaaaaagcaaaatgagtgaccaaatcgtggaaatttttccgtaaaattatcaagttttaaaaatgtttgaatttatgtaaaaaaaacttttaaatatatgaaatcttttgaaattcggcaggcacaaagctcatatttatttatatatatggtggggtgcttccaattgctatttgcttttgataaagttttcaaagtattttgaaaattttttagaattttctgtgtgcttgctttccaatttccaataagtttatggatttattcaatttaaactcaatatttaataagtcggaaaaatttaaaaaataccaggtcataataaattagcatagctgcttaaaaaaagtatttacacaaacttaaacagctattctttcattctgatttgtacaccccaattaagctctctgttttttgtgaatttagataatttatttttcatttcgaatgaagcttagcatgtttttgggggcttggtttcagttttattggctaatttaaacataattacaaatgtatttaatttaaaacgtcaatattattatgccaatattttcatcaaattgttttccangactttcctgccctatttccccgatcatatcgcgtgnntggaanttattcantatagtcccacgaggact

SEQ ID NO: 28897 - DNA, 1083 bp, Heterodera glycines
tttgggaataatagcgacgaccctaatttttctggatttctttctgggcgagttggcttctgaaattctggaaaaaacgtctatctctttttctgctcaacactcacatgaattccaaccacattttcggaataatagcgacgaccctaatttttctggattttctttctgggcgagtttggctctgaaaattttgaaaaaacgtctatctctttttctgctcaacactcacatgaactccaaccacattttcggaataatagcgacgaccctaatttttctggattttctttctgggcgagtttggctctgaaaattttgaaaaaacgtctatctctttttctgctcaacactcaaatgaactccaaccacattttcggaatagtagcgacgaccctaatttttctggattttctttctgggcgagtttggctctgaaaattttgaaaaaacgtctatctctttttctgctcaacactcaaatgaactccaaccacattttcggaataatagcgacgaccctaatttttctggattttctttctgggcgagtttggctctgaaaattttgaaaaaacgtctatctctttttctgctcaacactcaaatgaactccaaccacattttcggaataatagcgacgaccctaatttttctggattttctttctgggcgagtttggctctgaaaattttgaaaaaacgtctatctctttttctgctcaacactcaaatgaactccaaccacattttcggaataatagcgacgaccctaatttttctggattttctttctgggcgagtttggctctgaaaattttgaaaaaacgtctatctctttttctgctcaacactcaaatgaattccaaccacattttcggaatagtagcgacgaccctaatttttctggattttctttctgggcgagtttggctctgaaaattttgaaaaaacgtctatctctttttctgctcaacactcaaatgtattccaaccacattttcggatattagcgacgaccctatttttgcggattttcttctgggcgagtttggctctgaacatcttgaaaaacgtctatctc

SEQ ID NO: 28898 - DNA, 1134 bp, Heterodera glycines
  unsure (1)..(1134): unsure at all n locations
ggggaaaaaatttatttagaaaggttatcacacnaataatttagcaaaaaatttaatttatcttcattggcgttttaatcagttcaaaatgtccatcattaaactcggatgacacgtatttgcacagataaaaaataaaaattgccattgataaattatatattttatatattcattttatatgttatcaaaatcgaataaaatagttggcacttttacaaaacgaccacagtggcacctttacgaaacattcccaagttggcacttttacgaaacattcccaagttggcactttttacgaaacgacccagcacgacttaaaacaaataaattggatttaatttatttgattatttatattatacaaattaataaacccatattattaaagaaagaaaaaactaaaccccccctagaaactccaaaaaaaaaaagaaatatttaccttatggaaaaagaacaagtagaccttacaggggaaaccttctctaacattaggggaaataagccttaattccataaacattttttgaagaaatttcaattatcatataaaagaattttatattcaatattttttcttgttatttgaatgatttatatgtatttcttaatttcggatttctcatatttaatttaattaaaaattatttaaattttttatgctttaaactattgttaattgaataaaaaaatatattttaataaacaaagcggtgaattcgaatttatttgattttttgaattaactcaataaacaatttgtttaaagttttaaaaattccaaggtataaattaaaaatttatacaatttttttggaaaaaatgtgcgtttttttgcgcgatgccgctagacgccgccgggggaaattttttaaaataatttgaatgcaatttggctttgttttaaaaagaaagaaatatatttatatttattgctttttaatgtattgaaaatttataaacatttaaataactgaaataaatatattttattgagttcattatgcagttttatttgataagataatattttgactttcattaataaatatttgcttttcaattcattaagtgctgaattatttaattattatccgcacataaacttgctttgttcctttaaattcaaaa

SEQ ID NO: 28899 - DNA, 1477 bp, Heterodera glycines
  unsure (1)..(1477): unsure at all n locations
ttttcccttttttttttgtgtattttttgggggttaattttttttttggggggggtttaaaatttgtttctttattttccaattactcattttttgttttgggtttttttcggggatttgttttacgtggatttgttttttaaattcttcatgactttttgtcgtatttttcttattttctttatgttttttgatagtattaattnaattattttcctttttctgggttttttcgtatttcatatttcatttttctaataggtattctattttttcacaggtcaaataccccggccatcccaaatttgtgttcgttactgccgccaacgatgcttatttcaaaacccttcgcgtattaattgcaaccataaaacagagatttggctgtaaagaaaaaataattgcgtacgatttgggaaatatcacacagaacaaatccatggtacggttatattacctaatccgattttcgtggataatagcttcgacggattccagctcctatgaaaattcctcaaaattttattaaatcattaaaataagcatagaaatttatgaaaaatttgtggcctgtcgtcaacacctaataaagattctagggcaaaatagtgatttaacccatttgggatttattcctaaaaatcagggtttgaattccgctaaacatatcctgtggcctttggcatcatttgaacgctcacaacttaaattagctattttaggaaaaaaaaataaaatagaagaaaataattttgctcaattataaaaatgacttttttgcatttaaattaaaattaatacctaaagacggatgagcttaattcggtgtgcaaattgacttggcgaacttttcaaatggatgttggtcgggtgcgccagctgagcagttacgcgtttaaactttttgtgattgcggtaattcaaatttatgaattttgaatttttcgttattttaaggatgtttttttggaacatgacactgtgttttgggtggacacatcaattgtttttcacaacaacaacactaagccaattttggcttcaattcaaacgggcaaaattggcccagtgcaaatgccgagcagtgagtgtgaacacatgcaaatattgtgctaaaatttttttaacttttagttacttggcatggtactaactttgcaactcatccgggtaaaattatattaatgaaactatgatcatacaacaaatatttattccatttaagaacttcgtataattcgttagttaaaaatcccactgaaaaaaatataatttatttaatatttattcttaaatccaattcaagatcaaatggttgctttaagaatttttcttatgttcggacaatccgtcagtgaaggacaatttgtcagtggacaattcctcatttgttttatcaatgatcaaaatttgcgaaaatcattgttaaatttataatgagaatttacattaaaacatttatagttacttaataact

SEQ ID NO: 28900 - DNA, 814 bp, Heterodera glycines
  unsure (1)..(814): unsure at all n locations
ataattgaagaaaatttgtttgaaaattttcattaattctttttattaaataaaaaaccaaataattttgtattattttcacttgatataaattaaaatttgattttttttttaaatttttaaaatttttttgaatttttaaaatttcccggtgggtcccggttcccggtttttcttgggtcccggtcccggtcccgaaaaaaaatcgaggtcccggtcccggcttctcaggtcccggcaagtcccggtcccggttttggcaaaaattcccggtcccgtggcactctagtcaaatgccaaaatcttacgaatcgtcatatctcggtcttaaaccactttcaggttaaaaaattaaattttaaatttcttcactctcccccacccctaaaaaaatcattacaacagattctaaggttagatttcatattccctgaaaatccaagactagttcatcataaatattttatatttatcatttttcttttgtaatggtttgcatatgttcctatattcgtaatactaatgcttataaaaaacatttattaatatttttaataaagcggtgatgtaaaaaaatctcataactaatcaggtaccggtactgaccgttactgctaaaaccggtaaaatccattgacgtttttatatagacaaaatctgaaatatagaaaccataggaaatccatctcgatttcatggtgtactccattttcggggtggtaaaaaaataatgttatcttnaaatgttagctatgtgctaataaaccgaaattttaaaaaaattcttaaacttaaaatgaattttatatctctg

SEQ ID NO: 28901 - DNA, 855 bp, Heterodera glycines
  unsure (1)..(855): unsure at all n locations
ttttttgaaacataacgaaatttttttgaaattttgtaaactgatagagaacacttaggactaccgaatgataacaagaattaaaaatttgactcattttgagcgaagttataaatatttttcatcaaatcatattgatggttttttaaataacgactccgcccccgaaaataggataaaaagtcaatcgggagtttgaagtttagaaattttttttgttcgaattcgtttcctgggcttggcattagtcgaatactgatcggcattcccgaaactttgatcaaccattcttgcctgtaacacgcatgtgagcagaaccaacgccgcctttgtgccgatgagacggtcgaacagtcggcccacggcaatggacaaaaagatggagatggcaaatggcaatgccaccacaacgccagtctgatgcatgtcgatgccaattgactgcaaaaaattaattagaaataattaggtggacaattaaaattggaataattaggtcggcaattaaaattggattgtttccgttttttgcctctcctgctgttggcgggcagttcgccccgattcaaagatagggtcaggccagccaaggttggactcgggatgcttaatctcgatatttcaaaaaatatcaagagctgcggtctgtttacccataccaggtggccaaatccggggattttcaaattacccagacacttttccgaattcttcaatgttgattcgggatttttcaaggacaaacaaaaaattttataagtagaaatttaaaaaaatacataaaagtattattattaatttaattttanatttaattttattatgaaaggctaagcaattacattgtgcaaatat

SEQ ID NO: 28902 - DNA, 554 bp, Heterodera glycines
tcttaggtttatgggcgcactctgtttatgtctcgatttatcatttattggaattgcttttcacttcatttcttcgctttttttaatttatataaattaatttaattgttaattttcaatatcaactattatttcttttttttcgaattagtttcaacgaatgcggcagctaatggcttacggtcgattggatattattatattttaaatttttaataattaaaattttatttatttgttattttaaaatttatttatataaatattaagaataaaaatattctttcctacttatttttaatttgttgatttttcatttctttaatattctcttttgcttcaacgcttatcagtctgttttagggaagccaagaatatcggtattggcctattgatatacgatatatagagaccgtatttttaggcacaaaaatttttaaatggcacctaaaatatgcatgaaatgtgaaaaaagcataaagagagcaaaaaaatggcaaaaaagtcacaaaaacatgaaaaagggtagtaaaagttctcacagtgatgtattc

SEQ ID NO: 28903 - DNA, 1030 bp, Heterodera glycines
gggggtttgacaaatttttttggggaaaaaaaaagacttttcaaaaataatacccctgggagaaagggagtgggaaacaagatttcaaaaattttcaattttttttagtttatttttctcaaaccggtttcagaattcaataaaaataacattcccggtgcgaaaaatggggttgaaaaagtttttgtggaaaaaaaagactttacaaaataatacccctgggagaagggagtgggaaacatgatttcaaaattttcaattttttttagtctaatctactcaaaccggttcagaattcgataaaaataacattcacggtgcgaaaaatggggtttgaaaagtttattggggaaaaaaagactttacaaaataatacccctgggagaagggagtgggaaacatgatttcaaaattttcaattttttctagtctaatctactcaaaccggttcagaattcaataaaaataacattcacggtgcgaaaaatggggtatgaaaagtttattggggaaaaaaagactttacaaaataatacccctgggagaagggagtgggaaacatgatttcaaaattttcaattttttctagtctaatctactcaaaacggttcagaattcaataaaaataacattcacggtgcgaaaaatggggtttgacaagtttattggggaaaaaagactttacaaaataatacccctgggagaagggagtgggaaacatgatttcaaaattttcaattttttctagtctaatctactcaaaccggttcagaattcaataaaaataacattcacggtgcgaaaaatggggtttgacaagtttattggggaaaaaaagactttacaaaataatacccctgggagaagggagtgggaaacatgatttcaaaattttcaattttttatagtctaatctactcaaaacggttcagaattcaataaaaataacattcacggtgcgaacaatggggtttgacaagtttattggggaaagaaagtctttacaaaataatacccctgggagaaggga

SEQ ID NO: 28904 - DNA, 1420 bp, Heterodera glycines
taaaattctttataaaaaattttctaagatttttttcttgaaaatttctaagtgaaaaattttcatcttaaatttccgcggcctattttgtgtcggcgatctttcgggcggcgatattttggggtgtacccaacagtactgcctatttttagcataacaaatcatatgatttcatagatcgaaggtgcgcaccccatccggatgccgaactcgcacatctcttcctccacggtcgctcgcttcttggtccacaacgactcatgcggagcaacagttccgtcgtcgtttccgtccttcgggtcgtcctgtgccttcatcgccatgagcaaacgcgtcgactccgactgcggctgtttggcacacaaactgttcagtttgttgacatataacagcgggagaaaagtgctcagccatccgtgcagcgcttcacagtgttcattcttagtcccagcactgctcgccaatgcctgtgcatcatctccagcgttgcggtcattgtcagtcgccgcttgcttcagtcgcttcttctccaacggtgtgtcgtcgccaatgtggccaagaccaaacaactcggcctcgtgctgctcctgttttttgtaggggggattatacgagcagaacactcgttttggtcgatcagatttttgggtttcattttagtcgggggaaacattcccatccagggaaaacctgttccgtatatgacctatgacatggcccattcccgaattggctcacttccttggtgctgtcactggtgtactgctccaagtgcttttcgatgacggcgattatattctgttgctgtttgtgttgtttagcatcagtgctggccgactgatgaatcagtggtggtccgttgttcttgatgttcggcaagaatggcatttgatggtgaactttggccatgtgctcagccaacgcctttcaaaaaagattgacttttaaaatggatcccatgtaggttggggatcttgcttatcattgacaacccatatattacgcgaaccatccacacgaagcacgcgaaattatgatgtacaattgcgtcgtaatcgaaagtgttctaccacaccactttcggtgacctcttcctttttagttacctctgcatcattacgggtgcaagtcaacttagtatataaaccttttccaacgcagtaatcactgaataactcccaaatgctcatttcttcacaaccagctcaaataagttgaaaatcattaaaatatactacaaaaacttactacaaatgccttctccaacgaactattgttcattaccgccttggaggatactgcgaacctcagactgccgcggtgctgcaaatcgtatcctacatccttatattttattttgttgcgttttcttcaactctccacttacatccaatgatagactgaagtgaattcgggctgg

SEQ ID NO: 28905 - DNA, 817 bp, Heterodera glycines
cggaatttagtgaatttttattaaattgtttggacacatatccaaaatttttagtggtatgtttaacagaaaagcagaatttatcttttttggatattaaaaaaggcataccaataaaatgttccaactctcattatacatacaaagagtcataaaatgctataattacaatttatttggagttattattgtcaataaaaagcccagaaaactatcgcgtaatttaatgaatttttattaaattgtttggacacatatccaaatttttagtggtatgttaaacagaaaagcagaatttttcttttttggatattaaaaaaggcataccaataaaatgttcctactctcattatacatacaaagagtcataaaatgctataattacaatttatttggagttattattgtcaataaaaagcccagaaaactatcgcggaatttagtgaatttttattaaattgtttggacacatatccaaaatttttagtggtatgtttaacagaaaagcagaatttatcttttttggatattaaaaaaggcataccaataaaatgttccaactctcattatacatacaaagagtcataaaatgctataattacaatttatttggagttattattgtcaataaaaagcccagaaaactatcgcgtaatttagtgaatttttaataaattgtttggacacatatccaaaatttttagtggtatgttaaacagaaaagcagaatttttcttttttggatattaaaaaaggcataccaataaaatgttcctactctcattatacatacaaagagtcataaaatgctataatt

SEQ ID NO: 28906 - DNA, 2155 bp, Heterodera glycines
  unsure (1)..(2155): unsure at all n locations
taagcgtcttacgcggcacggcatcggcgtcgccaatgacgcaacaattccttccgccatacttggcacatcatccgcaacaacacatgcagcacccacagccgttgctgcagcacaaccaccaccagaaccatcaacaacagcacagaacggtcatcccaacggcggtctccggggaacaacaacagctcatttaccagccgaacaacaacggaccaaccgccggtggcgacaaatactcacactttttatgaaatgcagctgaaatggcccgtttactcacccattcgcaaaaattttggttgacccccccccccccccttttccatgtatgctttgcattcatcatatttgttgtctactcaatttgtccattctttttttcttacatggctctgagatactcactcatcattgaacataagcgaatcgtagtcagcccctctttcggcgatattatagacttaattctttgtaccacatttaattcacccaattgtgccttttattcgcctccaataattcatttgtcactttttaaaaggcatttaggtgcttgctttcataattgaaaagcatcaataaatttgtgttccaatttccttaacaccaaatcacacacaattattttatcagatgagaaataaagaatgagggtacagcagagaactgagttcatttgtattgttggcagataaacaaaaagaattaacggaatgtttttccaaatgaggataatcaacgacgaataagaggagattttaagagacaaacggtaatccaaccaaaggcaaaaatgatcaatcatcatcgtaaccaaaagcccaaaattgacagcaaaaaacgaaccataggacaattactactaattattatttgtaagtgcgtgcgctgttttcttccctcgctctattcggatcgatcagtcagccttcgtttgctgctcctcttccgtctgatcgtgcccatttccgttttcaatcgtcgctggcacatcgcccacagtctctcctttcttcacttcttttccctcctctcccaaggattctcccatcgtctcgttgcccagcccattctctcccacatctctgccttccttttcgccgctctcttccactctctccatacccttcccactctcttcaaccactctcgctttcttcccactctcttcaaccactctcactttcttcccactctcttcctcctcccgctgatcattattcccttcgtcttcgttcaacttccgctttttcttcttcaccgtttcttcctcctccgagccgacaatgtccatcaaatggtttctgctcggtccgtcgttttgcgctgtcactaccaatttcgtggcgctcgctttgccaccgttttcaacaccgccgcctccaaacagtcgcttcagcatactcttcacgttgcgcatcgacggaatcagagactcccttttctgaaaaacgaaataaaaataaattacaataatcagtgaattaaagggcaattagcagacagaagaaagaagaccttcagttggtgcacattttgaagacattcgcgccacaatgggctcgacactcgtcctccaccaccgggcaactcgatagagaacaaaaaatattagcgatctcaatttgcattcgccaaattaatgggttcattacgttcccgctccccccaccgtaaaaattttaatttcttcaaatctagaatttttaaacgggggggggacaaattaatgtactttttacaaaccaagtttcattgtactataatataaagaaaaatgccaacggtatttaaattgcaaattttatacctttccaacttggtttggttacgaactttgtcaatcaacacacttactaatggctggtgttgttcgcgtgggtccagcggattgtcactggaaaacaccgatgcgcaaagatatcgtccacagaggggacagtgaaagttcggctgcggtttgttcatctccacgtcatttgtcgcttgtctaaaatcatttcctgtcgttgaattccatttttgggttttgtcaagcagttcaaactctttcaacttactttgatattggaagccatccaaaaatggccaaagccaagaaaaatcggctctgcacgcccaatttgtcggncaacgcttcgtcgagtacatt

SEQ ID NO: 28907 - DNA, 1157 bp, Heterodera glycines
ctcgatcagaaccccactctcgaataaagccccccttctgagaggggttgaacaataaagccaccgggggctctaatcgagtaaatacggtagttaaaaaataataatttttttttaaatttttgcaaaaaaggagaaaaccataatatttgcaaataatgaaaattcagtaggataaattattgcaaaagaggagaaatcataatgtttgccaataataaaaaatcagtaggataaattttttgcaaaaaaaaaatcaaaaaattaggcaatattattatgtaattttattttattttcagcaagataaatttttcattgtcataagggttggcataatcaacgtcaaaattaatgtcaaacaatgccagatggactgcataaatacggggtggcataagctgaagccatcctcatggcccgtatttcagcttttttccttttcatatagcatttttggagagatgaaagcaagaaaaataaaaaaatttctgacaaatatgaattagagcgagttattacatataaacatcctagaaatagtcaattttgtaggtttgacaataaaaaactatttagtttaagcatatatttccgcaatttaaaaaaataaaataattaatataaattttattttttaagacaaataacaaaaaaattgaactaatgcatttctctcttcctctggcgctgctcttcgcccttattttgacgttgtgtaacaatttctgtgacggaatgcgaaggaataacaataaatcattattgaataatttgtcaaaaaatggcaatacggtgccgcgaacgcaaatatccggaataatgaatcgtcaagctggtcaagagcttacgcttggtcaaccagcaggtacataaaagaagttcggtgaatccaaaaaatgggactcatcgttttaataccgcgaaaaaggaaattgaaaaactgcgctaattttttaagtaaaaactagagcccggtaaaaaagattttacgggagcgggagtccgaaatcgtacgggagggggaatctgtaaaactcccgctcctgtaaaaatcccgttcattttaaacggtagttccggacgggagagggagaaattcgaaaatttagttaaaaactcactttaatgcataaatttgaaagacaatcctttta

SEQ ID NO: 28908 - DNA, 1459 bp, Heterodera glycines
cctctgatcaatcgatcagaaactcattcccctcaaaagacggccgaggggggggggggggcgccgaagagatcggagagacgggcaaaaggcgtctcaaagcaaaacaaaggcaaaattcgccttcagttttacggagcgaaatatcagctcaggaggaggaggaagaggagaatatttcattgtcatctgctatctgtttcatcacttcttctcccttttaatttaaagcaaaaataaaaaaatgccattgtgcaatggcacaatggcattttactatgtataatggatttttcatatttttaattggtcatagccttggcatttttgataatgccgaagaggaaagttcgaccaataaataattttaggcaagaatctccccgtttattttgtcacgacaaaatgcagtcgatggatttgttgcgcgaactcagcgaatattcaggcggaacgcgaagaacaaagcgatgggaagaaaaagcgagagaaattgatcaaacggaggaaggaaaagcgaaaaacgcagcaaatgatcagcaaagtgatcagaacgaagggataccaatcgaagtgatcgtttacccgggaacagcttcacaagaagaagcggagaaaggatatgaaggagaacaaatggaagaggaggaggaagaagaggaggaggagccgaccccggagcaaatggcgcggtggcgtcgacggcgactgctgccgaacgaagtaagcgtgtcaatgaagtgccatctgagcagggctaatcagtgggtcggactcgacaaagtcgtcattctcacttaggtggtcagtgacatttgcgaatttatgagttttgccgagggaagccgactttacacgtcaagcggattatttgttgcgctgttggagccaaatcggaagttgtgcttggcaatggtaagagaagagaagcggaacaaagcggaaaaggaaaaacattttcagtttctgaaaagggtggaagaaactcggcagaaattggacaaaacaattgaggtgaagcgggccaaatggggggagggggacaaatggcacattggcattaaaaggaccttatgaaggggggggggacccaaagggcgaattggcatcagccgatcggcacattgccaaggatggcaccctcaggaaactttaaaggaagtgaatgaacgtcgtcgccatgtcgtacaactgacagaaaacattgggacaataaacgcgagattggctgaaatgggaaaccatgtgagaaagaaagaaagataaacaatttgggataaaatttgaatgttttgaaagttggccaatttggacacacaaattgtggtgaaccatttgaaattggacgaattacacaaacgaattgcggcgctgaaagaaccgatgggaaaattgagaagcgaaggaagggatgaaaagtgaaaaagagacgaacgaatggaagtgaacagtaatgcca

SEQ ID NO: 28909 - DNA, 1173 bp, Heterodera glycines
ttgcggctcgcgcggcggcgcctcgcgctcctcgtcgtcctgcgcatgcgccggcacgggcgccgcatgcgcctgttgttgttgctgcagaatcgccgattttgcgccggcactgtccaccgctggggaggacaatggcacgacgccgacggcaccaccaccgctgttggcttggatggtttggagcagagaagtggcatcggagaaggcactgaattggggggcaaacaattacaaattgtggggggttaaaaatttaaataataaataaatgagaaagttaatgagtcacatgccagtgtccaggccccgaaaaatgtaaaaattagaaccaataaaacgaaaaactaataattttttaaatttttcaaaaatttataaaaaatacaaaaaattttcccaattaaatcaaaaacaaaaagaagttttcatttagaaacacataaaattttcaatcaaaattaaacgaattaattttcgtttttagaaaagttttagaaaaaaaaactttttttccaatcaaaaccaaataatttttcatttttatgcacttacagcagttgaaataaacgacaccgattgcacccattcataatataaattaaattaacaatcaattttcgaaaattgattacataaaaaaccccccaaaaatacggggaatttttcgaaaaaatgctgaaaatttttcatttttttcttgaaattttcttagaaaaaatggtgcggctaaaatggtcaatttaaatattagaaatatattttttttgtttattcaatttttggaacaattctcccgccctttccatcctctccaattaatttggtatgtatcaaatttttgtttatacttttttgttaacgaacacttttatcggtaagcaaaaaaaaaaaaatttgcttttgctatttcaactgagtttactaaaaaaaaaaaaaaaattattttttaatttttcaagaaaaaaatcttataggggagtgaaacggcgtagccagggggaggccccgaggggtctaaagcctcccccactccgcccgaaacccaaaaatttttgaaaattgaaaccataatggcaaaaaaatattcattttggcgaaaaaacggctccaattcctgtaaaatacgccccataattcgggatttctaaacaatgaaaaaacgcccctaaa

SEQ ID NO: 28910 - DNA, 1179 bp, Heterodera glycines
  unsure (1)..(1179): unsure at all n locations
ttctgtagaggatgannccaggggaaagaagaagggaaagtcaaggagactagccattagcccatttgcacacttgggcagtgtcacttntaaagaatatattaattattattttttatttttccctttgactccaattttcttcactaatttttcactcagaccccattcttaccagtgcttgtttttcccggttcccggttgccctaccgggaccgggaccgggacctgagcttttcaaaacccgggaccgggaaccgggaccgggacctcggatgaccgggaattcccggcccggtcccggtcccgtggcactctaatttaaaacattttattaccataatatcaattataattttataaattcgaaatattcatttctggtcaacaattttaatcttagttggctatgattgcccccgtggataaaaaaggcctggatgtttaattaataatttattaaaggactttgccaattgttgtttgtcttacattgacaaaaatgcggacactttgatcaaatctgaggcatttttgcaaattgaacaaagattgttgtgtgaaattttgtaacgtgacgagttacaaatccgcgaagagatttcaacttggaaagcagtaattagttcaaataatttatctaatcaatttatttgattgttccccattaaattttaattgtttttcggcactctgttgggccgatgcgaaatgccgtcaaaatggcattgagtgttcagcagagaatcgccgtcaaatgcttggcccggctcttttcacaattcgcttcccgctcttctcacaaaaggaaatttcagaaaaaattggtaaaaaaaacttagaatttctttgttgttccattaagtcatctcaatttttacagttccatccggcgtgctaacagcggacgaagtgattggagtggcacagtaccaacagtaccataatcatgcgaatgggattttcgaaatcataccgtatgcactaaaatttctgagccataggcgattttggtcatttggaacaattgcgatggatattgaaaaagtgtccgaatttgcacgagaaaaggtttagagcagtcggttcagtgaaaaagtgtacataaatggattgccatggacaatattggcgaaaataaaaacgaaagatgaaagcactgacaatgagaaatggttg

SEQ ID NO: 28911 - DNA, 1068 bp, Heterodera glycines
tatcatgctcgagagtatttgtaacgtataaatttctcaaaataagagatagtcatttttctgggatataagataaattaaaaaattctctgagaaattaaatggcgattgcgcaccgccctccctctcacgctcgagcgcttttgtaacgtataaaatttctcaaaataagagatagtcatttttcttggatataagataaatttaaaaattctctgtgaaattaaatggcgattgcgcaccgccctccctctcacgctcgagagcatttgtaacgtataaaatttctcaaaataagagatagtcatttttcttggatataagataaatttaaaaattctctgtgaaattaaatggcgattgcgcaccgcacttcctatcatgctcgagagcatttgtaacgtataaaatttctcaaaataagagatagtcatttttcttggatataagataaatttaaaaattctctgagaaattaaatggcgattgcgcaccgccctccctctcacgctcgagagcatttgtaacgtataaaatttctcaaaataagagatagtcatttttcttggatataagataaatttaaaaattctctgagaaattaaatggcgattgcgcaccgccctccctctcacgctcgagcgcttttgtaacgtataaaatttctcaaaataagagatagtcatttttcttggatataagataaatttaaaaattctctgtgaaattaaatggcgattgcgcaccgccctccctatcacgctcgagagcatttgtaacgtataaaatttctcaaaataagagatagtcatttttcttggatataagataaatttaaaaattctctgtgaaattaaatggcgattgcgcaccgcactacctatcatgctcgagagcatttgtaacgtataaaatttctcaaaagaagagatagtcatttttcttggatataagataaattaaaaaattctctgagaaattaaatggcgattgcgcaccgccctccctctcacgctcgagagcttttgtaacgcataaaatttctcaaaaaaagagatagtcattttt

SEQ ID NO: 28912 - DNA, 1897 bp, Heterodera glycines
cccgggaaatttatgcaaatttttggaaattcaagacgcacttcagagttggacatgttagtggaataaagggtaaaactagatgataccactccctttttggaaaaagtttttttttcttttcaaaaatcatgaaaacatgtttccaaggggttttctggtccgcttatcacgaatctggcatccatttcaaccaattccaaccttggacccgaattcgaacaaaagtcgaaatttcagagttttcgaatttctcatttttagtctaaaattgtttaaacattttttaattgaagctttgatgacttttagattgtttccttattttaagccgatttagaaccaaaaatgagaaactcgaaaaatctaccatctaaagtattaccgaataaagcctaaataaataaatttgggagaattttatttccagaaattctgaaaatttgcgatttttcagaaaaaattcagaacgccgttttgaaaaggaattttcacaatgtaaatactagaaaatccgaaattttgattacaagaggtattttattttatttttttatcacttttttgaagaaagtttaaaaatgaaattcattgcgattcgggaacaaagggaggtgcacatattttcgaatggaaaatttttttcaccaaaatcttctaaaataggtctttaggggtattttaaggctatagaattgaagaatcattctgagggggggggggggagagttatttccggatccgggggaagtaaacgatttttctatattcttttttcatgtttattaaaacatttaaacggatttcaatttagaattaattaatttttattaaatagaaaaagaaattatttttcaaaaaaataaaaattctatttattaacaaaaattgataaagaaatgaattttttctgtcacattataatttgctcggttcgagaaagttaaaaaagtaaaaaatacagccttagaaggtttcttatgtttttttaaaaagatgctcaatcgagccaatgatcaattccttttgtggtaagtcgaaatgacagtgcgtgtaaatatttttccagatttgtgacaaaaaataattttttctttatgaaaaatgacaaaaatcaaaaaccctataatattttagacttgcaaagcttctattctgatcactttatttttcaccgatttttttatgaaatttttaataaaaatttaaaatttacgaattatggaaattatgcattttgggccccagtaattgcgggtttcagatttccgtaattcagaaaatcgccgtaattttaaaatccagttatccgatatgttcaagctacctgctaatgagtatagtgccgattcaaatttaatttctttgacaatttcatcggatttaaaatcggcatttaacaaattaacaaaactctttggtgcaggtacaaatgacagatcaacatccgtcaattttgtctcaaatttgatcaatttgacgcgacccgaaatgaatgtcacattggcactatgcaaattctaaagcggatttctcaaatataaaatgaaattaatttaaattaatttttttccacttatttaaataaccattttaaacgcgctcaacaaactgtccttattttctccataaaaattgtacacatttatatcatttggtacaaaacaaatcaaatccatgtcagaaccttctaactgggcccccaacaaatacgacccattgtccattaatgtataatctaaaaatattgtaataataaattataactaaaaaataaatatttatattctttcaaattattcaacgaaacaaaaaagcgtataatagtctgaaaaatagctaaatactttattttagattatttgaaatatatgcaaacaattttgcattgcttcat

SEQ ID NO: 28913 - DNA, 790 bp, Heterodera glycines
tgtcgagatgggtgtcagatacgtgatctgtaaccttccttaaccccccgaaaacacagggacccacaaaacgattttcccggtggcaggaaattgaaaaaattttattttcgtcggaattcgtgtttgttttttaaatacggtttttaaaattttgaaaatttaaaactcaatcttttctaaaaattattatacccccttttctttcagtgcttttcttcgagggcattgtcgaccttgcgttgacacgagcacagcgtgacgaccccaacgaattggcattggtggcatacaaagtaacggatggggaaaaaaaatattttttcaaaatttttttgcccttttcagaaacacattggttgcactgccgctgaattcgtcggtggttctgctggatcaactgctgctgttgctggtggtagcagcggtggcaccagcagtggaatttcgtcctcgtacatggcggcgccgggcgcaagcagttcaaccgcggtggcggacgcatggcgcaagcgccaggaggcgtacaactgtgtgctggagacgttgcgcttgctgcacacgctggccatctcatcacgtggtggcgccggtggtggcaccactgctgctggtggcgggcgtgctgctgaacttgcccaactccaactgggccaatgcgtgttcccgtccgcggacgcgtgccgaacgcaactgtcaccggcccaagcggagatggagcggaacaaggtgtggtggtggtgattatgtgctactatgttacttattaatagagacaaactaataatta

SEQ ID NO: 28914 - DNA, 1060 bp, Heterodera glycines
agctctgtccgttccatcctcatcggtttcacgtcctcttttactctctcttcaaagtgctttgcaactttcccctcaacggtactgttcgctatcggactcgtggccgtatttagtcttagatgaagtttaccacctgatttgggctgcgatcccaaacaacccgactccaagacacgtaaagatggataggcaccgccagttggacaggtcttgcaccttctctggagccccggtcaagggaaacttgaacaagcgggccaacccaagctcacggtctatacgctacacctcgcaacccagaggagctgcgattcagcgctggactcttcccagttcactcgccgttactacgggaatcctcgttagtttcttttcctccgcttactgatatgcttaagttcagcgggtgttcacgtctgagttcaggtcgaaaaatcaaagcaggaatgccagtaatccaggcactccgccacagcatgcaaagcattggtgcgcccgagttacggtccgtaaaacgcgaattagaaccacaagttcgcgccagcacaccaaaaccccacagccgagctaagcaagtaacgtaagaacacgtacaagtacatgatcccacgaagcaacgcacaagcagtgcattttatggtaacgaccctgaaccaggcgtgccaatggatgtaactccaatggcgcaatgtgcattcgaatgttttgtgttcaaggtttctgcagttcgcactaattatcgcagttggctgcgttcttcatcgatccacgagccgagtgatccaccgataagactagaattcattcttcaacagaagtgtaaaaaaaaataatgaaaaaaaagaaaaagctggcggtgcccgagctgacactcattgagtcttaagccacgtgctaggccaagcacgggccctaccacgtcgtctcatcacggccacggacgtagcagcaagcacaaacacaccgctagttacggcacgtaagaccgggaacgaaacacattctccagtcagtggtgtatgtgccctgcacaaacacccgctcacgacgcacagac

SEQ ID NO: 28915 - DNA, 1462 bp, Heterodera glycines
  unsure (1)..(1462): unsure at all n locations
ttcagaatacgcgcagatggagtgaaaactcccatatttttcgcgttacattataaaaagcgtctgtctctctgcttntaggatgaatcgcaccatttatgcatggggttatataaaacgaggaacgaaatgtgcaatgatatataaaattagtactgaaatatcgaattcaattaattattatacaaaattgctggtcattacgcttcataattctcgagcttccctctcatcgatttcctaaaaaagaagagaagtgatttcaggatacgcgcagatggagtgaaaaactccatattcttcgcgttacattataaaaagcgtctgtctctctgcttttaaggttgaatcggcccatttatgcatggggttatataaaacgaggaacgaaatgtgcaatgatatataaaattagtactgaaatatcgaattcaattaattattatacaaaattgctggtcattacgcttcataattctcgagcttccctctcatcgatttcctaaaaaagaagagaagcgatttcagaatacgcgcagatggagtgaaaaactccatattcttcgcgttacattataaaaagcgtctgtctctctgcttttaaggttgaatcgggccatttatgcatggggttatataaaacgaggaacgaaatgtgcaatgatatataaaattagtactgaaatatcgaattcaattaattattatacaaaattgctggtcattacgcttcataattctcgagcttccctctcatcgatttcctaaaaaagaagagaagtgatttcaggatacgcgcagatggagtgaaaaactccatattcttcgcgttacattataaaaagcgtctgtctctctgcttttaaggttgaatcggcccatttatgcatggggttatataaaacgaggaacgaaatgtgcaatgatatataaaattagtactgaaatatcgaattcaattaattattatacaaaattgctggtcattacgatcactttttgactggggtcactcttcgtcctcctctttttccgatcacttttagtctggcatttttcatccattttcttttcagcagcctccgtctaccaacagccctcagcaggcttttcctctacccttccgcgccgcaattacgcgaccattgccggcggctacggcaccggcggcgtcagtttcggctcacccattgaattggatttgccacccgcacacaatttggacgaccgcccgaattactttatgtaaaaatggatgtattcacccattttcccacataatttccttaatgttaacagtcagtttttatatttgttttaaatacgttgttcatttcattcgcccaaaagattttttctgatcattaaacaatttatattttatatgtacatttgatgaaaatgagtattgtttgtttcaatagaatatgtaaatgtgctttgttatgaattcattcaaaca

SEQ ID NO: 28916 - DNA, 1378 bp, Heterodera glycines
ttttttttgggggccgggaccgcaagaccccgggaaccgggcccaaccgggaaaattttaaaaattcaaaaaattttaaaaatttaaaaaaaagtcaaattttaattatatcaagtgaaataatacaaaattatttgttttttataataaattaaattaatgaaattttcaaacaaattttcttcaattatttcaaacaattaatcatttttggactaaatcatcgaatattaatagaaattcagatttgattttcacatcactttttttcggagcgcttatgggcaaatttgcatgatatgaatttcagctcttggtttgaccgtaagaggttggtgaagtcgcacataaaaatgagaaaatgtccgtgtaattgagaaatggacgattctacagtaaatcagtcagtatagtatgattaaatcagcaataatttttattcaatttgggtggaattattatatatttatgtcgtccgccaactttagcattatactggccgtgaaataaacaattctcgctcaactgtgaaattaatgacatttggtggattttttcttgcatgcgaatgttctcgctcctcaattaggaaattggaccgacggcaaaaagcaattagtaaattgattgtggtcttatcatttgggctgtcaattatggatagcagtgaaattacaaaacatgcacataaaatatggagcaaaaacccgaaatatggaaatcaaattcttaaaatatgggcttaactattccaaattaatacaaaatttaatcaaatccataaatttactaaaaaaaacacatttaattgacgaaatacggtatgaataaaaatcatttaaaattaacacaaaaataaaatttattattttttactgaaaatgccctaaaaagcgaaatttaccgttatattttcttaaagccgaactaagaaaaacaatcttgcagaacggaccgcccactttggcgcgggccattttggagcaaaacactatataattttatttttttataccggtttacctcagttgggcgcgcacggttggtcgtcagcatgtttttccactataactttctataacttttttctttgtcatccaaatcacataatctttgtatcattcaaaagcttaacatttttagtaactttttctaagatatctcttcgtgattagaccctaaccaagaaagttatacatgaaacttgcaaaaaagtcgaatttttgaaattttttcttaataaaattttttccaggcttgaaaatcttttcgctttttgaaggctaatagagcatgttaagagctttcgaatgataccaagattgttggatttggatgacaaataaaaaaatctatagtggaaaaacgtgctggcgcc

SEQ ID NO: 28917 - DNA, 1315 bp, Heterodera glycines
  unsure (1)..(1315): unsure at all n locations
gcttgcggtgcagcacaaatgccncagcatctggcccgatgtgcgtgcttattgctcgcacatgccaaagccgtagcactcgtgtgccatgtggaacgtcggggcgcaaaatcacttgtatacgacttgactactggtcagggggttgttagcagtagagcagcttttacactgcgatctgttgagacttagcccttgatcggatgatttgtcttctttttccccctttactttttgtgccaacaacattttaggtacaagtacatgagaagggaaggctctcttaagggagtcaaatgcctcgtcagtcaccatgaaattaggtagaataagttcttgactttgcttttttttccatttatttcaatcggctagtgctttagggttttgtgttttgactttgcttttttttccatttatttcaatcggctagtgctttaaggttttgtgttttgactttgcttttttttccatttatttcaatcggctagtgctttaaggttttgtctttgactttgcttttttttccatttattccaatcgaccacgttaattcattctctatacatttagtgtcttatttcatgaaattatattaatttaattttaaataaagaggcaaatttttacagaaaataaatagacgctgactaattagctaacatttataaagaaagtagaaatttgattaaatgcatatacaatatacaaaatattacttttttaaatttgtataaagttcctattttgtctttgactttgcttttttttccatttatttcaatcggctagtgctttaaggttttgtctttgactttgcttttttttccatttatttcaatcggctagtgctttaaggttttgtctttgactttgcttttttttccatttatttcaatcggctagtgctttaaggttttgtctttgactttgcttttttttccatttatttcaatcggctagtgctttaaggttttgtgttttgactttgcttttttttccatttattccaatcgaccacgttaattcattctctatacatttagtgtcttatttcatgaaattatattaatttaattttaaataaagaggcaaatttttacagaaaataaatagacgctgactaattagctaacatttataaagaaagtagaaatttgattaaatgcatatacaatatatcaaatattacttttttaaatttgtataaagttcctattttgtctttgactttgcttttttttccatttattttcatcggctagtgctttaaggttttgtctttgactttgcttttttttcatttatttcaatc

SEQ ID NO: 28918 - DNA, 1481 bp, Heterodera glycines
tttatgtattagaaatataaattaaaatcccgtgtatattaaataaaatttttgaggatgttttgcatgaaatttgaaaaataagaacttgttaaacaagtttgtgaacgaattttaccaagctaagcgtccgaaaaatgggttgcatggcaaaacttacaatagcaactcgtacataagttagactaggcctaggcattaagccgaaactttaggctaggtctaggcttaaattttatttttacaattttatatattttgcgtttcgaattttttacattttgacatttatacgttatgccatttttgcttttggcgataatttaaagttaccatttttgaattttattaaaaaccgaagggggatccatttgtttttgtaaaatgttttcctatcctctaaacttgttgtttgaggttttaaggattgttacagatcacgaatttgacttctatttcgaccaaccaaaacctaaaaattaatttttattgaaaatttctagaaaacaaacaagtccgttaaattttaggaataaatttaatgtcggaccggaccaactctaattttcaaactttttacttttaaggctgttcctatcaattatggatctcaccaagcttgaaccctgtctcaaagaatattacttgaactgttacccgtacgatctcattttcaaatggctttcatattcgaatagtgagtgaatttggcatttacttttatggtttcgatgtaatgctttttgtacgtaatacccccaaaagtgtctgcatttattttcctctttcgtattgagtaaattttcagagaaccgtgactatttgtcgaagagggaatttgctttcatcaagggtcaatcccatctccgttttttttcctttgtcgaacccaaagaatttatggttcaattacgcaaaactcctccacaaaaaattgaccttggcgctgtgtacaatcgtccggtaaaaatgcgtacaaaatccggcaaaaaacgcttatttttatatcccaaatcagccgcgtgaccgcgagaaaattggtgatttttttcccgtggaacgggaactcgtctttgacatcgatttgaatgactacgacacaatacgacaatgttgcaagtacgtatttttttttcatggtttacctttgcacatacaacctaaaatgcaatagagccaaatttcttacaaatatttgttttttttcaggggcacaagtgtgtgcaaaaagtgttggcgttggatcacaattgcggttgatgtgatggagcatcttttacgaagtatgcacacattgcatgtttctaaaaaatcattttgttgaccaaaatgcccaagaatttggatgttgtaacagtgggttcaccctttaacgcctctggggaagtttttcaaaatttaacaaaaaaatttatttatttatttttgccattttatggtaaaacaatctctttagggtaatgtttaagtattgtgttgta

SEQ ID NO: 28919 - DNA, 1597 bp, Heterodera glycines
  unsure (1)..(1597): unsure at all n locations
aatatgtacaaaaagtggtccaaatttgtaccttaattatgtaagaaaaatccccaaaatatgtccaaaaaaccccaaaatatgtaaataaaaattttttttaatggtattttttgggaaagaaattccccgtaaaataagaaatagccacaaaatgacataaaaaattactttttttggtatttttaggcaacattttcaaacttatttttttctttataaattttcaaaatatgtaaaaaaaatgaaaatatgtacaaaaatatttgtcgaaattttggattttttttgaggatttccaaaaatttccataaaaaatactagagtgccacgggaccgggaatttttgccaaaaccgggaccgggacttgccgggacctgagaagccggtaccgggacctcgattttttttcgggaccgggaccgggaccgcaagaaaaaccgggaaccgggaccaaccgggaaattttaaaaattcaaaaaaattttaaaaatttaaaaaaacattcaaattttaatttatatcaagtgaaaataatacaaaattatttggttttttatttaataaattaaattaatgaaaattttcaaacaaattttcttcaattatttcaaacaattaatcatttttggactaaatcatcgaatattaatagaaattcagatttgcttttcacatcacttttttcggagcgctttttcaaaaaacttttgggaaagaaggggtccggcggtgccgataggcgccgccgggggaaattttaaaaatttgggtgcaatttgttaacagattttcaacaaaaaaaggttggtttttgcgattattaagctcaattggtaggattttcatttaaaaaatgataaaaatgtgtcaattaaaataaaactatgagtaatcatattttctttataggaaacccacgagtatacaaaacaaaaaattgaaaataatctaatttctgtagagggattgaaccaggggaaaagaagaagggaacgtcaaggagactagccattaggccatttgcacacttgggcagtgttactttttaagaatatattaattattattttttatttttccctttgactccaattttcttcactaatttttcactcagaccccccattcttaccaatgcttgtttttcccggttcccggttgccctaccgggaccgggaccgggacctgagcttttcaaaacccgggaccgggacctcggatgaccgggaattcccggcccggtcccgtggcactctaattcatttccttctttaaatttgattgtgtttggcccttttaaaaggttaggagtgccctattttgttcattttttccgcattttaaactggttcaaaaataggtttaaatgcttttccgcgccgagttttaagctgttccgtcgttttcggagcctaagaaaacctataaaacttttatctaatttagtaccatactcgacaatttttcccttagattttcaaaaaatttctcacacggtcactgttggcaatgccggaccaaaaatttatgcttncaaattcttaagcaaattccattttccagaagccattaaatttatccttnanacataca

SEQ ID NO: 28920 - DNA, 1219 bp, Heterodera glycines
  unsure (1)..(1219): unsure at all n locations
gaaaaagcgccggggggttaatgaaatgcaaaacgaaactnaataaggaataaagtaaattcacctttttgaccttctcctctgctcctttctcctcatttcctcctcctcggttgattacattggtgaccaatcgtcggaaaaattctgggtccaattgtgccaatgccgtcgtgtttgtccccctctccgttgccaattgtgccaatgccgtcgtgtttgtccccctctccgttgccaattgtgccaatgccgtcgtgtttgtccccctctccgttgccaattgtgccaatgccgtcgtgtttgtccccctctccgttgccaattgtgccaatgccgtcgtgtttgtccccctctccgttgccaattgtgccaatgccgtcgtgtttgtccccctctccgctgttttatgctgttcctcttcagtggtgttcgtcttgtcctcgtccctttttccgttgctctgttctgtttgccccccattttcgtctctttttgcgtttcgcatcgccgcgttgcgactgagtctttcgctgatggcactcagtcgattcgctcgttttgccttggcccgcatattttggaaccaaacctgtgaagtcgaaaaagcgattccaatggattaattaagcactcattatccgcccatgcctttcttcttcccgcgcccacctgcaccactcttttgttcactccgatctgttccgccatttccgacagttggtatttgctcggcaaggaattgcggcggaattgttccgccagaattttcacttgcgcatccgtaagaaaagcacgcggccgaagcgcggaaccgccgttggcggatggccgccactcggccaaaatgtcaaaagtttcgtcgtcgttctgtcgggcaaagtcgaagtgctcttccaacgtggtcaactcggtgtgctaaagatggcgtgagttttggtctaattggcatacgcatcctttcccgccattccctatatatatatgcctctaatcatgtctagcccactaattacttctatttgcaacatcccgctccccttcacaattacccttttctgtttgagtttcttatcactaattgcctataataatcccgcttgtttcacttatcctcactaattacactaattgtctctaattagcgacccttcctcctcccccgttgtcttaattaatccccccccccccgctttttctcactttcgcttcgtccttt

SEQ ID NO: 28921 - DNA, 1532 bp, Heterodera glycines
ttgtacctcttctaatcacttttgtacctctactaatcactgttgcacctcttctaatcactgttgtacctcttctgatcactgttgaacctcttctaatccttttgtaccacttctaatcactgttgtacctcttctgatcacttatgtacctctactaatcactgttgtacctcttctgatcactgttgtacctcttctgatcactgttgtacctcttctcatcactgttgcacctcttctaatcactgttgtacctcttctgatcactgttgaacctcttctaatcgcttttgtacctcttttaatcacagttgtacctcttctaatcacttttgtacctctactaatcactgttgcacctcttctaatcactgttgtacctcttctgatcactgttgtacctcttctaatcacttttgtacgtgttctaatcgctgttgtacctctaacgggcgcgaagcgcccgtctgagctcaacaaatttaaaaaacgggcgcgaagcgcccgtcagagcaaaacaacatttgaaacgggcgcgaagcgcccgtactatgccgcgaagcgggcgaaaaggcccaacaaaatttaaaaacgggcgcaaagcgcccgtcaaagcaaaacaaaatttaaaaacgggagcgaagcgcccgtctgagctcaacaaatttaaaaaacgggcgcgaagcgcccgtcagaggacgacaaaattttaaaaacgggcgcaaagcgccggtttgcggccacgaagcggcctaaaaatccctgaaaaaaccgtagttgtacctcttctgatcacaattgtaccttcccacccgtggttgtacctcttcccccgtaacagcctaggtagcgaagctccgaaagcgcgaagcgctttttcccagctaaatagccgacggttattactatatatgttatattgacaaggagtttcgtctgcaaaaacaaaatctcccggccgaaggccgggagcgccctgaaagtagtggaagggtcttacaactttttgaggcgcatccgggaaaaatataggttttccggtccaagggtcaactgagtaccagggactgatttctcattttttcgtgcgtttgacggcccataactttttttctaaatcccgaatcaaaaactttccgctggtaggaacctaagttgaagtgttgtctaaaagtcaaaaaaaattccaggcctctacctatagtaggaagggctgcagaaaataggagaaattcagtaccaactttgtccagttcagtccagggcgaataactcattggggtttgaactaagccagggggtgccagcgggactattgtagagttcaatgagctggatttttccagtttttaaaatttcgaaaattttcaaaatttttcgagctaggcctaaaaaacggttttcgggtttttgaattttaggattttttaacgatttttcccagagaaacggagaccacttccaaaacatagtttttcgagctctatcgactggtatttttttcggaaaaatttcgattttttcgacct

SEQ ID NO: 28922 - DNA, 1200 bp, Heterodera glycines
  unsure (1)..(1200): unsure at all n locations
aataatatcgtagtattgacggggaagattcgactttcagcccactctcgccgttgtctgggactttgaagatcaatccctgcaataatttcgcattttttcgactttggacgtggctcgccgtcatcataggcaatgttatccaaccaaaattcatcaatttcgtattcatcggaatgactcgccataaattctaaattattatgttaacaaggcaaatccgtagaaaaattaagagaggaaaagcaacaagaagaagtattctcgaagaaatcgctgtaaacgatcgaaatgattgtcaacggacggagagacggctgtaggcgatcggaaaataggagatgagtcaatgtttcaattgaaagacaacaaattgattgacaacataattttttgctttcatatttatttttatttccttcaattccttttatagctaatgagatatactaaataatggaattcattttttaatttttaaaaattacgttgatatttaagttgatggcgtaatgtttgttgatttaaataaatatcaacattgaggttgattctccgcaaaaaaaatatttctaagtgaaaaatgttgatttgccattctctagagtggatgcataaattcagtctctcaaaaacagtgatagataacgacgacgacgacgacattaattaacaaagtttttttcactttataatttatacaaagatattttacatttatattttaaaatattatgtattttattaaaaataaattgtaaaaaaagaagatcttttaaatatatgggattttaaaagaatattagagaaagtgaaataaattaaaatccaccaaaaaaaattttaaaaattttaaacattaattacactcaaaaatcatcaattcgaggaaatactgttcagtgaaaattattttgaaaaaataatattatttaacaagcatcaaaatgggaaaaataataatgaagtaattctttaatacaaattaattaagaagaaaattttgcaaataatgaagaaataccttaaacgtttgcatcaacggctcgtcttggaaaacgtcaggaattattttatttctnaattatataaattaaattatttattttcaaataatcagctttttaaagtagaaaaaatattcctttattacaaaataccagctaaaatattaattatgatatattatgcataaatctt

SEQ ID NO: 28923 - DNA, 1132 bp, Heterodera glycines
gtcgggatccccaaaagtcaggtacccaaatgtcgggtccccaaatgtcgggtccccaaatgtcgggatccccaaaagtcaggtccccaaatgtcgggtccccaaatgtcgggatccccaaaagtcaggtacccaaatgtcgggtccccaaatgtcgggtccccaaatgtcgggatccccaaaagtcaggtacccaaatgtcgggtccccaaatgtcgggtccccaaatgtcgggatccccaaaagtcaggtacccaaatgtcgggtccccaaatgtcgggtccccaaatgtcgggtccccaaatgtcgggatccccaaaagtcaggtccccaaatgtcgggtccccaaatgtcgggatccccaaatgtcaggtccccaaatgtcgggtccccaaatgtcgggtccccaaatgtcgggatccccaaatgtcaggtacccaaatgtcgggtccccaaatgtcgggtccccaaatgtcgggatccccaaaagtcaggtccccaaatgtcgggtccccaaatgtcgggtccccaaatgtcgggatccccaaatgtcgggtccccaaatgtcgggtccccaaatgtcgggaccccaagtgtcggaatccccaaaagttgcaccacgatccaatgataccaataattttaatttgtgttggtttgagaacagttatggccagctttttgatgaatatctatttggatagctactaatatgaattccgttttgttgagaaaagccgaaaaggataagaatttgccctctgtgtcgtctgcaaggatgatatcaatctgctgtacatcgataaaagtgcaatttctttgcaccaaaaaactggaaaacatcagatagcgataaaagcaataaacagatcaattccattgcaggaatttatgccaaacacttccgccccatcaactgaagaccgtaaagttctggcggccgaaggttaacaggcttttttctgatcaaaattttataattaataggcactatcgcttatcacactgcacaacattgccaatcttttcgctcggtggattgtttgtcctcggaaggattgttgcgcacaatttttcccgattcaaatattgcgaaaaaaataatgttccggacaaacaaaaacgggaaaaa

SEQ ID NO: 28924 - DNA, 968 bp, Heterodera glycines
  unsure (1)..(968): unsure at all n locations
taattgcctaataatcattttgctaattgtcttcccctttttttcatcagaaaatgaatgaatgaatgactgtaacttcttcgtttacgatgacccaattgttttgctccttcggcaagggaatcaatcgccgaaggaattgggttattatgacattgacaaatcgcctaaattatcaaataatgccattttccaaatgattctcctctgatttttgttcactcagtgatcggatattccttaaaaatgcgtttctcaacaccatttccccccctcccccttttttcccaatttcaaaattttccttttctgtccattggccaaccacacaaattgcctagtcatttgtttttcatttattagtcaaaatgccattctcgcaccttcgactttgcaatgattgcgtgtcgaattgtgccccgttgaattggctctgttgcgtttgttgttgtcgtgcgacaacaatcggtgactccgtcatttgatttcgttgcttttgctccgtccgattggcgttgtgtgtgcccatcgtttgcttctccgcttttctgttgcattttcggtgcttaaaaacgcaaaaataaaaaaaaataataaaataatcggttaaaaattaatttaaattttgcagcactaattgaaaatgattatgcgaatttaaaaatggaaaaggaaagaaacggaggaagaagagaccgatccgacaacaagtgctttttccgtgggtaccgttgagagaacggcggacgattcgcgtgaaacgccgtttccgccgctgtgtcctcttccgacgtccgtttttgggattacgccgttgccccccaccatttgctcgtccatttgactttgacccgtcccctcggggctgcttccgccctcctccgccattaaattggtgccattttgaagtcgcggtgaatgtacaacagaagcagtggtggaggaaggcgnnggactgatcattcaat

SEQ ID NO: 28925 - DNA, 1094 bp, Heterodera glycines
ccccggggggtcagtcatcccaacgggggcaccttggctgtctattctccttccaacaccttctttctctttctctcgctctctctctcgctctctctctctctctatttttgtttttttctcttccggcggcctctccattttctttactctctaaccttagcctctttctctccatttctctcccttttaacacactctctctctcccctccatttcccggcttttcctttcagtcccgagaggcttaaaagctttatcgaccgttgcgctctgctgctgtcattggaaatgcgaccccattgttcactctgttcacccaactatttctctgctccttttctctcttcctcattcttttcttgctctccttctcttccccatgcactctctcgcacattaagcggattgctctttttctcttccctctctctctctttttgttgttgcgctgaaagtttcacagcacgaccatcaccaacaatgaatgaattgaacgtgaatgcgaatgaatgaatgggccggaaacaattggttgttccgttccgtccgcttaactttcgctttttgttttccgcgagacttaccaaaataatccccgagcaaaagagagaaaataacgggacaaaactgaggaatggccctggccatgtccgtgactctcctcactttgccagctcaggctcactcattttcttcttgatttgacctaaccgtaataatttcaccgccaaaagcccccgatttttctatgcttttacaatcattagccaaagccatgattcccccgcaccatttgcgccgcctgtgccatcatcccccccccccctgccggctgtgccaacaaatgttcgttgatgccggcgtttgttcctcccattcattgctcattgcccccattcattgggtcaattaaagtcttaagtatcgcttccctaataagtactgccccgtccgtccatggccaccttctcgcccagccaatgaatgaccacaaataatgtcaaccaaaaagcccccgggggaaatgtgtcgagagcggggcaaagagtgccactgtgtccccgtgccaccaattttgccccagtgtgaaa

SEQ ID NO: 28926 - DNA, 909 bp, Heterodera glycines
gtgtgaacaatttaaacaaatgactgatgtcgacaatgggtgggttggcttcactctaaagggattcaggtgacatatgaaatcaataagaaattcattcattaaaattgtaaatttttcccaaggtcgagtcccatcttcgcttattcactgccgaggccgtccgctacatgaccgatgctgagttccaccgatttcggctcaaatacatcagtaattagagcatttttaattggaaatatgctttttaaataaggaaattggaattttttaattggagaacctgaaaaaaaaaattgtttaaaattgtgatttaacaaaaaaagcttagcaggggcattttgcttaaaacaaagtccatttgcaataaaaatgatattgctttcatctccccaatccgttggcgagaggacgcgcgcgagttggccaaccgttgagcagccgatcagcgaatggttggttcagtgctgggacagtgcggccgcctacggcgagcagtgccgtcgcgtgtccaaggcgcgcctcttcaatgtgtgtgtttgtaccgtccgtcgtcggcattttaaaccggaataaaatttatagttctagataaatgcttggtatgaaaagcatcctgctgtagtgctagttaattggtcaaaaagatgtcagatttgtgctcagggactcccaaaacttcgggaaagagtttttacaaattattatcataaaaaattgcaaaccaaaagggtttaataaaattcacaaactgtcactagtaatagcgctgaatttccgaaaaagtgccaacaaatttccagcatatttgcatgcattgccgcgactgtccggatgccatcgttgaaatgttccgtttggtggcccggtgtaaagacggtaggaatttgcaaatttgtttgtgctttt

SEQ ID NO: 28927 - DNA, 695 bp, Heterodera glycines
tgccgacgattcagtgccgacgattcagtgacgacgcttttttgtgaagacgattcagtgccgacgattcagtgccgatttttcggtgaacgttgataagccgacaattcagtgccagaaaatttggtaaaaaattttcagaaaaactagagtgccacgggaccggcaatttttgccaaaaccgggaccgggacttgccgggagctgagaagccgggacctgggacctgcgattttttttcgggaccgggaccgggaccgcaagaaaaaccgggaagcgggacgaaccgacaaattttaaaaattctgaaaaaattagaaatttataaaaaaattcaaatttaatttatatcaagtgaaaataatacaaaattatttggttttttataataaattaaattaatgaaaattttcaaacaaattttcttcaattatttcaaacaattaatcatttttggactaaatcatcgaatattaatagaaattttttaaagaatatattaattattattttttatttttccctttgactccaattttcttcactaatttttcactcagaccccattcttaccagtgcttgtttttcccggatcccggttgccctaccgggaccggagacctgagcttttcaaaatccggtctcggtaccgtgggactctactctaaatagtaggaaaaacactttcttttttg

SEQ ID NO: 28928 - DNA, 482 bp, Heterodera glycines
gggcgcaggaaaattattaaggaggagggttcattatttatttatttttgcaaaattaattcataatttttttttcagaaactgctctgaaacgcaccaaaatttatttacaagttgaataaggcactctgactcttatattatcaaaaagggagatgaataaatattttacaaatttttaattcctttttaaacatgccaaaaagtttaggcttaacttttttttcagaaactgatcagaagcgcaccaaactttgcagggatactgaaaggaaaagaattaacatgttttatcacattagcttgtcatcagttgttataaaaatttcaaaatcctgagtcttctatttttatttttgcaaaattaattcatattaattttttcagaacgtgctctgaaacgcacaaatattttatttacgtgttaaaggattttgaagggcgggggtggggacggggccgaaggcccccgcggggggggg

SEQ ID NO: 28929 - DNA, 970 bp, Heterodera glycines
gtgtccgtttggggtactcaaacaattatggggagcaaaaatccaacgcagaattaaagtacaggctatagggaagctactcccgaaggattcggtctccccataaatctgggcgcatcggttcggggggactgccccgaaaacaaaaaaatcgattttttcaagtgtccgtttggggtactcaaacaattatggggagcaaaaatccaacgcagaattaaagtacagactatagggaagctattcccgaaggattcggtctccccataaatctgggcgcatcggttcggggggactgccccgaaaacaaaaaaatcgattttttcaagtgtccgtttggggtactcaaacaattatggggagcaaaaatccaacgcagaattaaagtacaggctatagggaagctattcccgaaggattcggtctccccataaatctgggcgcatcggttcggggggactgccccgaaaacaaaaaaaatcgattttttcaagtgtccgtttggggtactcaaacaattatggggagcaaaaatccaacgcagaattaaagtacaggctatagggaagctactcccgaaggattcggtctccccataaatctgggcgcatcggctcggggggactgccccgaaaacaaaaaaatcgattttttcaagtgtccgtttggggtactcaaacaattaaggggagcaaaaatccaacgcagaattaaagtacaggctatagggaagctactcccgaaggattcggtctccccataaatctgggcgcatcggttcggggggactgccccgaaaacaaaaaaatcgattttttcaagtgtccgtttggggtactcaaacaattatggggagcaaaaatccaacgcagaattaaagtacaggctatagggaagctattcccgaaggattcggtctccccataaattagggcgcatcggttcggggggactgccccgaaaacaaaaa

SEQ ID NO: 28930 - DNA, 1034 bp, Heterodera glycines
gaaagtgtgagagtctcgccatccgatgaagaacctcctttctccgttctcggcgagaatgataatgtgtaaacgaagaaataaactttcaaaaaggagaattaccctttgcacattgtcttctaattgtaagccgatcgcctggacatagctaaagcgattgttgttgttgacagacataggcaaatataataaaaatataaaaacagactaataaattagtaaaaaatgtattaaagcaataaaaatttttaaatgtgaaattgtttttcttttttttggtgttctctttttgatgagaaaaacaggaaaagccaaaatgttaaaattcttctttattcttttggattctcttgaatttttatcaaatcattctttttttcaattctgatttttcctttcccttttaatgtttttagcataaatggaccaagaaatgagtgcgggaattcaacaaagccgtccttctggaaagatcaatcatgaaatcttgatggaggagacgcgtcgaattccaattttaggcgaagtcgttggccaattacgaaatatttatggttcttcgttagccgagcagttcaaaaagtacagaaaaaatatgaataaattatgattaccaacctatttagcgaactcattatcgccagccaacttaatcgtggaccgatgaataatgggatcagcaacccgcacatggacatgcttcttggtgttgatgagaaaattagcgatcttttgcaccaattgtaatcacacagctgatttactctcacaatgttgttgccgataaattgtatgaattcgaaccatttgaatttaacaattaatagcggatttctattgtctgtgtttcattatttattttatgagattattatttaacttaatttcaaatgcttttagaaatatggttttggacccgaaatcgaaagacaaggcgcgggaactcggttcctaccgcgatatgcggttcgaggtatgtgtgcgacgtttctatttttgtaaaaaggttgctctaactattacttttttct

SEQ ID NO: 28931 - DNA, 920 bp, Heterodera glycines
aatggcatttgatgagtctaatcaacaatcgaacccgtattttttggactgtaagctttttcatgtctgaacaaattgtacatttttggtatccgaaatcattaaatctgaggcagcaaataaatacgagaaaacataagaattctgccgtttaaagaaattcattcactcaattacttaattcatcatagcttttttgtctcaattgcttaaactctgatatttttatctagaatcgaaatttgatatttacaattttttaaagattttatataaactgatagagagagagagagagagcgagagagagagagcgagagagagagagagagcgagagagagagagagagagagagagagagagagcttttattaaatcagatttatttacaaattttacttaaaaaaaaaattcttaaacttcaaatcattatctacaaaaatttacggaaaacaattattctaatccgtgtacaagtcatttgcacctgagacaattaactatgcccaaattttcaattattcaggcacttgctttaattttcctaatttgcttgtgctatattcattttgtggtcaactttttctatgattaattttgttttaattattttaaatagcaaataacaattaattaattttttcccatctaccttaatgaccagttcgaacttgagctgatccacttcgtcagcgagcagtgccatctcattgtcgcgcttgcgcttccgttcaaaaagtgcactgaccagcttttggcttttcaattcggcacattctctttgcaatcgttgacgtcccgttgccaaaaacttttcaaactgatcagtcgcacaaaatttggcggtgtccatgatcaaaagataatcgatcagataaattggcgaaaatcgagtcacaggcgacaattagccctaaat

SEQ ID NO: 28932 - DNA, 1709 bp, Heterodera glycines
  unsure (1)..(1709): unsure at all n locations
tcactttgggaggcacgtcaaatgtggnaattggcaattctctcccaactgaatgaccaatttgcatttccatccccatttgctccaattttgctttgaattcgcataaatttcagtgcccatttgcgcgtcttgaaattntcgtccacgtaatagtcataacggaggctgatcgtcgcaattcccagtccaagttgtgacggcggaagcaaatcgtacaccgccagccaacaatcgccggagatgaagctgaagaaacgggaaaaaaaaattgatattgaaattgggattttgcttttacattgcttttgcagtgatctatccttagtttcttaggccaaaacttttttctcatttggtcaatgcccacatttttgggtatcaattgaaagcttggagtttagccaagtttttgtatagctaaattcagggctaaagccaacagacaaaaaacaatttgtgaatgaatatactttaaaaaagcagaatttcggattttctcttttcaatcttttgttcaatgtcagcatttgttattttcgtgtatttcttaatcacaaagaattgtattaagctttcatttcaaccatgatgaatgccaattatggaaaaaagctatggcccaagaaactgaggatgatcactgactgattggatgcataggcactgaaaagtgccaggattcatttacaaaaattcaagcgggaaaatgatattcaaaagttaaatttaaatgagagagcagcgggaccgggaatttagtcttaaccgggaccgggaccttttcgggttgaaaaaccgggaatttttggctgggaaaaccggggaaaaaccgggactagtcccggtcaaaatcgggacttcggtactcagttgtccgtgttttggtcccggttccgctgtactctaatttaaatggaatagttttcgtcttttttgtgggtgtgaaacaaaaatcagttttaattcgttaaaacattttaagattttctgaaaccgtaattggtattattatctcttttcttttttgcccatctgtgcatgtgtcttacgctttctttgagggaaagaaaataaggacgacgtgtaaaaagagtgaagaatttcagccaactgacagacgatcatgggaaggaaatagtgcacagctaattggaaaagaaacgagtgtgcctgggaagagagtgtcctctctttccacaatcctctccatctcttcaccactttccaccccatctctcagttgttctttaatttgcctgtcaattggactgcttgctgcgttccaaacttacctggctggggagttcctgcgatcacaaaggcggggctcctgtggcgaggctccaccattgcactttcggtcggggctgacccgcagggcggtcccgaactgggataggcccacagctaaatttttgagtgcgggggacggcgttcgcgcctcccctttaaaagatttgcaaaagtattttggcgccgaaatggctgtgaggttctgaactgtccacgtggaacagggtgattgatttcctctaccaataattcatcaagttccataaaacccaactttccctagaaatggaaaactttcacgaagattcaatctcttaaattttattttttaaataaatttttactaagttgattgggtatttgattgggttgtacaaaaaccaaaaaacaattttctataaatcgaaacaaag

SEQ ID NO: 28933 - DNA, 1058 bp, Heterodera glycines
tgcccacctttcgcctgctgctccttggtgaaaagatccttgtccaccaagtgaagtgtgccatagtcaggatggcttgctaaatgggggaaaattcgtcaacaattgattgtgatgatcattattgatatagttcttacatggtacgagaccggggcttggtttttgaggagtgccaactgaaatggaaattaaaagcattaattgcccaatttctccccttgtcatcctactaattgaactggacggccttctctgggagaaaaattccttgaatttgtcggcatttgtctgttctgaaatggggaaagagaaaagtgtgtgtgccattcagtcataatcgtttaaattgatcactttgtttgttgcccatttgccgcggccttttcttcgctgaaatgggagcaaaaagtcactatacacatgaaaatttcaaatcaaaggatcaacaccgacatggtggctgcggcggcacttttttccctttctccggtggctttgtctttgacggcggtggctttttaacgacgggcggcgccggacctgaaaaacaaaaaacaattattccaatttccaaattgtccattttggtctctcgcctttctttccagtgccgcgttgcggtttcaacggcgatgctcctccaaaaaattgagtatcgaaattctgaaatgtcccacagtccatgttggcttctgaaaaaaggagggaaattctcgacataccacacaaaatgtggcatcacctgaagaaaaaacgtctgacggaagcgcattcgcccattctgcttttgccgtcgtcgatttggatgcgattgactgccgcgttttcgacgacttttcgggttttttcggctgaaaaaaatagtggtgtaaatgtcagtttttgctcgttgtgaggaaggaaagtaaaaactggccttttccttcttgaacatcacagcattggctgaggacgacgaaaacgcgccgaggacaccaaaagaaatcgaaagggcagcaaaaaacgacggaggaggggggaagagaaaggcattatttggacacgaaaatatgctg

SEQ ID NO: 28934 - DNA, 695 bp, Heterodera glycines
ttctatcttccaaaataaaaaagttattccataatttctggaaaaattcgatttttcagaaaaaaattcagaactctgttctgaaaaagtattttataaaaataatatactcaaaaaaatccgcaattttttgctctattttataaattttaatttagcttattatcacttttttgaaaaaagttatagaaataaaagtgattttggcattcgggaccaaaggggtgtgaccatgatttctgagtggaaaatttttttcaccaaaaatcttccaaaaatatgattttaggggttatttcgccgctgatcacgaatatgtaatcagattttactttagacatggttaagacctcagaatccctgtgtgattggggattctgaggagtgggagcgcccgtcctgaggacgcgaagcggccgaatatcccacaaaaaattaaaaaacgggcgcgaagcgcctgtcctgaggccgcgaagcggccgaatgtcccccaaaaaaattaaaaaacgggcgcgaagcgcccgtcctgaggccgcgaagcggccgaacgtctcccaaaaaattaaaaaacgggcgcgaagcgcccgtcctgaggccgcgaagcggccggatccctcccacaaaattaaaagacgggcgcttagcgccagtcctgagggcgggaaacggacgaatggcccccaaaaaattaaaaa

SEQ ID NO: 28935 - DNA, 1093 bp, Heterodera glycines
actttttatagtaacagcaaaagtgtccaaaactgaaatggatagtgcagatgatatggaaatggtcaattccaaaggaaaagcattaccaatccctcaaaatccgttgccgaacaaagtcatcggattcggaagcatttttatccagtaaaaactgaatttggaaatgatttgtgaccatcacactttcggaaaaatatagtgaacgctccgcttagaaaagggttaaatgatttaacaatcgcttcgtcgcgaggagttaagcacgaaatttggtatcatttgaaagctcttgacgagattacctaagtataaaaagcaggaggtgaagtcaaaccgacgccacctgagaaagaggtttttgaaccgattgtttccgcaagtcgagacttatttttcgttcttaactcctcgagacaaagcgacgattggtatacatatcatttaacccttttctaagcgggaccattcactacagttcccatcacacttttttctgattttcagcttcatcgaccaaaatgtgatcacttttcttggccattttcaccgtttcttctctaaatgtacaacaaaattgactgttgccactgaagatgtcctaactttggagttcgttttgctcaacatttggtcagcgttcaaggacaccatttatctgttgattttgaacatcatcgcttttcgtcaattggtcccgtcaatgctcaccgattgtccatcccttcgctctttcaatttgtgtgacggcatttcccttgaatttccgcccgacgacagtgccaatgcgtcggatggccaagcggtggccaaatggctgttctcacctcgtcccgacaatttgatgaggagctcagatgctatatgaattcaaccatggaagagaacaatggtcggcaatcatggaacagatcaaagcggtgatttctccaattaatttgtcttttttcccacttttttttgttgtatttttaggctttttccaatgcttcttctcctgtttcttttggcatttctgtttgttttacgccatcctcttcgctttcttccgttgtgccatttaaactgaccaacgaattttctggggagaaat

SEQ ID NO: 28936 - DNA, 864 bp, Heterodera glycines
  unsure (1)..(864): unsure at all n locations
aaagtttagcaatatnttatcatttcggtgtcgtatggacattcgggataaagcatatctatctcggggctcgactcgcttaagtcttccttcagtgtgtatcgattcccggatgaagtccaagtttcgagtctcgactagagaaactttctaggatttctgggtctatctactctagtggtgaagcgtctctcgagtcattactcgagaaaagtcccgtgttttttgtgactgtcgcttttagaataaagtctcggtctggagtctctacccgagaaaagtaaaatttaacatcaattaaaccgaataaatttaaaaaaaaacaaaattttgaatattttggattatttattcatcgtaaattttataagaatagtaataccttcttcaaatgtggtatgtttccgttggagtagcttatatttgaccatttcatctccaaacaatcgtccttaatatttgtatattaaaaaaaaatattggcgccaattaataaaatttattttacaccggcacattgcacatccgaatttaatccatattcgggttccattgtgccaacttttaacacataaaattttgtgccatgtaaatgaaaaggatgcagcatattcatgctcgttgccacagtaatctaaatttttttttaaattatatttatataataatttagtaatttttatttaaatttaaaattaaaatacatttatttgcaaatgattaaacaattcatttttacaatttaattaattatcgagactgatttacttgcacaatgttgtcaagaatgaatttgaagtggtgaaaacagtggcacctattctcggaccgattgctgcaaaaataattttatttaaataaatt

SEQ ID NO: 28937 - DNA, 969 bp, Heterodera glycines
  unsure (1)..(969): unsure at all n locations
aaaaatttccgggagcgggatcgggagttcacaattttccgggacgggagtcccgaacgggaatcccggaaaaatcccgttcccgttaaaatcccgcagaaattttacgggagtcccgggcgggagcgggagtaaatcgaaaatttaattaaatactcactaaaatatttttaatgcacaaatttgaatgactatccttttattaaatacagaaagatttaattagcagaaactaataaaaacagattttagggtctcagaaaattttttcaaattgcttcaaataaattattttttataattattcgaacaaaaagtttattaactttatattttcgaatccctttattaattttaacaactttttgcggcgtatttttttaagaaaattaaggattttaagcagggttcgcagatctgaggatttaccctcattttgtggttttttgataggtcatgtgcttttaaaataatcgatagtcatacacatttagaccttaaaaactctaaactttttttaatttgataaaacttttaaatgtaaaaacttatattaagcataaaactacaaaactgaacatttcattattaacagaacaatcaaaatatggaataatctaaattaagaattactctcctcattaattatacataatttcaaaaaaaaagtctacgaatgggttaaagccccaaaaaatcatatgaacaattacattgcatgagaagaacgatatttattttctagttaaaatcaaatttgcaatttgttctattttaattatgataagcatttactcatatcaaattgaattagaattaaatcatttaaacatagatttaaatatcaattttcattcaaacactanactttggaaaatttgtcttttattttgaagaaattttgcttagattattgcatttatgccccaaaatagggcgtgcactaataaaatgccttcagcgcgccct

SEQ ID NO: 28938 - DNA, 1649 bp, Heterodera glycines
  unsure (1)..(1649): unsure at all n locations
caaaatggccaaaatgtgctcanagcgtcgctcctccgcaaggccattgtaatcctcccttaaacacaaacaattaactgactcatcaaaggccaattttttgttcttcggcatcatttaattttgctgtgcttttaaaggaaggcggtttgacagtgctaaaatgcgccgcgggaaaaattgtcaatttttaagcgaactttgttaatcgactgcaattcttacaagcaatgactaaaagaaagaaaaactcacgcaagggaatgaaaagccgggcccgcaatttgagcaggaaaattgagcatccgttcatttatgagaaaaccgacttttgacgacactcggccaacgcccaaaacattttcgaattttttgaaaatttcgtcggtcgcgtgtttttttgaacgttggagaaccaatgcggcaacttgcgattgaaaattctgaaatttcacataatttgatttttttttcgaattgccttcccaaatttgcctgagttccgttcaatggcacaatggaaaggacgccgtaagtgatcgcttcgctttcgtcgtcctcactttcttcggtcggtctgaacacacagcccatgggcgactggccgaccaccgcttttgccatttccctttcgtcgacctccgcttgtagaaatatctaaaatttaaacaatgtcggaaatgagtcttttgcgtgtccacttgaattagaagcctttcaatgtcatccaagtcgtcctccgccgggggcaaagcctcgaattcgaagtccaacttggccatttcctcagattggtcatttccgtcctcaatttctggcatcacttctccatcgtcagattcttctccttcttcactcaattggtcactttcttcctcctctttattttcattttcaatttgtccattctcagctatatttctcagttccaacttcctttcctttgttatgcttttaattgaatcttttttatttttctcaagtggtctttttgtcgagttcatttttattggctaaaatgtgtaaatgaaggaaaaatgaaacatccaataaaataacttttataaaatttgggtcaggggttcttggaattggccgaattggactttcccggcggcgcctatcgacaccattggatcgacattaatcctgtagaattgagtcaaaaagtgtgacatttggtcattttttggtcaaaatcagttaattaattgataaaaattttcaaaaaaaaaaatttcagacggcgcctatctgcatagacggacccctttgttcctagtttttgaaaaaattgcacagaaaaaaagcatttttgaaaagaaaaaaatagtcaaatttattgaccattaacagatttgatttccgatctctttttaccgtctgacccattcgaaaaatcttagtcgcccttttaatgcatcccgccaggccctaaaatttcttgtcaggtatttttttttggaaatttctttgaaattttttcaaaatttctaagaatccgcaatcctgcgcgggatcctgcaaatttaaaatgccggatttgcaggatgtgcaggattaatccagccggatccggtcctgcaaaaatttttgaattccaatcctgcaacaggatccgcaaatttgaaatttccgggctctagtta

SEQ ID NO: 28939 - DNA, 1209 bp, Heterodera glycines
atttgaattttcgagtttttgttcgaatacggctctttgggtcgaatctggtcgaaatggatgtcagattcatgatcagcaaccccgaaaccttcctaggaatctaaaatgattttaaaaacaattttattttttatggtctgtaaagtgcattagtaccaatttcctctgcatttccgaaggctcattatgcctctaaatgatagaaataatccaaatttcaaagaagcatccaaaacttttatggtccatggttagaatgtttgaaaacccttgactaaggagaaaaaagttgcccttggacaagggattttcctcaaatgttttgtacccacgccaaattgatcaaacatagtttattcggaccggcacagccggcggagtttgtcttccacgggttgtggattgaattacgaggcggaccatgcgtaggaatgcattgagcaaggcgaaagacggatgaaccatcaaaaaaggggaaaatgggcaaaaacaaaagatttgagtgacgtgatgggactggacgagtcgatggccgttgtgtccgtcgtcgaaaccgtgcggcaaaaactgaataaaattcggaaaccaaaagtcgaccttaagacgatcatttcaaaatattagtgacgaattttgtgccccaataagacacacaatttgacaataagtgctaattgtcagtttttccattcgtttcttaggttcttgtcactgtcaaatacatatccaatccggtaatcgttttcgccgccagaattaaaaaatctcgaaaaatttttgaaattatgttaaaaaaaaaccactaaattgtagtacgattgctgaatttgtttggagggctccctatcatttcgtcactgatcgtttcgtcactgcgaaaattttttaattgcttggcacatgccaaaactgaaaatttttttaaatttaacaaataaaatctgttttacatatgtatataaaagaaatgcatgcagcacaaaaattgcaattttggcaaagtttaataaaaatctttaaaattctgacttcaaaaagcagtgccgcgaagacgatgtgcggagaagtgcttgctcgagagtctcaggaaattttctgtttcaagcagaactagtgcgggcaaggacgggcgaagctcagcttagcactcgaaaccgaaagcgaacaccaatttttttcgaagctcgaagtttcgcccacccctgg

SEQ ID NO: 28940 - DNA, 1033 bp, Heterodera glycines
gtcccaacaaaaaataaatttaacatttttaatttatttttccctgggatggaaaaatatgccgagggtgtttaagaaatgacaacaaacaagagtcaatcaaaatgctatgaatgttgtgttgtgcaataaaaaatgccgtgcgaggccgcaaagcggccgagccatagtcgattttatggttcccggtgatttcgcacagtgagtgattaaatgcacaccctttgacacgtaaaatattccaaaaaaagagatagtgattttttctggattaggccggagaaataaaaattaccagctatttgaaatgcagtgggcaagcacagcgagtcgcttaaatgcacaccctttgacacgtaaaatattccaaaaaaagagatagtgattttttctggattaggccggagaaataaaaattaccagctatttgaaatgcagtgggcaagcacagcgagtcgcttaaatgcacaccctttgacacgtaaaatattccaaaaaaagagatagtgattttttctggattaggccggagaaataaaaattaccagctatttgaaatgcagtgggcaagcacagcgagtcgcttaaatgcacaccctttgacacgtaaaatattccaaaaaaagagatagtgattttttctggattaggccggagaaataaaaattaccagctatttgaaatgcagtgggcaagcacagcgagtcgcttaaatgcacaccctttgacacgtaaaatattccaaaaaaagagatagtgattttttctggattaggccggagaaataaaaattaccagctatttgaaatgcagtgggcaagcacagcgagtcgcttaaatgcacaccctttgacacgtaaaatattccaaaaaaagagatagtgattttttctggattaagccggagaaataaaaattaccagcctatttgaaatgcagtgggcaagcacagcgagtcccttaaatgcacacccctttgacacgtaaaattattccaaaaaaaaaaatagtgaattttttctggaattaggcc

SEQ ID NO: 28941 - DNA, 1181 bp, Heterodera glycines
  unsure (1)..(1181): unsure at all n locations
agtttctttcatcaaaaaatttctgtgaaatnttgttgaaatacccgtaacttcaattacttttttggattttgaagtttccagtggtgtatcaatcacaagaaaccatggcttaacaatgggcatttctttggcaagttcgagattttcaccttaaaaactcaatttcatgataaattaaaaaatggataattataagttaagttctgagtccaaaaaatgttaattatataaaattattgatataaaaatcaattcttaagaaaatgaatctaatgattccttactttctgcaaatcaccaaaattaatttccattttcacgattcctcaaattaggtaaaaaattacaaatatttaaagtcaggatttattataagaatactcacgacgctttaaaaaatgaatcgaaatcgttaccttcgcgatttttttaagcatgttagcacagaataatgaggacaaaaagggaactgggtaaaaaatggataaaaaaattaaagtgattaaattaaattgttattttagtgtttttcctttccaaattattcaaatcgacggaaaagggaagcatttgtgggttgaattattaaaccaaatcaaatttcgaacaaaagaaatatattggttagtatataatttgaattgttttaataaatgaattaaatttattctattaattctttatatcttcagaaaattttaattttattctcaaattctccgaactcacattgacatatgaacaaatttacaaagtgcttgaaataattatgggcaaaagcaaagaaaaaacgaattcgcctccaatttacgaatttataaagaaagaattaaaatattttttaactaaatcggattcatcttcatcatcattaaggcatgtaattgcaagcatataaaaacaaaatatgagtttaatttgatgcttttcagccactaatttacgaaataaatctttgtctattaatttttaaaaattccagtacaaaattggactgcgcataaatcaattttggacgagagttgtcaaaacgtttaccatttaattttgaggaatataatgaatatgtcgagaaaaatagagaacattgcggcacagatgagcatgttgaaaattactattcaatagaaaatacaccggcaattgggtacggtaattatacaataaatgatatattt

SEQ ID NO: 28942 - DNA, 730 bp, Heterodera glycines
actaccgtatatactctttttatatgccatggtatattatttttcaacctcttcagaaaggggtatataattggaggccggcagattaatggagactgggagattatttttcaactgatttatttagtggaaaatttttgaaatttttttgaacatgtcgccaaaaatgtcatcgcgtcaaaaaaaaaatatttctattgcatttctgttaaacaacttctgagaattgaccccaaaatggcaaaaatgtgtcattttcttgcttccaatatggataaaaattgaaatttttaatggtgaaagatggacgaaacgatcacgaagaagccttttttatttttgtgcacagattttgttcgtaaaatgagtcaagaaattagagccataaaaaattggtctcgagtctcgggaaattttcggtctcgatagtgaaaatttactatttcgacatttttaggaaattccttaacaaaaatgcaataaaatcaaaaaatacacccctaagaaacgacctaaacattttggtaatactttggtttgtcccccctatttttcaaaaaaaataaaaaaattttaaaatcgcttaaaacatctctcctggggtttttggggccactgatcacgaatccggcatccgtttcgaaccccggacccaaattcgaacaaaaatcgaaattttatttttcaccaaaattcacactgcagcgactcgtgatcacaaaagacgttc

SEQ ID NO: 28943 - DNA, 1070 bp, Heterodera glycines
attgacgtcaaagtttcacatttagacaaacaaattgcaaatgatggacaacaattatcaaaaaacttttttgctcttttaaattaatattctttaattgtgtaattagtcttcgaacttcacgtttaatggaaccgatggaaacattttatatttttgaattggaaatcaaataataattcgccaaattgcttaatctcagtgcaatttgctctgcgttttctgtccaatagataaatgatttatcagcatattctcatacaattcaatcagatcctccgatatgattttattgaaaaaggtcactcatcagtccgatgtttttccagagaattctttaacatttttgctgctgatttcttcatgcaatccttccaaaattttgcctcccttttttcgcaccaaatgctttcacccttttggcaccaatgaatgaatcaaagccgatcccgaggtttttgtgggagggcatacagctttgtgatattaatttaattgagcattggattttcgattgtctcttttttcgacgtcgccttgcccttctttttggcaattcacattaaaataattctttctgagtgaaatcccccttaaaaatatccccattaaatccaactttgcttttgctttgtgtgtgttttgttggctgctttccatagcccattacaaattggcatcactttaatgcccccccccctctaatttggcataatcatccgtccttttcccttcccttctcctcttccgtcatccaatctcttcttcccccttcattttgccctttattatttgctttgccctcctcaatgcccccattccatggccaagtcgtggcactgtcccttcccttcccctggggaacttccgctgatgtgccgtggggaaggaatgtcaatgaggcgccggaagaatggacctacagacggagggggaaggggagaacaaattttgagtccccggggaatattgggccatccgcaagattggaaactgttgaatgaatgaatgagtgggagagagagagagagagagagaaataacaaaggaggcaatttttggttatggaa

SEQ ID NO: 28944 - DNA, 915 bp, Heterodera glycines
tctgtcggtgacttgcacagtttagccgacaccaattattatagggatgggcaaatggtggcataaatgggctattgttggccaagaagccgcaaacgacggcgtcaagcatccaaacgacggcaacgtcagaaacggagaacccttcagacctttcaaaaattgcgtgaccgtaatctcaattttcaaccccccttttttctacttttgtcattaccatgggtttttggtgtagcagatacaaaaacaattcgaccaattccaaacccatgactcggattcgaccaaacttaaacaaaaattgaggtgggtagagaaattttaacatggtaattacaaaaaggaagaatatcactttctgatggaccaatgtttccattttcacttttctttccgatttatctttggtaacactttatcagtttcaaaaatgagatgaattggcatttttaattttttgatgaattgaaacgtgttgataaaatcaaagtgagctcgaaagaatgcgaatgcaaaacgatctaatgaatgttcattttaatcaatctgagtcttctgaatcgctccgttgaacaattttttttctttttttaactgaagatccatcggatggctaaaaagattcaaaattttttaatttctgttaatgaagctaattactagtctgttagagtttgggtttgcttcacaactattttttggcccaaattccaatttttatgatagtatgacataaaacaacaaagaaggcttaataatttaattacccagaaacaaagcaaaccgacgaaaatagaaagaaaaccggcagagagagagaattttattaacaaacgaaattcacaataaaggagagattaatgagggattggccatttgggacgcctttttcagttaagagagtatcttagataa

SEQ ID NO: 28945 - DNA, 1098 bp, Heterodera glycines
  unsure (1)..(1098): unsure at all n locations
ttaaatgactgaattttaaaaatgaagtcgaatgattnatgaaatgaatacgaggatgaacaatcgaaaagattgtttcttttgcacttccagattttttccaaagaaaaatgatataaacccaaaaatttgaagaaatggagaaaaatgagggtgacagacaaaataatcgagaataaagcaacacttattttaaatcgtgataaaaatgcaagtgacgaatattaaaagaaagtcttttatgtttggtatgcttatttcttctccaaaaatgttaaaattggcaatgggaggctgaaattttttttcacctgttttgacccttttcaccagccttttttcgaatgttttcatagctgccataaatcgtttcctatttcctattcatattaaattgagcaatgttctgtcttcttttcccatttttattgttttttacaatttttagtttttattttctttataaaattacaatttttttttaaatttgtttttttttttctattttatgtcgtttaagtaatatggcactgccggatcttagaaactcgaaatttcttttttgaaatttgaacaaaaacccttacccttatgttagacattttatgtcaacctgtaagaaatatataaaatttttgattttctccattcgtgctttccattacaaattttttgcctggtggtaaataaaaattacaacaaaactcatttcagaaacaagcataaaaagtttttgagactttttttttagctaaatcgattaaaaacgcataacattaaaaaaatatttatatttcacatttttaaacaaagaattcatggttaaatcgaatatttgggtatttaattaattttttttaaatgaggcgaaaaaacatagtcaaaaattggcattttgtaaaaaaaaataatgcaaaaacaataaaaaggggaacaaaaggggcacaacaaaatttttaacactaaaaaaaggttcatctcgtgccttaattacacttcagtaagcaattctattaatgaaattgtcgtgatttcaaaataataaaaattacaaattttgattctaataccaaaaactatttataatcactaaacttt

SEQ ID NO: 28946 - DNA, 1484 bp, Heterodera glycines
tttcgaatttttgccgaattcgggttaggggttcggaattttgcaaaacaaaggtcattttcgtaattaacgacacaaattaccctagaaatgactttttatttgaaaatttcaggggggggggtctcaaaacagaaaagtaccaatttcccctattaaattcattttactttaattgtttcgctttttacctatttattcccgcacattcatatgcctttacaattgcgttgaccttcactttttgttttgcacctctaatttgggctgtttcagtgctcaaaattgagccgaacgaaaacaacagtttcagaaattggcgctttttttgtgccgaatttaaaaacgacgcgtttaaatgcgaaagaatggcgccgttggggccgaaaattttcttctccatctcattatccgataagcatttgcacgtgtagagttccgcccgactctccgaagaagaagcaacaaattccatggcaatgaaggcaattgcgttgctgaacagtcgcactttgtccatgtccaatggcacaccgttcggctgattagtggagggccacagcattttttcctcagattttgacgacatggattttgtttgttgttttgaggtgccgccacggtgattatttgcttgatttgtctccctgctgaacttggcaaagttcgtttccaccagtcgattttgattatgcgtcattgggtctgatggttgggacatggaaccatcagtgccattggcagcagacaattggccaatgatgaacgagttgaacaagtcatgcatgggatcacactgaaattggcattattttacgaccagggatgacacggaattccgacttccaaaaaatttttggggcctcggaatgccatccctgtgctatatgtatcattcccacaaaaaatgttggcccatttaagtgcatttgtgctgattttttgttatctccaaaaggggatatgccaagccaaaacttttaaattaccgtatattctctaattaaggccctgtctccattaatcccgctgtctccaattatgcccccctttctgaagaggttgaaaaataatcctcccgtctctatttatccccccgggggataaatggaattattcttttttaaattcttatttttactaaaaattaattttaattaattctaaattgaaattcatttaaatgcttaataaacatgaaaaaataatacagcaaaaatcacttactttactcaagtccgaacataggtaacccagcccggtgctatgtcgttattagagctcggtattttgaaaaaagcctggacctggacctggatttcctgtacaaaaatccaggaaaatacaggtccaggaaaaatccaggcctggatccaggtccaggccgagctctagtcgttataaaaaagccatcaaaaagggggcaatcataataaattggtgtaccgacgaaaaaatatgataaaaattcgctggatattttt

SEQ ID NO: 28947 - DNA, 1138 bp, Heterodera glycines
  unsure (1)..(1138): unsure at all n locations
gcatgaccggatggataatgaatggcacacccacctgccgggacattggaatcggactttggcctttgccgctgaacaaaatgagcgcggaatagccggagggctccgcattttgagcaaaaaatgcctaaaataaaaataaattagtgcgtgtaatgatcgggttggatcaaaaatttcgctaattttcggtcatgcgcccatagattcaatttttcagaatgcattaatttgaaatgcagacacacactgaaaaattccaaaatttcaacattttttcgaaggaaaacaaaattttgtagtaaataatttggtaaaacaatagcaaaattaattggttgcgtggcgccgcaggggaaaatttggcacaaaaagcctcaaattttagtaacaattttgagcgaattttctaagggcttgtgattgacccgatggacaaatttagctaacaataaatctttggtttaaattttccaattgccccaatttgagacgctcgagcacataaaaaagcgtttactttttctgaaaatgtgcaattgcctcgtggtacgacagcaaaatcgaagaaacaatgtgcgaccgtggagttcaattcgggtttctgaaaaatggaggaaattctcgcaaaagttcatttttattaattttattttcataatttgtatttgcgaaacaaaacatttgatgtaagacaaaaaaaagcattggtaaaaatcctgactttttcgggttatttttccgcacccagcaaatttatcaattcaaaaattggtggcataccgttatatttccgcatgcttccgctggttcggcaggcaaagcgcaaccgatggcactcatgccgaagctgaaaaggcaataaatgcattaatacgcctccaggcacctgacaaatcaaattgttattattttttaaattttatcgcatcttagcaaatattattgcaaatttttgcctgaaagagatgacatcgccgccaaaattggcgcccgtcgcttcgcatcggaccacgggacgatggccgcccaattgagcacgttccaacttttgttggaattaaatttagaaaaaaattcggcgacgaccgaccaccaaatggtggcgcaacttacaatttccaccanatattgcgca

SEQ ID NO: 28948 - DNA, 1390 bp, Heterodera glycines
gtttgacggtgaatccatagatcataaaactggaaaattaataaaggaatataacaatttattaataatcagcgaaaggatttatatgtttttacatattttttgtaaatatgggctatcgcatgaaaacctcaaaatagcatttttacttgttttcttacatatcaatcagagcaagtttttggcacattaaaaaacatattttggactttttgctctaaaaacatattttggggttttggtagtttttagcacaaaatttggctgttttttggaaaattttgatttattttaacaaaagtagctttttttcactcaagttattggcaaatttccaaaaacgttcaaaaaaattttttgcgctttttgactttttaatcactttttcacttttaagtagagttgagcggtaatcggtaattgtaaaaaaccggtaacgggactgaccggtaccagaaaagccgggataggggaacgggaccaacttttttcaccggtaccgggttgaattttctgagtcccaaaatttctggaatttttttaataaatttcaacaattttcgttaacataataaaagttggaatattttttaattaatacaaaattttaatcacagttttttcttgaccagtttttttccaattttttggcacatattttggggtttttagcacatattttgagggttttttggcacatataaatccgttcctataataattgaaaagattgggtatttatacataaaatataattcttatttatctttttcacccgcaaattgcaaatcaaagacattttgatgcgttcggtggtgaaattggtctttttatgacaaatttgttctgtaaattgaaaagctctcatttgtcagttgaacaaatccttcgaaatccaatgacgaattaatgaataattcgactcgagaatggctgaaacaagtcgggaaagattaaaccatccatttgggcttctcgagattctacggaaaaaaatttctcggctattagtggctttcgtcacggttttagacgtcaattcttggagtttggtcgggtcacgagtctttgaaaactctacctcgagcatacttaacaataattgataacctgcgaaatactcacgaatcagtgaaaatgcttaattttttttaatattataaaaattcttttttaaatcgattaccatcttaatcagttcctataaattttttcttttctcaatcaaaaaacgattaatgatgtcctaataactcctaatttcccgacttgtttcaggcattctcgccttgctcttctctgctactctgtgttctcagcaaacacttcgtctgcactctctgatgaccgatctttctgcctctctgagacaactctgcatgcccaccaa

SEQ ID NO: 28949 - DNA, 1608 bp, Heterodera glycines
  unsure (1)..(1608): unsure at all n locations
cataagtattttttcagaaagtgctctgaaacgcaccaaatgttaattaaaagttaaataaggctctctgatgctttttctatcaaaagggagatgaataaatattntaaaaatttttaattcctttttaaacaggccaaaaagtttaggcttatattttaaaaagtttcatcgaacctagcgacgttagataagatatgacactttcaaattcctccgtcattgcactttgtgaggagggagaagcaatggaatgaatcaatggagaggcataatgaatgaatggatgaattatgcataaatcttgtagagaagaccatttgggaaggttcaaaagaaagaggaaaagcgaacggataatttgcgtagtttaatttgaataaataatccaaaggaaaggcaaaataaaaaaggcaaaagcaaatattatattggcaattttcaaaaatgaaaaatcttttaaaagaaagacgaagcaaataaaaaggaaaaacaccaagcaaaagcaaaggagggggggggggggggagaagggggaagacatggccagcaggccatccatgacggccccaccgcgggggcaacgtaattctccctcctttctaccttcccaaatcatttatataaattgctgcctcagttttaaaggaatatttataatttaatttataatatttcatattttattaataaattgtccatttttattagaactaattgataaaatccaattttaaaattaataaatcgtgtttaaataaataaactttcctaattaaacataatcacttaacaacgagtcatatataaatatcaaattttaatcgattaaaatttaatgtatgagttaatgctaatcgtgaatgtccgtccaattcaattaacatagcctattaaatgttcgtttgctatggtttggttttaatacttttccatcaatcgactggtgtgttcatgagaaaaacagaggattttaaataaaaaaacaattattaaaaaataaagcagcaataatctatgcaaagacaatagtcaaaatatttttcaagcaaaataagcataataagaagctgagagaaagtactctcgaatttacaactaggtatattaacccgcaaataataaaaaaatgaactaaaaattattaataataaaaaagtagattttattttaataaatcgagcggtctgctggctcgatataacgaataaagtctgaaacatggagaatttcaaaaatttataaaacaaaaatctgaattaaatattttttaaatataaatattcgtttgctaaggtttggttttaacacttttatcaatcgactggtgtgttcatgagaaaaacagaggattttaaataaaaaaaacaattattaaaaaataaagcagcaataaatgtacgcaaagacaaaaacatgtaaaaattataaatttctaattataaatgaattttaaaatattttcaatttaggattaaaactcattaaattccttttaattaaaaacataatacaatataaaatgggaaaagtacccaatatgaatctgagaaaagaaagcaaaaagaataatatttattaaaagataagtaacaaaattattgtcgg

SEQ ID NO: 28950 - DNA, 1277 bp, Heterodera glycines
attttaaaaatatctttctcttaaaatgtaacgtaagaatacgacttccccagtgaaatttaacaaattcaccaaatggtgtgtgaatttcaattgtaatttctgaaattcgtttcgactgtaggcgatgaaagtactcggtgctatatataacttcactaatcgatcctgggtcattgacgacgttaactattcttaagagtggagccatctggttcccgataattgtgttttctattaaatttggtgcataaatgtatagctgccttacacctcccgtcaaatctggcatataattcgcctcttccgcgtgaaatagccttgtgttcttaaaaccaagcacataggcgaggtgttttgacaaatctatgtgggagacagcagcggaaagatagacaataaatttttgatcaatgctgtcatattgaaattgaacatcctcattggctagtctctctcttttttgtggtcctttctcagcttcagatacttgtctattttcaatatctttacgtttaatatgctcaccgagcgcctcattaagcctattcactatcccgctaaaacccttttccgatttatcattatatccctcgagagttgatgtatatttggtctttgcctgtctggcgattccctttgcgacgtcggctgatttctttgcttttttcaagtcattcttttccacatgctccaatgttgtgtttttggctttatctacttcttcttgaaaagacttaagttcatttcgagatgtttgaatttcggttcccatctcaaccattttgtcaaaccaaatttttatatcaggctcttctaaaatgtgaggatttgtttctcttagtgtgtttagttgggtttggatggaattcgagatattgttgatctgattaaaatgtctttctacgtctctcccggcgcgttctgcggccctctttgcgacatcaatttttgagtctttggtatcttcagccttggcttctctctttccacgttgttttttgattttgtaatgatggctgaatgcttcgttaattttatttcccaatcccccggcggttttaaaattcatgtccggtaaataaacttgagtcgggacactgctgtcgttttcccatactttaataaactcttgaccgtttataccgagtgcggtgaatgagtaggggtaaataattgatgagagagctactgaccagcttgtgcccaattccagagtctcggtgagtcataactgtgaattttgatgcactgctccctgctcacgttgtgttcga

SEQ ID NO: 28951 - DNA, 1316 bp, Heterodera glycines
aaaaattcccggggttttcaacccgaaaaaggttcctggccccgggtttgcccaaaatttcccggtcccgctcaactctaacctaaaagcattgataaaatgttttcaattttctaattatttattattattgcctttcccggccttccccaccgcgtgcataacattagcatccatccgctttaccaaattgtgcacagcgcttacgacgccgcactgattaggtgatttggcattgaatctttttttcgttttaccgaaatgattttaggatttcgcccgtctcaaaattcggggacagtgtttggccaatttgcttgccaacttttcccgcatctgtgaaccgtacggaatgcaaatttaaaaaaatgcatttgatttgtattttttgcatttatttttttatttaaaatgattttttgcctttttatcggcacagaaattaaaatttgctgaaaataaaccctaatcactgctcaaattagggatgtgtgtggtcaccgggtggggtcgactggcggagggcggcaaaagaccccaaaatctgcgcgaaattcacgtgccaataatgcgatcgacgacatgcaacggagttagtcattatgcgggtactgtaacacagcaattgaactaatttgattacccctaattgatacggtaataggccgattgcactacccatcgatgctttgtgccggtttcaatgccggaaaggccgacgcgtgccaaggggacagcggcggtccgctgcaatgccaaaatgcaaaaaatatttgggaacttcaggcattttttgagaaaaaaattaattaattattcaaaatattatttttgcaaaaatgttaatttaattttaatatatttctaaagaatcacatgggttttatattattcaattaaaatttttaaaaataattttcatcatttaattttagtgataattatctgaaaagtgttcattccttccttctctttggcagggcatcgtcagttggggcatcggttgcgcaaatccgaaattccccggcgtttacacaaagtgaaccatttacaaataagtagagtgccacgggaccgggaattttgggcaaacccgggaccttttcgggttgaaaacccgggaatttttggctgggaaaaccgggaaaaaaccgggactaggtccggtccaaaccgggaccttggtactcagtaaacaattcacgagcatatttttcacagaacgtttgtcatttccccgtggattcgggcggaaatgctccgtctgaaaacgctttatccgacgccggcggaggaagaaaaaggaggaaaatgaa

SEQ ID NO: 28952 - DNA, 1413 bp, Heterodera glycines
acaggccaaaaagtttaggcttaacttttttttctccccctgatcagaagcgcaccaaactttgcagggatactgacaggaagagaaataacctattttaaatattatctagtcagttcatttaaataatttttatccaaaaaatttttttttgggttttcggggcagtccccctgaaccgatgcgcccagatttatggggagaccgaatccttccggaatagcttccctatagcctgtactttaattctgcgttggatttttgctccccataattgtttgagtaccccaaacggacacttgaaaaaatcgatttatttttgttttcggggcagtccccccgaaccgatgcgcccagatttatggggagaccgaatccttcgggaatagcttccctatagcctgtactttaattctgcgttggatttttgctccccataattgtttgagtaccccaaacggacacttgaaaaaatcgatttttttgttttcggggcagtccccccgaaccgatgcgcccagatttatggggagaccgaatccttccggaatagcttccctatagcctgtactttaattctgcgttggatttttgctccccataattgtttgagtaccccaaacggacacttgaaaaaatcgatttttttgttttcggggcagtccccccgaaccgatgcgcccagatttatggggagaccgaatccttccggaatagcttccctatagcctgtactttaattctgcgttggatttttgctccccataattgtttgagtaccccaaacggacacttgaaaaaatcgatttttttgtttcggggcagtccccccgaaccgatgcgcccagatttatggggagaccgaatccttcgggaatagcttccctatagcctgtactttaattctgcgttggatttttgctccccataattgtttgagtaccccaaacggacacttgaaaaaatcgatttttttgtttcataaatatttttttcagaaagtgctctaaagcgcaccaaattttatttacaacttaattttagcactctgatgctttagtatcaaaaaggaagatggagaaaaaatgttttaaaaaatttttccttatattttggttatatcgttttgcttttggtggggtgcttggaacagtggaatcatgcgcacccgtccgatctggcaagttaagcaacgattgctgactagccaaaaggttcggtgccgtgatgaaacgaaccagcactgcttaccccgcggcacccggcacggtcccccgaaggaatggatttaattaaattctctccttcggggatttttttccattaggtcgtccgttaaagttcgattgctctagtcaatttttaaaaattttcgctgaagatgattgtcgtgctctgaagggcggggggggg

SEQ ID NO: 28953 - DNA, 1114 bp, Heterodera glycines
  unsure (1)..(1114): unsure at all n locations
attttccataaattgatcattggaatccgcggccccaaaattttccgttaatcgaaatctcggtgccaaaaatttccataaattgatcattggaatccgaagtccccaaaatttccgtaaatcgaaatccgatgccaaaaattttccataaattgatcattggaatccgaggccccgaaattgccgtaaatcgaaatccggtgccaaaaagtttccataaattgatcattggaatccgaggccccgaaatttccgtaaatcgaaatccggtgccaaaaagtttccataaattgttaattggaatccgaagtccccaaaatttccgtaaatcgaaatccgatgccaaaaattttccataaattgatcattggaatccgaggccccgaaatttccgtaaatcgaaatccggtgccaaaaagtttccataaattgttcattggaatccgaggccccaaaatttccgtaaatctaaatcctgttccaaaaattttccataaattgatcattggaatcccaggcccccaaatttccgtaaatcgaaatcccgttccaaaaattttccataaattgatcattggaatccgcggccccaaaatttccgttaatcgaaatctggtgccaaaaatttccataaattgatcattggaatccgaagtccccaaaatttccgtaaatcgaaatccgatgccaaaaattttccataaattgatcattggaatccgaggccccgaaattgccgtaaatcgaaatccggtgccaaaaagtttccataaattgatcattggaatccgaggccccgaaattgccgtaaatcgaaatccggtgccaaaaagtttccataaattgatcattggaatccgaggccccgaaatttccgtaaatcgaaatccggtgccaaaaagtttccataaattgatcattggaatccgaggcccccaaatttccgtatcctgtgccaaaaattttccataaattgatcattggaatccgaggccccgaaatttccgtaaatcgaaatccgatgccacaaattttccataaattgttaattgggatccgaagtccccaaaattccngtatatcgaaatcccgatgcaaaattttccataaattg

SEQ ID NO: 28954 - DNA, 1524 bp, Heterodera glycines
agaccggataagagggtcggtcgaacgggttcggttaaaaaaccgaaaaaaccgaagaaaaattttcggtataccgtttcggtttcggtttttttgaatttttttatcaactaatatatttttctagaatctcgcaggctattagagaacacttagacctattttgcggcgccaaaatcgtcccgcgccaaagtgaccccgacccaaaaaattttggtagaaaaaaaataaaaacacgccgatgcacggtgggggtcggtttagtctggccggtttagtctggccgttttagtctggccgttttagtctggccggtttagtcagagggtcggtttagtcagaggtgccattggccgctgtgccaaaactaaaaaagaggggggggggggaggtgcaaaaaaagacattttgagcatttagagggcatttaatttaaacagattttggtattttgtgcccaaattgggccaatggatgtgctgaattgctgtcccactttgttcttctgctgctgctcccaaagttcgttctccgcccgtcgccccctccgccgatttgtccatttccattttctgttctcttcccggccctattttttgtgtccgatgagtgcattcagcgccaatttttatgagccacataaacaaccgcaaatgacgagcgatggcggcccctcgggcgacattctctgtgggctctgagatcgacgacagttggaaattggaaaaagctgctggggagggaggggcaatgagaacggaaggaagggagaaaagtgagggatgttcgtgaaaatatgaagtgatcacggaggaaaataataagcgattgccaattgagaaacgacgaaatgcccggggaaggcgtcgaaaaatccgtatttgagggcattggacgacggatttggaggaagggcgagggaaaatcggagcgtggggcgggggggggggggtgctcatttcgcggggggattaagtcaattcgattcgatcattcgccgacaaaatcttttcgacacaataaaagtgcaactcaaaatttggagctttgcaattgtttctcccaaaatggttggattctttccattggaattccgtcgatgagtccgtttttcaatcgaatgaatgcgaatggccaattctgtgcactcaaaaatgctttttaaattaagtgctgaaattggtcagcaggtcgaatttattgtgacaaattggccataattaaagtcaattaattaattaacagacgcaattaaactaaaaaataattagttaacaagcgaaatatcaaaattcgagggacggaaagaaagggaaaatccacaaaattctgcgggtccttttagtcaaaatccaagcttaataaataaaaggaaggcgacgagacagaagcaaagcccattttgatgagcagtcactgcaaaactttggaggaggacgaagaatggatggccaatttgcacttcgtccgctcggacattgacccggcgacggtctgttcttcgattggaacaaaaatggaaaa

SEQ ID NO: 28955 - DNA, 789 bp, Heterodera glycines
tgaagagtcgtctgcttcggctaatgaagaagtatcaacatccgatgacccagcatcaaccactgaagagtcgtcagcatcggctaatgaagaagcatcaacatccgatgacccagcatcaaccactgaagagtcgtctgcttcggctaatgaggatgacccagcatcaaccactgaagagtcgtcagcatcggctaatgaagaagtgtcaatatccgatgacccagcatcaaccactgaagagtcgtctgcttcggctaatgaagaagcatcaacatccgatgaagagtcgtctgcttcggctaatgaagaagcatcaacatccgatgaagagtcgtctgcttcggctaatgaagaagtatcaacatccgatgacccagcatcaaccactgaagagtcgtcagcatcggctaatgaagaagcatcaacatccgatgacccagcatcaaccactgaagagtcgtctgcttcggctaatgaggatgacccagcatcaaccactgaagagtcgtcagcatcggctaatgaagaagtgtcaatatccgatgacccagcatcaaccactgaagagtcgtcagcatcggctaatgaagaagcatcaacatccgatgacccagcatcaaccactgaagagtcgtctgcttcggctaatgaggatgacccagcatcaaccactgaagagtcgtcagcatcggctaatgaagaagtgtcaatatccgatgacccagcatcaaccactgaagagtcgtcagcatcggctaatgaagaagtgtcaatatccgatgaccc

SEQ ID NO: 28956 - DNA, 1185 bp, Heterodera glycines
aaatattccaaaaaaagagatagtgatttttctggattagcccgcagaaataaaaattaccagctattgaaatgcagtgggcaagcacagcgagtcgcttaaatgcacaccctttgacacgtaaaatattccaaaaaaagagatagtgattttttctggattaggccggagaaataaaaattaccagctattttaaatgcagtgggcaagcacagcgagtcgcttaaatgcacaccctttgacacgtaaaatattccaaaaaaagagatagtgattttttctggattaggccggagaaataaaaattaccagctatttgaaatgcagtgggcaagcacagcgagtcgcttaaatgcacaccctttgacacgtaaaatattccaaaaaaaaagagatagtgattttttctggattaggccggagaaataaaaattaccagctatttgaaatgcagtgggcaagcacagcgagtcgcttaaatgcacaccctttgacacgtaaaatattccaaaaaaagagatagtgattttttctggattaggccggagaaataaaaattaccagctatttgaaatgcagtgggcaagcacagcgagtcgcttaaatgcacaccctttgacacgtaaaatattccaaaaaaagagatagtgattttttctggattaggccggagaaataaaaattaccagctatttgaaatgcagtgggcaagcacagcgagtcgcttaaatgcacaccctttgacacgtaaaatattccaaaaaaagagatagtgattttttctggattaggccggagaaataaaaattaccagctatttgaaatgcagtgggcaagcacagcgagtcgcttaaatgcacaccctttgacacgtaaaatattccaaaaaaagagatagtgattttttctggattaggccggagaaataaaaattaccagctatttgaaatgcagtgggcaagcacagcgagtcgcttaaatgcacaccctttgacacgtaaaatattccaaaaaaagagatagtgattttttctggattaggccggagaaataaaaattaccagctatttgaaatgcagtgggcaagcacagcgagtcgcttaaatgcacaccccttgacacgtaaaatattccaaaaaagagatagtgattttttctggatttaggccgagaataaaaattacc

SEQ ID NO: 28957 - DNA, 1704 bp, Heterodera glycines
tcccgatccgtatcttgattttttttttgaaaaatgcccggatctgatcccgagaccaggatggaaatcccggaagcctgtcctaatcaaaatcccaaaaaaaacccgaaattgatgccatatggaatgatcatcataagctggggccgggattagagggatgggcaaaaaaaaagaaatgaacaaactacccgaaccaaaactcggaaaattccccacaatcccagagcgtaaaaatttcacactttcccgggggaaacaacaagaggggcccccataaaaaggcattataatgggaaaaatgcaaaaagaaaatgttttaattcaagtaaggtcttggtaagggaatttttgaaattaccatcatcctattttgcggctattttactattttcccacaaaagttggactatgccttccagaggtgaagcgcgacagcctctcggattattttgcgcgatccgtgaccgcggcaagttgagtgcgcgactgttctgtccgcgttccatccctgggggtcttcgcttttcggcctcatctttgtcacccaaagacagacgcaaccaaatgccacacccagggacatcaaccgaatgccattgcacttgcttggtgcacgttgggcaacgatccgccctggcgaccgtggaagctgtccaacaccgggtgggacccctccggcgacagtttggagcagtgcgactccaccgactgttgctgatggtacggatggtggtggtggggcgaatggtgtctctgctgctgttgctgatgatgataatgttgttgctgttggttttggcgccggtgctgaacactgttattgctgttgttggcattggcactgttcgcgttggtcccattgctgcagttgttggcgttttgattgttgctgttgctgctattgctgggaccgacggtggacgactaaaaaaaaaatgttaaaatttttcccgtaaaaatgaataattaatatcctgtcagcttttggcacatgtttaaaaatcatcattccattaaataaaacttgaaattaatttaagccatccaaaacacaagtttaggaccaaaatgggcacccttttttcaaatagagagcctaaaccgttgggttttttaatcaagcaaagactcaaaaatgcgcaaaaaatgggttacgttgagaaactgaaacctatttaaacatattttgggcgctgacattatggcaattgtgccaattggtcgtatgattttatgcggcatttttgtgctacaggcatataaaaacccgacattccgggacccatgccggccaggattcggattcgctcgctattccgttcctatccactccaggtttcttttttcaatttgctttatattccctattagagtttcggccttttgaaaaaagcctggacctgaatttccgaacaaatcctggaaaatccagtcctgagcccaggtccatgtcaagcagttctatcccctaaacctgtggtgaattacttgctgctgaaaatactgttgttgctgctgctgttgctggtcactgctgcccaccgaggagggcgccgtgtacggcgaattggcggccgacgacgtgcgactcgttgagctggtgatggcgcgcacgtcgcgcatcacgttgcagaactgctcctgctcctcattttgtttacgctcctgtgcggggaaattgttgtaaaacaaaattaaaat

SEQ ID NO: 28958 - DNA, 1049 bp, Heterodera glycines
ggaatagtagcgacgaccctaatttttctggatttctttctgggcgagtttggctctgaaaattttgaaaaaacgtctatctcttttctgctcaacactcacatgaattccaaccacattttcggaatagtagcgacgaccctaatttttctggattttctttctgggcgagtttggctctgaaaattttgaaaaaacgtctatctctttttctgctcaacactcaaatgaactccaaccacattttcggaataatagcgacgaccctaatttttctggattttctttctgggcgagtttggctctgaaaattttgaaaaaacgtctatctctttttctgctcaacactcaaactatgaactccaaccacattttcggaataatagcgacgaccctaatttttctggattttctttctgggcgagtttggctctgaaaattttgaaaaaacgtctatctctttttctgctcaacactcaaatgaactccaaccacattttcggaatagtagcgacgaccctaatttttctggattttctttctgggcgagtttggctctgaaaattttgaaaaaacgtctatctctttttctgctcaacactcaaatgaactccaaccacattttcggaataatagcgacgaccctaatttttctggattttctttctgggcgagtttggctctgaaaattttgaaaaaacgtctatctctttttctgctcaacactcaaatgaattccaaccacattttcggaatagtagcgacgaccctaatttttctggattttctttctgggcgagtttggctctgaaaattttgaaaaaacgtctatctctttttctgctcaacactcacatgaattccaaccacattttcggaatagtagcgacgaccctaatttttctggattttctttctgggcgagtttggctctgaaaattttgaaaaaacgtctatctctttttctgctcaacactcaaatgaactccaaccacattttcggaataatagcgacgaccctaatttttctggatgtctttctgggcgag

SEQ ID NO: 28959 - DNA, 1228 bp, Heterodera glycines
  unsure (1)..(1228): unsure at all n locations
ataaagaaagggaatgtgccaggcccgaataattaaataatgtccttcccgaatttaggattccacgggattattgcgattttccccaatttcctattccacttttaattgctcaattccctttaagtaattctccgctctttatatttccatgtccttttctttaacttctccattatccaattaatacgatcgatttatttatttaaaaatggaaaatggttgtgattgaaatgtgagaatggaattgcgaatttaatatgaaatcggtaaaaacggaattatgagtttaatgtgaaatcggtgagaacgaaaaagatttgagttccaaatgtattttagtgaaaaatagccaaaaaggaaaatcctgagggacggcctgggatgggagtgggaaggaaaaccaaaggggaattttatccgggatcgaaaaagggactcgggataacgagaaaaggggacggagaagaattccttctccggagttgctcgggaaatgtccggggagagccaactgattttccacttccacggggaaaaggatcagcgaaatgctgatccttaaccccgcctttttgttattgtaagggggaaagagaggggtactgtacgttacaataatgtgcaaaatgttaggcctcgggtgggaatcgaacccactaatccacccaatcaatgggcagctcttataccattgagctaccgtagtttcaagggacggctaatactgtagcaacaaactttcataccatataccaaatttgtaacccatacacaattctatgtatggacaacaggtggaacagcgtcgtttccggctggcacccaacaaagtggtgtttcggccacgactgcgcatccgtcggcctggccagccggcgccggcactcgaagcaccggctccgccgtcgcccatcacggcactggcacacggcgcggaccagcaaccgcagccggcacaacccattgcactgcccgcgttggcaccgctgaagccggaaccggaggagacgcgtcagtgaactttgattgagacaaaaacggcggaaacccgtctatctttttgttttagcagcgcctgtgccacttccgcccgctcctccggagccgccaccaacagcacctcctacgccaccaccaccgcctccggaaacaccggctccgccaccaccatcaccggaaacgccggcaccacctccacaccgcttccngcaatggaatcggttcg

SEQ ID NO: 28960 - DNA, 1617 bp, Heterodera glycines
  unsure (1)..(1617): unsure at all n locations
ttgatttttcgnnccaatgaaaaaattattactgatgtactgtaaagaggcatatttcatcggatcattaacacaatttttcacattattactcctaaacacaccccaaaaaaccaaaatctaaactttgttggttttgtccatcgaatgtgttacattttaataatagtcaatagcatcaaaggctaaatgccttgtcaatatgaatggtttagcataaatcaaaaaatattccgcctttaaccagtatgttgttagaaattttaaatgagtgtattcccaataaagcgtttaacaaagaaagatttgactcctaaatacccaaacatttattagcgatccgattaaaagaaaaaggctgaaattattcgaggcgaagctaaaactgacccatttaaaaagagcactatacgaatagcgattttctttacgatgatgaaaaaatacgaaaccgaaattaaaataccgtaaccgaaattgagaaaaaaggctgatttcgaaagggaaagaaaattcttgatttgataagatgatgatacgaaaactttgagatgtcgaatccctattgagagatactctaattctggatttgatgagagaataagatgctgatcgataaccgagtgctagagagagatgtgaggatatttgccaacttatttgccgaattcgatttaataataaggaaacgagacccgagcgatacgatacttgggtaatattgatgagaaaatgatcgaatgctttgatatcggatgataaattttaacgtcgtcgagacccgaaattcttgatgaaaaaacttccgaacgaaaatggcacttctccgaggatgagatgattagctatgaaaattttgaaaaatttgccgtttcttctctttcaactgttattactgacttgtttaggatctcattagacattggttcacttccagacatctggaaagaatcaattgtttttccgctttttaaaaagggtgacaaaaataatcccgaaaactataggccaatttcattaacctgctcactctgcagggtaatggaaagaattttaagcaaaaatatttacaattttctattaaaaaacaaaaaaatttcggaatttcaatttggttttgttagaaataggtctacaacgagtcaactaataacagttgtggaagattggtacgaggcaataataaatggaaaaaatgttgtgtatttatattgattttcaaaaagcatttgactcagtgccccatgaattacttttatacaaattggaaaaaataggtataaggggcaaacttttgatgtggataaaggactttttgagtaataggacttttcgtgttaaaattgtggaggatttatcctccagtaaaaaagttggctctggcgtcccccagggctctgtccttggacctttattatttttgatttatattaacgatcttcctgatgctttgtcatcaggagtaagaattaaattatatgctgatgatgttaaattgtatatttgttataaagcaagaaccgaaacagaaattatgcataaagcattgcataatttatcagaataggcaaataaatggcagatcataatctcaattaaaaaaacttttgtacttca

SEQ ID NO: 28961 - DNA, 1014 bp, Heterodera glycines
atatattttccattagtcaattttttaaagcattctctatcagttaggcaatgatttttacgaatccatcacacgacgcacttggactgcgcggtgaagcggagtgttcccatcactgccaacattatttgggtccgccaaacgcaagtaaattcagggccgagttaaaatatttaaatgaaggatagttcaaaaaaagggcgttaatcaatgtcgtctgctgatgaatccggtcacatggctcctattcggcgatttcttcgtctggcgcttgttcattttggataaaaagattggcaaagaattcgtatggcaaagtaattttgaaatctaaatttttttgaaagaattttgataatttttttttattttaaagagcaaatttaaaagcagatttttaatttttaattccaggaattaatggccccgtttgggcaatggtaaagaattactgtacacaccgtttcaaaaaacgatacatgtgccaataaatagagagtgaagagaaaaaacatctctctttttggcgtactattcctttatctctgttaatagagaaaaactgaatttattcgctctatagaactttttttccgccttacagattttctttaaattttgcatatcgacagagaaaaaaattcttcatttttctatgctgatttattattggctatgctcaagttcaaaagttacaagtttagaacacccatatattttttctaactcaccaaactgttcaacatttgcttagaaaaagcttctcctcatcaagagcttttgaatgataccaagatctttcaatttagttggcaaaaagcttcaaataatttccgaaaatctattttttaaattttttggacaaaaataaataaaaatattcatgttgcacaacggactcgaacctccgccctcctcctccctttgtccctttactatcttacaaaaaccacttcgccacacatgcaaatctttttggaactgggaggcaaaaactgaaacggtgtgtgtacg

SEQ ID NO: 28962 - DNA, 1746 bp, Heterodera glycines
aaaaagaaagaagtttaatgtaatttgttaagagaattgttaaaattttcaaaaaatttgcccaaattctttataaatttaacttttttggattttgaggcggctttagcccactcacaaatcagccccttcccccctggcaacgcccttgggctaaacaatttttttttttttttttgctgtgccccacaaccaacagcaaaaagatgatgaattctgggtggtgatcatggtcaagatgatgctgatttgatgataataaaatgcaggattaatgatcaaaaaaagccggttcattttccacatttttttttatttgcttcgccgctgtcgccgcactttttgcgataatccgccaccaccacccacgcggaagcaaaaagggtttaacacaaacgcatctgtgtgtgatgcgcatttatatgtatgcaaaaaccaaaagcgatccagtcatcaagtcttgacaaaaaaaaaaatgcatgcgtctgcaaaaaagttcgaaaaggcgtaatttgtaggttttttacgagaatttagaaaaaaaaaattttttacgaattttataggctaaaaaacacttgtcaggcgctttcaaagtctgatagcaaatttataaaaattagtttaacaattgccgtatttcctaacctcccccccccccccccctcctaaattagagcccccccccctcccacgaaataaaattcccctttcgagggggattgaaaaatagatcctcctgctgctgggcttgatttatatagaatatacagttaggtatacatatagctcgcaactgcaataaaagccaaatggattttttcccacaaatttctgaaaaattttttttgtaaaattgccaaaaaaaaaatgaaattcgcggttccgacctactctagcatttacacaatgctcaaaatgaatgttttctcgccctttatgtacgcctcgcgcgcccgccactaaaattctggcaaataaaacccaatttttgccttaattacttaattgattaaaaattctattatcatacatacagtttataaaaaatgatgctgcggcattcttcattattgtccattagcattgccattctgttgctgctgatgcccaccatgttacagagttgccatccgacagataatacggccgccgctggaacgacaggtgttcatcgacagttgttttttttaatttaatcaattaggggctacagtaatggaaaatattttttgctactgtatttccttccacactatgtttttaattaaagtgaattgataaattaattgaatcaaaatagaaatggcaaaaatttgttaggatagattagaattattttaaaattaattggttttaattctatttttaattgtggaatttttttttttaaatctcgattcccgagaaatttgtccccagtttttcggggggggggggggggggtttcggcttcgatttactactggctcatttctcgtgtctcggttttcggtaaaaaaattaagaaatttctcgccacacatacccaagggaatacggtagtcatgaaatacggtaactaagtgttttttgtattcagaaataaattttctaagcggtgattattttaattattaaaaattgggttagaaactgttaaataaataattttttttttataattatttcttccatcaacagccaccacaaatgtcccaacgttaacggctgcttcaactgctgcaacaaccggtggaggtggca

SEQ ID NO: 28963 - DNA, 858 bp, Heterodera glycines
  unsure (1)..(858): unsure at all n locations
aaaaagagatanngtcgttttttgaaaaaaattataacgagcaaaaccaatccaggtattcgttagggagtcagcaattattttttccaaggacgtccatttattttggcattatttcgtattaccccgaaaaaagagatagtcgttttttgaaaaaaattataacgagcaaaaccaatccaggtattcgttagggagtcagcaattattttttccaaggacgtccatttattttggcattatttcgtattaccccgaaaaaagagatagtcgttttttgaaaaaaaattataacgagcaaaaccaatccaggtattcgttagggagtcagcaattattttttccaaggacgtccatttattttggcattatttcgtattaccccgaaaaaagagatagtcgttttttgaaaaaaattataacgagcaaaaccaatccaggtattcgttagggagtcagcaattattttttccaagggcgtccatttattttgggattatttcgtattaccccgaaaaaagagatagttcgttttttgaaaaaaaattataacgagcaaaaccaatccagggattcgttagggagtcagcaattattttttccaaggacgtccatttattttgggattatttcgtattaccccgaaaaaagagatagtcgttttttgaaaaaaaattataacgagcaaaaccaatccagggattcgttagggagtcagcaattattttttccaaggacgtccatttattttggcattatttcgtattaccccgaaaaaagagatagtcgttttttgaaaaaaaattataacgagcaaaaccaatccaggtattcgttagggagtcagcaattattttt

SEQ ID NO: 28964 - DNA, 1597 bp, Heterodera glycines
  unsure (1)..(1597): unsure at all n locations
gagcatttgcctaccatttaaaagtgccaaaggcaaggagaaagactgatcagttgaaagatcactctaatcggttgagctgatcagttgaattaatcaactgatcagtctcttaacattgatttattgggatcagtgattggattggtcatcagcttggattgcttttccattgttttctgtctgttccacctgttctcttgtccatctcgtctgtcgtagctgccgccactgttcccagaccaagtcaatgaatgagtcttaatcaatgggtttagtcgttttttatcaatggcttttcgtccataaaatattaaattacgatggacgtagaaaatggggtcgttcgctgccaaagttggcggtttcatatcgccgccgacgaacaaatggacttgggaatgtgaatattcaagcgcaccgaagttgggctggtagggacaatctgaggaagtgatcaatcggttgagggagaagcgggtggtgatcgggagaatggtgaaagggaacgaacggatcaatggtttttttcggttttccactgatcggtcggccattctttgccgttcgattcgtccggcggtgccctccccccggcccgatgctttcactttgttgtggtgccgtataagccaacacttgttcgatttgggtctgtcccgaacacgctgttcacgtcgttctccgtcgatcacacgtccttccgccccgggccatcttcaaatgattgctcaattttttcaatttttgccaattccaaccgcaaaatattcgcccgcccctccaaagtgcgccatcccgcaaaaggtccgctcacaacgtttcccagctgatcagtttcccccataaactgtggagtgaaaatgaccgaatcggccgggttgggcaaatacgagtcgagcacagaatcccaataaggcagtgacaacgacgggtcgaccagacgaagcgcaatttcaaaccgtttgatgaactcgcgatggaacggcaaaaagccggggcccgaatgagcgccggaggaaacgccgacctgagaaatgacagaccaattagcaaatgcacacactttgcttcagataggagcctatataacgattaattgttagtgcttagagttatcgattgatcaacttttggccaattatcgattggtcaacttttggcctatggatggcaatttctcagtgaatgtttggatcagttcagtcactcaattccattgtttgcctgtctgtgctggtcgttgaatctgtcaaactctccgctcctcttcagctcgcccatcgcctggtgcagcttccgtctctccccgtcgctcattgtccgatattccctcctcacggccatttccaagggctttcccccgggcaaaacgcactgtcccccagggccagaaattccctgggtaattagcaaaaaattgagggacaatggaggggggaaatgcctggaaatagggacaaagacaagccaaatccatgcaggagtgggcactggggttgaacggacgcggcacggcccgggataacgacggctgatcaggcacaccgngtgcactgaccggcaactgattgcctntctgctgngcgatggagcg

SEQ ID NO: 28965 - DNA, 1588 bp, Heterodera glycines
ctcttcacactctctgatcaattctctctaaaatttgcatctcaatttctctctctctctttgtctttctctctctaccccactctctctctctctctctctgatcaatttactctttaaatgttcgtctcttttcccaatctgtctctttcttcctctcccactctctttctgttcccatcatttctcttaccatttccattgtttttgttccatcattttgttgattatgataataataatgatcctctttctccccttcttccatctgcttttcctcatcttctgctgtaatcctttcctccttttgctttttcattttcccggcactttcgctgcgtaaaattcggtgagcacagtcaaaggaccgtcgtgagaagaaataagagacgaacgaatattcgagcagtacaaggaaaatcagtgcctaaaaagggcaaattggggagaattggcacttcaaaggcagtcacttgggagaacgtttgccaaatgtccattgctttgatgtaactgacttgtggcaagtcttgtctggcctaatttaaaaaattaattaatttattttacaaaatatttaaaaataaaataaaaaaaaggcactccgttagacattgtggtcaaagtcagcagactaaaaatgctttattatgtaataaatatcattaaaaatagaacaatgaatgccttgtgattgtaagggtaatgcgcgcgggcgatgcccgggggtccaaccaaaaagtcatccacgaaacggagactaacatggctgaacatgaagaggacaaccaacaaaaggggacggacaccgtaatgcgagcatgggaatacggtggtactgtaccgcttgggatgtacgtttggatgaggtggaagaggacgagccgtttcattacgatgtaaccgcgcaggcacgaccaaaccccttgaggggagggaaagggggggggatgaaatgccgacgaacgacgcgcactgactgaccaatgcccctgaaaagagtgtacggactcgtgcaccgctcgaagcgcatccccgtgatgaccatgtcgttaagtttcagctccggattggtcgtgatctgttcttatgattaaatgttacgtaggaaatccaaaactgaaagcaaagccaccgtaccgggtagtacggtgggtccacgtgccaactgaggttcaccaaattttcgatgtaagcgaacggttggatgaccattggacactcctgacgatcgaatgggaacagctgaatggcggcggaatgtgccgttcagttttggtgcttgccttttgctcccaacctgcaagtccatgttgcaggagagagtcacgtcgatccttaattattagggtaataaaagaagcaaaaatggattaataaacaccttaacgttttaaatacaaggccatccgggtaaattacgagcatctgtaagggaggaactcattaagggtaattagcaaagaaacgaacgcacaaagtttggcattgtcacttcctgaagataggcaaatttggcatctagaaagtataaatctgaaattataaaacgcctgattgtccgaacacgctctgcttttcttgacct

SEQ ID NO: 28966 - DNA, 2157 bp, Heterodera glycines
aaatgcaaaaaaaaaaattatttaaggccatttttaacatttattgggaaaattaatgcttttttttgccatttgttaaaaaccagaagacaaattagggccggtggagtgccttccattaattattttaaattaaaaattggaggcaaataaaacaagtaaatattattttcaataattaataattaaataaattattaattaaagtaaagtaccaccaaatttacctgcatgacgtggtcattgatcatcaaattgttctcaaatttgtcgatgaccggaaggtgaaggctgatctaaaacgtgatttgaaacataaatattaatttgtttttccaacaaaaaaattttcataaaaataaatggataaaaggaaccaattaaaatttttgacaaaaaattctttgatatactttatttatgccgaccattttttaatgaaatgaaatttcttcaaaaaaaagaaacttttcattgaaatctaaaatttccgagcgcaaacgacgaaaataaatttccaaaaagtcgaaaatagctcaaaggaaaataggggaaaaagattaaaaatctttcataatctttaattcgagaaaattaattaaagatttgctaaaaatatttaggtatagcgatttgatccctaaaaaggatacaccaatggaaattttggaatttatttttcagtctaagatcatccattagtgcgagtgattttttggattaatctggatggatcagtccattaaaattagcgttgggaaaaaaacaaatatttatataaaatttaattttccaaaaaaaagaaacaaatgcacttttcttggctctcctccggcgcagctgtgcatgatgtccatgcgcacattctcgaatttgtatctaaatgaaaaataaaacaaaaaaatcaattcaaaataatttttaaatgacagaaatcattgaaattttcccctaatttgcttgtaaaacttatgttgcattaaatttaaaaataacagaattgagcagccaattttagtaataaattaattatattattaaaatttttaaaaccaaacgaattaaaatttaacaaagtttcggtaattgacattgatttcataaaaacaaaatgatttttttgtttccaattttgtaaaaatgtgtaaaattttaaaatctataggtttcgagaaaatttattggctatgaatgctgccaagataatatttattatcttatactaaatttaattaaaaatatatcaaaaattgttttaaaccacacacactaaagtattctctaagcaatatttaaggatttagattttaaataagatttactcaagtggctgcatgatcaggttgcttttgtttgcagctactcccattttattgaccattggacaaagactggaaaatggacattaaattttatgaaaaattattggcaaataaatgaaatataatttgaaaaaatagttaatcattaaattaaattttctttttggtattttcaaaaaataaaaattcaaatttaccgttccatcaacaaaacattgtaggcaaagttgctttcaccatccgtcaatttcacgttcaattgtctataaaaaaaaattatgaaaaatatttttaaaaacaacgaatttttttggtaaaaaatggaaaatgatttaaaaaaaatcattttttatttgaatgatcaagatttttgtaaaatcgtgatcaaacccagcaagatctacgtagactgtgattttaaatgacttaaaatgagcatgaatttccataaaaaaggggttcgaaaatttggtagattaaacagcagggatttctgtaacaatatggtcgatgttacggtaatggaaaggaataatattttacttatagtttccgaaaaatattcattttaatagttgcaaaagcatatggccaaagactgcgaaaaaataaattttggtaacaaattttttgaaaatttcgaggctaataccatcggatgataccataaaataaatgattcccaaaattttaaagtaatttaactggataaaaaaaaattttcatacataaattagggaactcacttgtattggtgccaataaccgctgcaattggagttgggaaggaaaccctaacaaatacaaattaataaattttaattatatttaatttc

SEQ ID NO: 28967 - DNA, 1178 bp, Heterodera glycines
tttttgaaaaaaattataacgagcaaaaccaattcagtattcgttagggagtcagcaattatttttccaagggacgtccatttattttggattatttcgtattaccccgaaaaaagagatagtcgttttttgaaaaaaattataacgagcaaaaccaatccaggtattcgttagggagtcagcaattattttttccaaggacgtccatttattttggcattatttcgtattaccccgaaaaaagagatagtcgttttttgaaaaaaattataacgagcaaaaccaatccaggtattcgttagggagtcagcaattattttttccaaggacgtccatttattttggcattatttcgtattaccccgaaaaaagagatagtcgttttttgaaaaaaattataacgagcaaaaccaatccaggtattcgttagggagtcagcaattattttttccaaggacgtccatttattttggcattatttcgtattaccccgaaaaaagagatagtcgttttttgaaaaaaattataacgagcaaaaccaatccaggtattcgttagggagtcagcaattattttttccaaggacgtccatttattttggcattatttcgtattaccccgaaaaaagagatagtcgttttttgaaaaaaattataacgagcaaaaccaatccaggtattcgttagggagtcagcaattattttttccaaggacgtccatttattttggcattatttcgtattaccccgaaaaaagagatagtcgttttttgaaaaaaattataacgagcaaaaccaatccaggtattcgttagggagtcagcaattattttttccaaggacgtccatttattttggcattatttcgtattaccccgaaaaaagagatagtcgttttttgaaaaaaattataacgagcaaaaccaatccaggtattcgttagggagtcagcaattattttttccaaggacgtcatttattttggcattatttcgtattaccccgaaaaagagatagtcgttttttggaaaaaattataacgagcaaaaccaatcccggtatccgttagggagtcagcaattattttttccaaggacggccttttattttgggtttattttgaatttcccccgaaaaaagaaaaagcgtttttttaaaaaaaatataacgaggaaaacc

SEQ ID NO: 28968 - DNA, 1507 bp, Heterodera glycines
ttattaatgattaattgtttttctcttccatcggaaattctactttttttatctacaattttccatttattattattcagaaaccaaaaattgagatttaaatttaaaatcatagacttgcaaaaatttctgaatcttcatacatcttatttttagtgaggaaatttttaagtaattaatcaaatccatttttgcaaaataatttagaaatatcattatttatttatttataaattattatttttctttcattcaaaattttttacatctttatctgtaaattccatattttcaatttttaatttattttttatctataaaccataaactgagattatataccaaaatcaaagactctcctaaatttttctaaattcttttttgtggtaggtttattttatcgggaaattttcggtgaatattcaaaacattttttaaatggcttaaaaaaaagtcatttttaatatatttttcgtattaattactgtttttaattaatttttattatttaataaccatcagtttaccatgtcatttcctaccaaagaagctgcaattaatgaaattggccaactgtcgactgaccagcagaaaagttagaaaacaattaattaaataatttaaatgaaatggggggatttgacttttgccatttcggttctgctcatttgaaactgaattttttttttctttttttaaattattttgaaaattttatttttcgatgctattcaattatgtttcagcttctgcatcaaaacgtccccgaagccaaaacgacgccggggccgagacggcggtgccgaaacgtcctcggggccaaaacgatttggccgaaaactcagttgctacagaaacagaaacaaataatggagttgaccatttgctggcgactgatcagcaccaaagttggaaattaattcaaaatttgaggattaattttaaattatctgtgccaatttggcgttgaaaatggcattttaaacaaatcctaagtttcaaaaattgtaactacaaaagcccacaaaaagtctaattgttcaaatgttgtgaaaattactaaaaaaatcaattaagttttgcatgctaatagagagcaaccaaggctttcgaacaataaaaagttttgctaattttgttgtttcttggaaagttgtgaaaaaatttattcaaaaaatcaaaggtggtggtggatttactaaatacgccagcatcacttgaaaaaaatactatctattattatataaaatagatattttttaataataattattttttatgttttctaacaaatgcttttaaaaatgccacaaaatttcaaatagataattagttgtttgagatttaatttaaaaagtaattaaatccaagaaatatttcattaccttaaaagccctttaatttaaatagtttatttgtttttgcacagttgacgaaaacgctaccggacaaattggagcaaaaaagaagccgtttcgtgtgctaattgtttaattgaaaaggcaaa

SEQ ID NO: 28969 - DNA, 1517 bp, Heterodera glycines
  unsure (1)..(1517): unsure at all n locations
aatgacagattgcggattgtgatcccgcaaatcanttcatgatntatgccatgacataataaaagttattnaagctttttattttttactttgttttaccaaggatacaattaattaatggaatcgaattttgttgcatttaacaacaatattactgatcagaacaacgaagataacgatgataaagctgacaatcatgcaaagcaatcaaaggaaatgctgaaagagagccaaagtgaagcagaaacatcgtcgaaagaagaagcgaaaaatgaattggaggaaacggagaaggaagaaagaaagcaaaagtcagttggaagtgaatgtgagcagcaaaaagcgatgagtgactcctccgaagagtccggccgtgaacactttcctctggtcgaacatttggactgttccccgctttaccgcgacccgaccttcgctgaactgtgttccttcttcaacatgttcactccgatgttcggctttaagcccctttccttttcaaaattagagaatatgttctgcactttggtagaaggcgatggtttgttgtaattgcatttttttatttgttaaaacattgcttcagcaactcgcgagctgattgatcttcacataacgctaatgcgaaaaatctatttgaagtcggctcgggcggataaatgggaacaatcgctgctgaaattttgtgcaattgccccgggattggacgcagaattccggcagctgcagcgaaacacttacggaaacattccgatgggctcaaaactcgctgtaatgaaagccctttgtgacagccaattcgattacaatctgaagttcaaagaaaatgtgcggccattcattcagttgttgctgcttttctacaacattttttcagattgccaattcttttcggcacaacgaacttcgtctggcgccgattggcactgacaaacgcggccaaatgtactattttcaggtcgattatgacctcgagttccgagtttactctgaggaaaccgatgacatggctggtgtcagttggtcattgagagcgcgtactgaagctgaactggccgaactcattgagaccctccgaaatccggattatgggctggtcacaaaggaacagcaggaagaagaggaggcggacatcgacgaggaacagcttttggaccagccgaatgaaggttaagccaagcaaaggaagcgcatggaaatggattcaaatttagcgaggaaagatgccactcagacgaggccctcctcggcttcgtccgcctcaaagccttttcagccaaacttaangtgacgaagagcgacagaaagtgcaattggagggaacattttcagtgctttgggaccattacaaaaagggcggagattctgaacaaagtaaacgaatcatgcaataatttttcatcataaattttaatttgaagcgcnaaaatgaaaagagaaaaagcgtggccaatccgccgaaatttcgtcaacaaatgccacccaancaaagcaaaaggaagaacaaagggagagca

SEQ ID NO: 28970 - DNA, 1622 bp, Heterodera glycines
acaaaatactggcgaaaattttacattttctctctcaacacaaatgcgatttttcactgatttttgcagaaatttttttaatttaataaaaacataattaatacgttttgttaattgagtcgaaaaacaaaaaagaaatttttaagtatttttttcgaaaattaagttaagttgaaaaataaatgtaaaaaaatccgacaatattttagcaaatgcaaaagaactagaaaaaacatctttaaattctaataaaataattaattttaatttgataaaaaaaatattctaaaaatattttaaaggaaaatttttttttctaaatatatgccttatttgcttaccaattcaaatggtattttttgctggtctttaaactttatttcttatgtatgtgaatgaataataccttttggtcttcgccaattcgaggaacggcaaaaaatgtttttttccaaccaataaaccaattaattaattaattaattccagaaattaattaatcaatccccaccatttaatgcggcagccagaattaattgcgttttgtgttcacgcggaaacattgtgatggtgaccttcaaaaatgatggtgctgcaatttttcgctttaaaaacgcgcgtcacagtcactgatcaaattgggatgtgcgcggcgccgaatgatcacgcattgtgatcagtcagtcatttacggcaattgcatgcacgcccactgcgcgcttttttggggggcctttgatcaatgacaatcatttttggccctccgatcactgcctgctgttgtaagaaaatttttcatctaacatcattgctgtcggtttagcagcatgtagtgaatatctctcagaaatttttgtccggtcaccacgaccagcgattaggagatatttttttttttgtagagaatttaatctgatcattcaatgatcaattgaagagcaattttattgcgatccatcatttacaaatgctaaatttagtggttattttgaagaatttagatggattcaattcgcttctttataaataacaaataattagctccgaccaataagtccaaaacatcgtttcctgtgttccttgaagtaaccagtatttaatagccaatcaaagtctgaataaattttctatcatggaacaaacttccgtagcgaaaagcatttagaaacatatgctatgacgaatttcttagatccgtaaggtaaaggtgggggggggggggggtaattaaacggacaatacaataatacttgcataaaatatgttctaggcatcacgggagtagccaggtccccccggtttataagaatatggattatccacgatgttgataatcatgaccatgatgaaaatttccataaatttgaattttggcgtagaatctatttttaaataaactcaaagtataaattgttcgacggacttttcctgaaaataatgacgaaaaaatgaatgcttattttttcgaatttcactctcttcaaaattatgaaaatcatcggtctttaatgatacaaaaaaaataacttcatttggttgcttgtcaacaaatttaggaatttaatttttcattttcaaaacttttagtgattttttttttaaataggcccccagtttttttt

SEQ ID NO: 28971 - DNA, 1263 bp, Heterodera glycines
ttttttcaaaacaaaggttttctttaaaaaattgccaataataaaaaattaatgtaataattgccatacaaaatctaagtgatccgctttaaaacgatggatatcttattttttcaattccttttataaaaaataattccacaaaaacaaaaaaataataaaaagttttttgaaaattgttttttttgatatttcccaaaaagtgcagtatataaaaaagattccaaaccttgaacattcgcggctcccacaggcgaatttcgccgtcccgtgtgccgaccagcaaccgttcccgctgctcatccccgccaagcatggccatgccaacgacgggcgcatttgagtcgcgcaggtgcaacacctcgcagcccttggcaggcactcggatgtcgaacagtgcgacagtgccgtcagaaaagcctaaaattttgggcttctgcaagcttttacgggataaattttgtcaaaaattaagattaatttattcaatgggttagttttgtggaataagtttaagaaatcctaaaagtctgcgtttcatatgataaatggcgaataaacattttttctcttcaaaaaaagcggttaagttcaaaaaatgctaatttttaattgcacttttttgcatcaaactgtaaattgttttttagcccttgggttactagataaataaataaatataagtgaatttcctcaaatctatgagaatgggctaaacaaaaattccattctttttattaaaattcccagaaaatgattaattgccccctggcggtgggcctgggtttacctaaaaatttcttattttttcccaaaatttctttcactaaacgaaggacgtaccgcagctgaccaaatcaaagcgcagctccgacccaaccgccacaacggcgcccttcgcgtgcttcagcgtcacgtcgaacaccgcgcgttcggcccacgcgtcccacacgcgacagatgcgcacattgccggcacagacgaggcgccccccgcgctggtcccaactgaaaaatggcacaaaatcaaataaacgccccttttgttcgatgtatggtaaaaattaaatttttttaaacgaagtttaacattcctttgtaaatttgggccaaattttcacgacgaatttaattaaaaattcgaagattttttccaaccgtgtgcagacatttgcgcctatatcgaaaatcggatttaaatttgagtttttccaatcctatagctaataaaaagcattaaagttttttaatttgctgacgataa

SEQ ID NO: 28972 - DNA, 1308 bp, Heterodera glycines
atgctttgcttttttgctccttaatttatgctttctttttgttagttattaatttattgctgtgagctttcttatttggtttgtctacggaagggccgaaacacttagtttttttaatttgtaatacggaagggatcgtactgactaggcccacccttccagttaatttttttggcaattgtcgtccgcaattgtacggtccgcaattgtcgtaacacctataaaattcgaatgtcatcattaaccactttttaatcaacaaaggacgaattcgcgtcatttcgacgtaagatattttgtttaaataaaaaatataaaaaacaatcaaaatattttaattacaatttatttatttttcatttttttagcaattttccaaatctgagcacattggaagaaatgagtcttttgtttgccagaattggtgagccgaatcgagcgaaaacaatggaatcatcaatcgcaagcagctcaggtgtgtttggacaaggtggaaacggtagtaaaatatttaatttttgggatactgtatatatcaaaattaaatttaaacattcagaagtggatgatgatgggaccagcagcagcttttctgacggtaatagcagaaaatcagcaatcgctggtgagaaatttctttttttgcataattttccaatttctgaattacaacaaaatacacttttgaggaagactgatattgcttcataaattatagcttttaaaaagacaaaacgatctgataaagaaaggagaaatcttttgatttatgttaaatttagacttctttttattttcagacagaagaaaaataaataagttgttcattttgactgtagtgaacattacggtaacagtggcagtgatcattttctttacggtggtttaaatttaaaatattattataaattatttttttaaatttacggttattttcgattgtcagattgagaatgcgcggatcacttctgagttggaatttttgaagaaatttgttggaaaaatggaacaacaatattggaatggttggaattaatattaacttttgtaatttcggaaatcggaattccgtgccatccctgtctctgactataaatttggattaaataatttaaattaattaattttcatttgataattgttaggtggtcaacagactgaattttgtaccaaaatggacaccgacaaagacatgatcaaagccattgaaacaaaactcatcgaattggtggaacatcaaaagaaggaagaaatttttattggcgttttgaaagaccgatttggaaagggtaaaaaaagaaaaaataa

SEQ ID NO: 28973 - DNA, 2065 bp, Heterodera glycines
  unsure (1)..(2065): unsure at all n locations
aaatcacttttatttctataacnttttttcaaaaacgtgataaaaagctaaaataaaatttataaaatagagcaaaaaattgcggatttttgtattattttacttttccaaaataacttttcagaaccgtgttcagaatttttttctgaaaattcgaatttttccagaacttctggaataactttttttatattcatgatagagaatctaaataaaagccataaaattctcctgattttttgctatttttaaagctttgttgtatgaaaattgacttaccctgaggttagttatgaattttcaaatattaggccaaaatcccgagggccaaaaaattgccaaaaaataaagaatttttaaaaaattccaaaaattctgaaacgaaaaatgaacttcatattcgtgctcagcacatcaaaataccccagaaaaatatttttgaccccaattttcaacccaaaaaaaattttcgaaaatttctagggggcctagctcgaaaatttttgaaaatttccgaacatgttgcacatcatccgatagagcttaaaaagctctacaattttgctcttaggccatttttggctaaaaccaacccctaacgagttatgagcccgggactcaaatgtcccgctcaggccaaaatttttttctatttccgggaaaaaatcgaaatttttccgaaaaaaataccagtcgatagagctcgaaaaactatgttttggaagtggtctccgtttttctgggaaaattcgttaaaaaatcataaaattaaaaaacccgaaaaccgttttttaggcctaactcgaaaaattttgaaaattttcgaaattttaaaatctggaaaaatcgagcttattgaactctacaataagtctgctggccaccctgcgctcaggtcaaaccctaatgagttattcggctggtactgaagtgggaaaaaaaaattaactgagtctccgtgtctgtacaggtccgggatttggtctgatcaaaaaataaaaaatactggattatagaggacacttctgcggagtgccctcacagcgggaattttttgatccgagtttcagaaaaaaagttatgggccgtcaaacgcacgaaaaaatgagaaatccgtccctgggactcagtcgtccgcgctgaatttttttctatagttttcccagatgcgcctcaaaaagttgtaagacccttccaccactttcagggcgctcccggccttcggccgggagaaaatggttttagcaacgaaactccttgtcaatataacgtatatattaactagcgggtgcgtgaaccgtcggctatttagctgggaaaaagcgcttcgcgctttgggagcttcgctacctaggctgtgaagcgattcaaattgatcgaattggttggagagatttttttgaatttttaaaaaattattatgggtttttagtcaacatcgaggctcaagacgggcgcttcgcgcccgtttttttaggctattaggccgctttcgcgggcctcagtcggggcgcttcgcgcccngtttttcanaattttgttggccttggacgggcgcttcgcgccnngtttctaaaaatttgttgggctttgacggccgcttcgcggccgttattaaattttgatcgactcagacgggcgcttcacgcccgtttctaatttttgttgttcttttcggccgcttcgcggccgttttttaaattttagaacagatacaaaagtgattttaagaggtacaacattggtcagaagaggtacaacggtgattagaagaggtacaacggtgattaaaagaggtacaaaagtaaatggaagaggtacaactttgatcagaagaggtacaacagtgattagaagaggtacaactgtgattgattagaagaggtacaactgtgattagaagaggtataactgtgattgattggaagaggtacaactgtgattagaagaggtacaacagtgattagaagaggtacaatagtgattaaaagaggaagaacagtgattagaagaggtacaaaaaatgatgagaaaaggcacaacagtgatgagaagaagtacaaaa

SEQ ID NO: 28974 - DNA, 1038 bp, Heterodera glycines
aactggggatacaactagaggggtaccgaaacggtagaaaaataatataccatcggtatataaaaagagcaaatacggtacgtacatacataagacataaccaatcgcttcgaatttaaaacgaaaattcataatgcttattttcgtgaatttttattcagccgtgttgttcaaaagcggcgaaatttgcttgttttttcaacaaaacacattgaaaatgagtcgagagccttcaaaagaggaaattgaaaacatcggaaaaataatccaacgaaatttggcgacacaacaatatttaaatggctaagcccagggatgggatccgtccttgaatggcaaggacgtccttgaaaatgagcatttggaaaagtttaaaaaaaatcaaaaaaatttgagaaatctttgtaattttcaacaatattttgattaaattatggcattatgtcatttaaaaatgtaatttttgagaatttttgagaattttatggcattaagtcactagtcactatttttcttaaaaaattagccaaaaatcgcaaattttggtaatttttggacaaaaatctgtaaacaactcgcattaaaaattaaatttttccggacccccctatcctcaaaaaattttttaaaaagcgcgccgtaaaaaaacccattttataaacaaaaaaagtcgtcgcatggcttaaaatcgcaaaaattaggcagtttttggtgaaaatctgttaacaaattgcattcaaattttcaaaatttttccccggcggcgcctaccggcaccgccggaccccccccccccctctgtcccacaaaatttttggaaaaagcgcgccacaaaaaaagcgtttttaaagcagaaaaaagtcgtcgtaaatgaagaaaatgataagtgaaaacaaaaaaatgttggaaaaaaacaattccggtgaaaaatacaagccatttgaataaatattaaccatttttcattgcatataataaaaattttaaatgtccttgaatttcatgaattttccccactatgtccttgcaaatcggcat

SEQ ID NO: 28975 - DNA, 1172 bp, Heterodera glycines
acctcttctaatcactgttgcacctcttctaatcacttttgtacctcttttatcacttttgtacctcttcatcaaatttgtacctcttctaatctctggtgtacctcttctgatcactgttgtacctcttctaatcacttttgtacctcttttaatcatttttgtacctcttttaatcaccgttgtacctcttctaatcaccgttgtacctcttctgaccaatgttgtacctcttctaatcacttttgtatctgttctaaaattaaataacggccttgaagcggccgtcaaagcccaacaaagtttaaaaacgggcgcgaagcgcccgtccaaggccaacaaaatttgaaaaacgggcgcgaagcgcccgtccaaggccaacaaaatttgaaaaacgggcgcgaagcgcccgtccaaggccagctaaaaaacgggcgctaagcgcccgtataagttcaacagatttaaaaaacgggcgcgaagcgcccgtccaaggccaacaaaaattgaaaaacgggcgcgaagcgcctaacaagctaaaaaacgggcgcgaaacgcccgtatgagttcaacaaatttaaaaaacgggcgcgaagcgcccgtcttgagcctcaatgtggactaaaaacctctaataatttttttaaaaattcaaaaaaatctctccaaccaattcgatcaatttgaatcgcttcacagtctaggtagcgaagctcccaaagcgcgaagcgcttttccccagctaaatagccgacggttcacgcacccgctagttaatatatacgttatattgacaaggagtttcgtttcaaaaaacaaaatctcccggccgaaggccgggagcgccctgaaagtggtggaagggtcttacaactttttgaggcgcatctgggaaaactatagaaaaaaattcagcgcggacgactgagtcccgagaagcgatttctcactttttcttgcagtttttcttctacgaaattttttctttggaccgggatcgcttagctcttgctggtaggattttaagtcagactatccccgacaactttgccagcaaaacctaagccctacgttgggcgcccaaggctgtagccttggctaattttttttacccaaaagtgtacacttcagtaccaggcgaataactcgccaggggttgctttgaccgaaaa

SEQ ID NO: 28976 - DNA, 1901 bp, Heterodera glycines
aaaagttacagtattcttaaaaacgtccctattttattaaatgcattattttactaccagttgtaaaatggtgcatattttcggaaagttattaaaacgcgctggcaaaaaaataataatattctttaattatttatccgttttttctgtttaattaattattattattttttatttagataatatttttgcagattttttaaattatttatcatttttaaatattattaaaaatttctacaatttcaaaaaaaaaatcttaaagtaataaataacttttcgttctcgcaatgacaaacattagaatttctttgatagttttgatttgttttttttgtgattttgttgtcttatcacatttatataatttaaattgtttttaaaaatattttttcgtaaagaaataaaattaaaactcaatgaatggacaatccaataattttaaattacttataattattaaaaacaatgtattaccagattttttaatttattaaaactatttctttctgacttcaattctttatgttcacatttgtcaataaagtcaattaaccatcaaaattaataattttttttatgaattatacatttaattttaataatttgtttctttcattaattttgacttaagtattatcatagatttattttttttaccatgctgaaaattcattttatgtagttgatttctgactctttttcataaattattaatttccatattaaataataatttaaatgaatttatttttatacatatattttcgtacacatttatttactttttattgtaaagtttctttaaaacgaacttaattacatttcaaaattttaaaacaatcaatgttagttcttgtacttttcttattcaaattctcaaattgtgaaaattggattagattaattcaaatttcatcattaattttaataaaaattattactttttcgttttaaattgaaataaattaatgaaacttttaaaaaattatatttaatttaaattttgatattagacataaaataatttattattttcgtttgaattgtttttatttttaattcgaacctgtcacttaaaaaaggtttgaataactcactaacactacaccaagtttgattcagttttttattttttttctatttgtcttccgatacatgttaataatcgaattttatttaaattacaattttggtcttaaatttaaatatatattctgtttaaattattaatttatatttaatgattttcaccaaaaattggcaatttttcagttaaattttgtaaatttaaaagaattttgggggtctgtgatgccgataagcgccgccgagaaaaattttagaattttcaaggcaaaatttcgctataaatttgaaaaatttggaattatggttagcagtgttaaaaaatgcccatttttgatgatttttttcaaaacaccatctcaaaaaaatcatcattgacctgaacaataatagtgcagttcgagaccgaaaatttccggagactcgagaccgagactgagacttgtccccgagacccgagaccgaaactgagaccaaaaaaacccgagacttttccccagtcgagactcaagaccgagagtctcaaacagcactaaacaatagatacattttatataattaaaaaatatctaatgtataaataattatattgaaaatttgttaactttttaaaatgctaatttttagcagagtatataattgcaagtcattattactcattgctgttgaagcagacgcagtttcattcttgtaattaaatttatgcttgcttaaattttttattatttttaatttgcttatttacatagtcgtaaataaatttttctttaatattttcaatcttgttgactcaaaggattttaattgagttg

SEQ ID NO: 28977 - DNA, 1685 bp, Heterodera glycines
  unsure (1)..(1685): unsure at all n locations
tttttaaaaaattccaaaaattccgaaacaaaaaacaatggtcaaattcgtgctcagcacctcaaaataccccagaaaaaattttttcaccacccttttcaaccaaaaaaaaaattccgaaaatttctagggggcctagctcgaaaatttttgaaaattttcccatcatatagtacaccattcaatagagctttaaaagctctacaatttttgtctaaggcaatttttggctaaaaccaacccctgacgagttatgggcccgggactcaaatgtcccgcttaggccaaaaaaattttctatttccgggaaaaaatcgaaaattttctaaaaacatcaccaatcgatagagctcgaaaaacgatgttttggaagtggtctccgttttccccggaaaaatcgctaaaaaatcctaaaattcaaaaactgaaaaaccgaattttaggcctagctcgaaaatttttgaaaatttttaaaatttttaaagatggatagatagagcttcgaaagctctacaaaaagtccgctggcgccccctcgctcgcatcaaacccggacgcggtattcgcctggtactgaagtgtccaaaatgagatgacctcggtctgccatttttccaggccaggcctttggtctgatcaaaaaacttttgctggcaaagttgtagagcacagttggggggtgtgccttttggggtccgctaagctctgaaagcaaaagcaaaaaatttcgtaacactgagactgtcggcaaagtcagttttcgagccgctggtactcagttggcccttggaccggaaaacctatagttttcccagatgccccgtctcgagttaccccttggtgcaaaatttcagcccggtgtgcttagccgttcccgagattttgtttttgaagatgagttgccttatcattctaacgtatatataataatatttttgaattatttctctttttttctaaattttcttcttctttcccatttttctccaaatatttcgcaaaatgacttttgctgcaatttttcttttctgatttaatttgacagttaaaaacataatttaaaataatatcgaaaataatttcattttgtcgtctcaaaatgggttttggaattttttaaaaaataaaaccgtaatatattgtttgcgacatataaatgaataaaaatgaattttttctgattaaaaaactgacaggaaatcatgactctactggtttaacgaaaaataataaatcctactcaatcgcaaataataatagttttcattaataattttatcctactgaccaaaataattgctaattcgtaaaatgatttaataaaaattttccattaattaaaattccaatcctattatgtttcaatagaaatcatagagagattntaatttaaaaaaatcatattaataattaataattaaaacttgactccacgnnatggttacgaatagggcttatatnttcangctctaaaacccgctaaaataggcaggctttaagctctaaaaaacccatacatangcattaaaaaagaaaatatgctctaaagtctctggtgaaaatgatctaatttatgcaaaaacacaaattattcgtcaaaaattcaatattaagttataaaagactctaanaaagaccaaacgaattaatataaaaaattaactaatttttagaaaaaatgagca

SEQ ID NO: 28978 - DNA, 1394 bp, Heterodera glycines
  unsure (1)..(1394): unsure at all n locations
gcaatgaagtgncnantgcgaagaatgaatgactcaccaactnntcggcatgatcacnaaattcgcgcatctctccgtttaccataagacgacgcacagaataaaggagaagagcgcagtcgtagctgaactgttcttctcgcccncanaanagtcggcattctgatcgagcaaaatcgccagagcgaccaatgcaactcacgacgcgtctctttacactcgctgaaatgaaaccattttcgaacaaagtttgaaaattcgaatttctcttttttcaaaacactcactcattctgtggtccttgtgccaattcacgcgtttctagttggccttctctgccctttttcatttgatattctcccacaaaacgaagttcgtgctggtacaccatgtcaggtgcgcccttcagattaagttcaaatgcattgatgagcacgtcaaccggcgcgatgccacgaactccatggtcgttgttgagtttctctgaaaggaaaaagcatattgtattcaaactcgaggtgtttgcttattgttagacttacgtggcaattggattccattttcatttttggctgccatgagcgatgaaattcagactaaacgaagaaagaaatgaagacaaaaccacacaataatactacgtctaggtaagcaaggaaaatgtaaagcaaaaacgaatgaaaaataaaaggtcagaggacattagaaaataatacaatgcaaatggacagaaggaaagtaacggaaacacacaaagaatggagcgggtgaaaatggaaagcgaaacgcaggaaagtcgaacattcgaattctctttaaaaagcatttaaacccaaagtcgattcacaagaaatggctctattgcactttaggcatccactcaatgaccataccctgtttcttaggccatgttgatcaggggtttgaaattggtcgaaatgttaatgtcatattcatactcatcgaccctgaaaacgcccaagaaatgttttcatgactatgaaattctacaaactgcagaactacatattaccccacattcttggtatccaacgacataaagcttgaagtttatagaaattttacataccggctaaatgcaaaatcaaaaaattcttgaagttactcgagaaagctttttccttgaattctttctactgtaagtgctaattttctgaggatggtcattgatagggacgcgacttttagtgacgaaaaatcccgaaatagttaactaaaataatgacgaaaaagtgccaaaaaagtgacaaaatagtgaaaaaaagtccgaaatagtgacgaatagcgacctaattnttagccaaaaattgagcaaaaaataatttttattcactgattgcagttgcaaatgagctacatttcctttatacatt

SEQ ID NO: 28979 - DNA, 790 bp, Heterodera glycines
tggaagacagtgagtgatcagatcgaccagacggcaggagtagccgaactcgttgtcgtaccaactgaccagcttgacaaagtgcgggttcaacgaaatgcaactgaaccaaatggggggggggggggggaagagggataaatttaatggaattattaacggcaaaactcacgcgccagcgtcgaaaatggacgagtgcgagtctccaagaaagtcctgaaaaacattattgatatatgaagcacaaggcaagggaaaggaacaaaaacatggtattatcaaaaaatgaaatgttggattgaaaacggaacacaaaacccattgtaaaatgagtccgtttgagtattgacgtaccgcaccagccaaggaaatcactcaccgtggacaccacttggtcctccgtgtacgccaaaatgcccttcagcttcccattggccgccttcttcaccgcctctttgatggcgtccaacggggccggcttctccagacgagcggtcaggtcgacgacggacacgttcggagtgggcacacggaacgccatgccggtcagattgccgttcaactccgggatgactttgcccaccgccttggcgttcccggtgctggccggaatgatgttctgcgccgcaccacgtccgtctcgccactgtttgccgctgggcccgtccaccgtcttctgagtggcggtcacctgaacaaaattgatggtttacaaagtgcatttattaatggccatggtatggttttaaatgtaaacccatcattttatataattaaatcacataccaaa

SEQ ID NO: 28980 - DNA, 1416 bp, Heterodera glycines
aagtgatccgccccctttcagcacgtgttggttgggctgtaattttagtttgagacattgtagaaccctgaaattggcaacaatcgctgaaacacatgtgatgccaggtcatatctttctacaatcattgttaaaattctatgatgaaatcatcgaccaaatcataaatttatttgatgcaatatactaaatcagtgcctaaaactactcggggagggcatagcggaaaagaaccttaatcattaaaataaaatttaatttttttaaattttaaatttaactcaatttaccattccaaaaattgtgagcgaatggaagagaagcagctgccgtgccattcaaaaggtttcccatcgaaaattggttcggcgtcacagtgtttggaagtgttaaatttgtcggttccgttgcctaaaatttggaaaaatattaaataattaatttaaataaaaattataaaaattatttcactaaattaccaaatgcgccttttgctgttggatattcgcttttgttccatcaaaagtgaaaaatttttccaatttttggctcggaatttgcttctcgcgttcgccgcgaatgtccagctatttgaaaaaaatattaaaatagacatttgttttcattaattttctttttttcacctttgtgccgtcattttgcttcatcaaaaagttctgtactcccccgtccaattttttacgtttggaattactttttggcattattttcttttgcttatttttttctgaaaaaaataatttattcaatttgaattgtgaataaaaatgtcggaataacaatttttaaaaaatggacattgtgattaaatttgagttagttttaaaaataattaaattgaaaattaagctaaaacggaggacggcgctgtcttttcgaggcgacaggaagtttctagtcgaaacagcttttatgattgtgacaaatttaacacaactgtaaccattttaacgaaaaactcatcaatgctttgttaatatatatgttggaacaaaaaaaaatagcaagtttttaaaaagttattaatcagggctcggattcgtacttggatgccgagtttacgtgcttggatttcggctttcatgcttggaaaattttaactgttcttatttccaagattgtacttggcaatcggtattttgcatacgaaagtgaaaaatgtccatttggtgaaacaagtttaagattcattaattttgctacatatttttgtatcaggtgtgtttttatactaaatctgttaacaaattgcctaaaattttcaaaatttttccggaccccgcccccctcccggttacccgagattttttgaaaaaacgcgccgcaaaaaagcgtacatacagcgaaatgaggaaaatgatcagcgtaaaaaatattggaaaatctatcctggcg

SEQ ID NO: 28981 - DNA, 2519 bp, Heterodera glycines
  unsure (1)..(2519): unsure at all n locations
aaaacccaaaaaaaagcgagagagaagagagatgaataaaaaaacaaataaacataaatcaaattgacacnnaataattacccgcgaaatgtaatcgtttnaaaattagtcaaattaatgcaattcncagcacgttccacgctccaccgagacagtgtcctcactgtcgaagaatttcgaaccttattaacttctcattatgatgaatgttaatttttttattatatatttttatctgattagatttttttttaactttactcattttattcttaaaacataactcccttataaattcgttcacatttgtattttcttttccgtatccgtttttcaatctcaatttaattcattttttgttatataagaaaattgttaggtcaacaatcagcttttttttgcttttgatatttatatttttaaaattttagttaatcaacaatgtgataaagctattgtttatttatgatatacaaatcttttgaagattgcttatatttatattgattaatttaaataattacattccattatttattaaatatatcagatatagaattatgttatttgtcgtattatacacataaacatttttctagtcatcgtcatttgctttaatatgagatttatacaaatttttaattttgctgatttataaatattaaaaaaaaaatattgaattctacattacaaattcccatnngtctcggncaaagtgacccgaaaaaatttcagaaattgcacccctaaaaaaaaattgattccctattcgtaaattttaaaaaaataattggctatttttggggcctgtttaatccctattttgaaattttcttgccttttcagggcccattcccccaatttttgttccttataatggaattcctaacaactacaacccaaaaattttaaaactttcgggggtttttttttttattcttaaacccctgaaaacaaattttaaaaggggccttcccaatttcaaaaatttaattttaaaaaatttccaaaaatttttaagaaagggtaaaccgccaatttttttccctttttgcccaaaaaaaaaaccccccttttaaaagggccctttttcaataatttttttttttaagaaaatttattttttaaaaaaaaaattcccccaattttaaaacaatttgggcgggttttaaaaaaaaaaaaccccaaattttggtttataattttttcccacaaccccgctcccccggcggaaaaagggggctcccccccccccccccccccaattttctccccaaaaaatttttggggtgtgggggggggggggcggtggggcccccccttcttttttttttttttttacccacaaacccccccctttattttatttttttttttttttttttggggcccccccctttttttttttttataaaaaaaaaaaaaaaaaaaagttggttggggagaaaaaaccccccaccccccaaaaaaaattttgtgttgggggggggggctccttctttccccccccccccccccaaaaaaaaaaaaaaaaaaaaaaaaaaaaaaatgggggggggggggggggggggggggggggggttttttcttctttttggggggggggggaaaaaaaaaagttgtttccaaaaaaaaaaaaaaaaccttttttaaaaaaaaaaaaaaaaaaaaaaaatttttttttttttttttggttaaaaaaaagggggggccccaaaaaaaaaaaaaaaaattttttttttttttttttttttctcttttttttcaaaaaaaaaggattttggggaaaaaaaaaaaaaacgctaaaaaaaacccccccccccaaaaatttttttttcttttttcccaaataaattttttttttttccaaaattaaaatccccccccttaaacaaaccctttttttaaaaaaaggatttttcccccgtttaaaagccccccctggaacctttggccacaatttccctgaaaagggatgggcaatcaattcttttgaaatgaatggaccggcatttgaataagtttaattaatttgatggggcggtggttcagggaacatcccaggcggacgtttttttgttttcaacaaaccattttttttttgcgacgtgtttcaaaatttttggtgancgaaaaaatttttgaaattngagtgacatactttaaatgagcattttacaatatgatggcttgacctgagtatgtaaagtccacgggggctgtagcgcagctgtgtgaaatacataatgctcaacaccaccgtatggccgctgaaaatgcaaatcataaatttctgtatttggatcccatggcctaattagaattttttttttttatttaaaaatgaaatcgaaaattgcaggggtttcgaaaaattttttgaggggggagatgggtaaatgaaaatgcatttaattttcatgaaatgttttgtttgcgtacctgaacatcagatcgccacacaaaatttcaggctgtccggaggtctaaaatatgtctttttttcataattttcatga

SEQ ID NO: 28982 - DNA, 1382 bp, Heterodera glycines
tcagaagatctaaacagcgtaaaatgttttgaaacaacttcccatatttccagtgtttgtttgcctgtgaacacttgctccgttgtggaaattgcattttgcagtgccgaattcgggtcgctttcgcaaaaatcctccaaagtcgcggaaagattttgtagtaaagtttccttcagcggcgccaatgcctcgcccatgtcaaagtgtgcgtcgttttgcgcaaaccccgcctttatccttgcaacgagcgaacaccgttcgtatatccatccgcttttctcgcgaaacctttgttagttcgtcatttgaaaagaatttcgttcaattgtcccaccacattcggaatccgctgggccatcccctctcgacaattcgtaatttgcgagcaaaatgctcaaaactgagcagagaattgagcaacccgtcctcggagcgaaaaagatcgccctcaactttgcattgaaattcttcctcattcagcgaagtgattttgtcatgcaaaatttgtttgatttggccaatgggaatcaggcgaacgcaagggtaagcgaagagaggggaggcggtcgaattgaccaagtcgaagtcgtcgcagtcggaggacagcacggatctttgagttgagcaacaatattcttatcatttttctcaaaattattttccgtcacatagaaagtagtcataaaagcaaacggacttgtttaatcatatattttttttgcgcgagtttgtatagttatctttaataaaagcccaccgacaaatgcctttagaatcatcggcagaaatttcgctgctgaaacggttgaccagaaattgctgatcgtcgggttgaacccttgacgaaatcagagcggcgacggggtgaatgagagggcaattgttcgagtcgagaaaagtgccatttcgaaaccacagcacagtgaagtacagattttccgcgaggaaaggtgaatccaccttaaaagcagcaaaattgcacaaatgattgctaattagaatactaatagtgccaatttatgactaatgaataatggtcgaccgaccaataagcatcctccgatgaccgcttctttcccctcagaaattgcatttccatcagacacttcttcttcgttcgaaggttcttgttcatttttgaccaattgttgctcatctttgacaacgaattggtcgtccaatttgtccaacaattgggccaattcctccctaacacagaggcaattctttcggaaattttccaacaatccttcggtggtgaaaaattgacgaaaatgagtggacgactcgttggcactgctgacacagccactgttataaaaacaattgttagttgaatataagcctgactgaaaactggaattaatcagttattcaccctg

SEQ ID NO: 28983 - DNA, 913 bp, Heterodera glycines
cccccccccatccttccttcccacaacacaaattccttcccgtgggtgtcgttctgtcgtccatcccatgtcgtgtccagtcagtccaccacactccctctgcttccctcccccccctttatccctcctatcgatcgcttcgctgagatttatttagcttattcctcttttctcttccttagcacgtcaatttgcatcagtcgattgggtgggcatagtttttggagggattaattgggaacgcaaatgaaaatgaatggcaaaacgaaagtgaatggcacttgacggcggaagggcggaaggactatcaagcatttgaatctttcccgattcttgctgttttttcaaaaatcgtcaacgggatgaaattataaaaaattcctgaactgggaacagactgaaaacccgcaaaaagatatgcgagacagcaatgcgatatccgcggaaattcgacacaaaattggaaagttatacacgacatcgcatccaaaattaaataattccaaattttaaataaaattaaataaaaattgtttttaaaattatattttgccaattaagtaccgataataatgacatgaagtttgggaatctgtttgacatttgtctattcaactcaagttatgggacagaaaatgtgcagttggtgggtccagcaggggcctttcagaattacgaacgacaaaagataaacgacaaacgccaaatctgtcgtaatatacatcgtttgtcgttatctccaatcacaattaagaaaatttgtcgtttatcgtttgtctcccaaatatttggcgtttgactaaagtattttgatcaagaattttaatttaatattaaaagcatgtttctaggtgtaaatgagttcgttgatcatgaatccgatctcagattttcatttctatacttttatcta

SEQ ID NO: 28984 - DNA, 1107 bp, Heterodera glycines
  unsure (1)..(1107): unsure at all n locations
attaatagggatgggaattttacgtaagaatcattacaaaatatgtaaataaaatatgtgtaaaaaatactaaaatatgtatgaaatatgtacaaaaactcccaaaaatgtactaaaatatgtaaataaatttttttaaaaagttattttttcgaaaaaaaaatcttcgtaaaatgtgaaataagatcaaaatggcataaaaatgtcttaagtaggcttagaatcaccttttaatattttaaaattaatttttgatatctcatttttgaaaaacaacgatttttagagatacattaaaaaaaaattgtttttaaatttttcacaagaaattttataaattttcaaaaattcttcctactttttagagcatggagaatccaggaaaaaatatgcctttgcataaaattcccatccctagtcattacaattaaaaaagaaaaagctaaatataaccgattgacaatgcatttggccatgagaggaccaaagtcaaaaagctgaccttaaaagaaaattaaattttaaataattatgcaccaatggtaattttttttttgtaccaagttcacaatttgtgccatttgaaatgtgccaaatttatcacaaaatttttgattcaaaacatcatcacaattgaaaaccacaagaatatgttaagaccagggctgccagattaaaattttcaaaagcctcatttggcatgcaaaaaaacctcattttgggtcaaaaaacctcatttttacgaaatttaagcattttgtgaaaagctgagcacgaaaaatcgaagctgattttttgcggcgctttttccaaagaacttttggggcgcaaggggggccggcggtgccgataggcgccgctggaaaaaattttgtaatttttaatgcgatttgttaacagatttgtccttaaaaatgaccaaattttgcgactttgagaaaatttttaagaaaataaaggatttttatggtttccggcggtgccgataggcggcgtcgggggaaaaattaagaatttttaccatatttttagcatattttcattaaaaaattctttattttgcagtttttctcanaaaccacaaaaagggctcaaatttctcaaaaa

SEQ ID NO: 28985 - DNA, 1909 bp, Heterodera glycines
  unsure (1)..(1909): unsure at all n locations
atccatattaccgaagaggagagtttaaccaggacatttactatgaaatccgtaattaaagaggncttcttcaattaacataaatgagtaactcgcaattgcggtgtacaaaaatgtaataaacatttgtgtaatcacatctaacccaggagtaaatgacacccgaaaaatttgaccagaaaaattatgcaatttgatgtactagtaacagatttcgttctgcagttgacatttttaaaactttcttcggtgccgtccgtttttgccggcaccgccggactcctttttttgaacatttcgttcatcaattaattgattgttgtcgctcttttcatttcagcgacaacagcggggtgttcaaaaattgtcgtcgcatttgtgacgagttggaggtgccaagccacgggagcaacgactacctgatcatgcgcgaggtgtgccacgtggtctcattacgttcagcagccattgttgccgcaggtatcagagagtcgaatttttccaaaaatttgatgaattactaggtacgttttttcaaaaatttatccaaaaatcgctgaaaatttttcttttttttttgaaaattttcataatttaaatttttcggggggggggggggaggaacgccgagggaggaggagtggaaagtgcacacttcatgtcccctatttgtttaccatttccagcaatcaccgccctcctgcgccatgtcggcaaacggaaggtgaaggtgggcgtcggcggtgcactcatccaattccatcccacataccacgagctgttggagtcgcagctgcactcgttggccccgctcaacattgaggcacaaaaattttcattttttaaaacaaattgccaattttctgaaaatttgcaccgtttacagtgggaattggtgcccgccgacgagggcagcgtcaaaggtgccgcactgattgcagcagttgcggaaaagttgaaactttgacaccatatggcgtcacgtcacgtgttggaccgagcgtgcggatgggagtgatggtgacgctaattaggaggcatttatttggctgatggctggctggcacactcactcttcgattatggcacattttggtgccaaaattttcacacgaaaatcataccttttacattttgcatttgtttgtgtctgtttttggtggtgcataaccatgcttccttcatctgctgcttctgttgtttttcaattttctgccctcctccattcttttttgttgttgtccaattttttggtccattttttatttttttaaatcaatttatatgattcctccaaattttgttttgcgcttggcgatgcactgccttttttcttctccttttgtttctctgatcagaccgttgatctgcggcatcaaattgtacacgacgaaaatggtcatttgtttggtccatttttgcgagtggcctcctccacgttgtgttgttaactcctcctcattctccgcctcctcccaccatatatttaattataattatcacaatcgtttttttttatcacactcttaacatgttttttgtggttgaccagcaaataaatttttaatctgcgtaactccttttttaacatccattttttcggtactccttaagaattgcggtaccggcgtatccttaacttttttctgagctaatcactcttacatatgagcacttcagagaattcgagcaaaaaattgaaaatattaaatgtaaatatttgtgatcaaggaactgaaaaggctcattgtcaggagcaaaagagtacaacttaattaaagctctgaaaattaatgaatttccaaattctgagctcatttgtcagaatgaccccctaattagcctttttttgtcccagaaaagtgatttatttcgccgagatcgcaattctaaagggattacggattgc

SEQ ID NO: 28986 - DNA, 1574 bp, Heterodera glycines
attgttctttctcaaccgtcagccattctttcctcacagcctaatgacgatcggctgctgctggctgagattcttttcatccgatcaatcatttttcaagcacttctttttgctttattaataatgatgatgatgacgacgacgatcactctcgtcatcacatcgaccgggcgcggttgagggggggggggtaatttggtgaccttgctcccggcggcacaccgtcgctattgccgtcatccaacgcctactaattaaccgtccggtccagtttttgtcgacaactttattttatttttttgcaattttggggccggtcggacggaactcgacaaaaccatccccacccccaccggcctcattaatttttgatcggagtttgccatgcatgagatgatcatcagcatcatagtcataagatcaccaccaccaccaccaccatcaccaccacttccaccgagtaaacacaccgtcctcattaggccgccaattagcggacgtaatgaatgatgatgcgatttgctgttgatgatgggtgaaggtcgagaagattctttgaaattactctctccgtgttgaacttggtccctataaaaagtgaacagggttcccccaaggggatataatcaaattacattggaatgctgaattaatttttaatgctcaagaatgcacattttgccgaatttggcagaaaaaatgcaaagacataaaaatatttattttttaaattaaatttttatttgaatttaaatagaggaccttttatataaacaattttaataaaaatattttacaattttatagcgtgaatttgtctactcaaaatgtcgccaaacacactttgtagcattgtttgcctgcttttggtctgcaacttcatctgggctgatgatgaacacagaagcttcgcagaggaattagtgaggtatcaatttaccatccaatttaattttttttaatttttaaataattaaataaatttacctttttaatttataatgaaatttttaataattgattgcctttaattaatagacgcctgcgacgttcccatggttactcagttggttatggaggcaattgtgcttggtaaatttttgaaaatttcttttttttttttttgcatttttttaccacaaaaataatttggaaaaatttacgactaaatttaaaatttattattaattttaaatttttaaaatcaagttcttcctccgcctacccggcgaccgcttcacacacttcatacacggcacctaaacaaaccagttactcatcttactcttgctccggttccggctgtggtcatcaagtaagcaattttgaaattctaattttaaaattttaaaaaatttaggcctaccagccaccccaaaaaaacagctaccattggtgcactgggactgccctgcacaaagcgcaggtaaaacatgatgctttaagactaaatacataatattttcatcataaattttcatatataccggtataaatttccatttaatttatattttttaattttctttaaataattcattttttaaaattttcatttattaatttgacttttt

SEQ ID NO: 28987 - DNA, 1504 bp, Heterodera glycines
gtctaattttttttacacataatgatgatgaatgccttttggttttcgaggtcgggatcccggccccgaacttgaacttaaagtcgaatttagaattctcgtttttttgttcgaatttgggttcgggattcggaatagccccaaataattgtcatattcgtgatcaacgacctcgaaaacaatcgggtacttagattcaggacttttaagccgaaaaaaaaatttaaaaaaaaatagaccaaaaaagtgcaaaaaaattttcaaaatgtaccttcttttaattattgccaaaaattcaaattttttgactctgaaatttcactttctaaacaaaaaacatcaatttcatccctttgttttacgaatttactattttttaattttaggtcggctcaacgtgcacaactttatggaccacaaggatggtaacaaaatttgattttcatatcgaattggaattgcacttcgcttcggtttaggataaggccgagagttctgaacacaaacaaagcatttttggccaggactctcaaatcagtggaaattcatcggagagaccaacagacggagaaagaagcgaagagagcgcggaaagtgagggaacagacgggggaatgacagagacgaacaaaaacaacagcaaagataggatcgggagaaagaacatatcatcgcctttttgtatatttttggtaaaaaagaacttcagaacgtacactgaaatctgtattttgatattgtgtcgtattaaaacgaattaatttttaaacaacagagatgacggatattagagaattataaaaaaaatagaatcctagaaaaaatttatcatcaaaccaagataaaaaaattcattggaaaaaggaggacagcaatggaaaataattttattttgtctgtacaatatacattttgctatacgttttgtctgaagactgttcattgagtgcaaaaatggtcaatttgtttattgggtcttctattattcgttctgctgattgtgagacgaccatcggtcacagaatgaccctttcgttgttgttgttctctccgctgctggccacggaagatcttttcgactgatcaaagcctaatagattagatttggtagattaattagggacttatggaggaggatcaacaaggataattgtaagttaaccatccccttcaactgaccggacggtggcaattcgtctttcgaggagtgaattgcccgcccgtagccctgcgttcgacttttgatttttgagttctgcacaagggacaacatctttgaaattgcttggggactctccactcctgaatttggaggagttttaaattatttgatttgagtgcagatttctcaccaaattttgggtaatttgatcatgcctcgatgcctttcgtgggaatgcactatatttgattgggtggactgtgaagaaagactggtccggcgaaagaagagggcaaccgacggcggggaaagaacattttgagttgctggtgatggaattgc

SEQ ID NO: 28988 - DNA, 1610 bp, Heterodera glycines
  unsure (1)..(1610): unsure at all n locations
cgttactttgtccgcgtccatttcattgtgcgcctttttcacngcttttgctgattcgcctatcactccaagcacatcagagttcatggacgcgttctccagcgcggtctttgngtggtggatggtgttcagcactcctgcaatgtgttccaattgctttcnatagcccttttttcgcctcagtgcctgcaacgcgacccttttatttgccgcttgcgcacgtgccgtggcaatttcctaaaaggaggaatttaacccaggggaattcaatctcgaacaattactgtttcgattttcttttccagaaattcctgcttcttttgaaacatgtcttccctctcttgcagcttctgcaatacttcttgtgtcgatggagctgcctcttgtttttttccaccaaaaattttgccgaatagactcattttttgtctttttgtcggaagaaattaaaatgctgcaatttaaatgatgaaatatcttttaaaaacaattaggtaggtaataaaaaatcaaaaacaaagctttaggcatttcaaaattatatgcagtgaatactgacaccaaagcggaatgattcacgttatcattacattggttagcagttagcctaaatgggttcagcaatttttattctttttttactttatggcgttttatattcctataaaaagaatgagaatttggagtgatcgctttttatgtttgccgcgtccgcggcgtttgaaccaataacagttgtatttttgtgatgacagctccaacttcggcagttgtgcgtgagcaacatttggcccttcggggtctgtcaatgtatattacaaaatgttaccgaaatatttttgttttaagtgatgcgactgtccaatcccaaatttcatgagaccatttgcttgggccgcgatccggccgatcctttctcaatggctatttgtgattcgattggcaaattgagtggtcaaagttctgtcgatttgccgcttgattcctacttaattgcaccacatgcgatgagatgagtttattaattaaatttatttttaaatgctttcaagttttagtgatgtttatctcggggaaatgttcactctttacatttcaatcatcaacattagctctgtcatttgcaaagaaatagccattaaggtcagcgaaactccaaagtaggaaaactcgttttgttattttacaaccaaattcagcttaggtcgacattcaaactcagaatcagcgcgtctctctcggagaactggccttcgccggaattgcccttgagccgaaccaacaaattggccaaatttttaaacatgacatccgggaactaggccaacacatgtgagttttgttttgttttttactagatcgttcataacctaaatatcttgnttttgtttttttaatttcaaaaaaaaaatcaatgaaccgttcgaaagctctgatgattcgctataaaattaaaaaagtgatattccgttcttaaccagtctanaaaataatgaattttaatcgaatgataccatacgtaagcaactanaaattattgttttgaatttgtaacgtatatatataaatgagtcattttatgataatatttatatctaaacataaatcta

SEQ ID NO: 28989 - DNA, 946 bp, Heterodera glycines
gccataactcgcttccattcccaactaaactgaacaaatctccttatctaaaaaaaagattttgaaaaggggaatctttttctaagagaaaactaagcaatttgattttttagaaaaaagttgtgggagtttcaaatctttattacgttataactcaagtcttaaactgctgatttcaccaaaaatgctaaaatttattctttttttatttattctatatgtccaaggtgatcttgtagcctataaaccaaaattgttagaatttgagagtttcatgttttttatgtgttagagacatgaaaatagtacgccaaaacgagagaaaaagaaatgcaaaattttcatcacactataacttaagcaccgagcgtaaaaaattaaaaacctagcgttaaaaatgttcaaaatatttttctctatctatatgctaaatttggtgttaattgtatgcataggaaaaaagttatatggagagaagtaaatgttgttttttacataattaaaatgaagagatagtacgccaaagtaagagaaattacaaagaaaaagagaaacgacgagttagtactaggcttttctctgcacagtggggcgtacccatagtgcaggctaatagagaatctcaagagctaccaaatgataacaaaaatttaatttggttgataatgaaaaaagttgttagcaacggcgccgaactgggcggttcccgtcgatggtaccccccctttttttgaaaaaatttttttttgttttaaaaagacatgaaagcatgtttcctaggttttcggggtcgctgatcacgaatccggcacctgactaatttcgaaccccccgacctgaattcgaataaaaatttagaaaattcaaatttttcgaatttcagatttttgatccaaaatggtttaaataattttttattgaagtattaatgagttcctgtttgatt

SEQ ID NO: 28990 - DNA, 1207 bp, Heterodera glycines
  unsure (1)..(1207): unsure at all n locations
gattgactgccaaaatgccataagctaataatgcctcccacaacaggaaataaatgaagggagacatttttcgaaaacttaaatttatatcgttttgggnatttatgnatttattatttaatttttaaggttttttttacgtttaataatatgtttaagtatgaatatgtnaatataatattgattatgtaatatagaatatgnattatgaaaaaatttgtttggnttaaatgataatattatttaggaattgngnatttagnatttatagaagtatcgagtcgagaaatgacggcttatggtctcgggattatgtcaaatatacctgggttcacaaatcagccttttagcgataaaaaattttgagtaattcaaattaaatcacataaattcaaacatcatacggaaatagcataacaattaattaaaataaaaaaaacaatatatattaaaatgcatatacattataacataatcaatatcaatacatttaattgctcttgaatgatggtgttttgccataaaacggattttcatcccatcctaattttgagtagggattttcttcaccatttccgggatgttcatgcagaaaaaaattgttatttttgtggtcatcaaccaaattcctgggcaattttgtgttcttaacacaatgcatccgcaattgcatgtccatcttcatttttaactgccaatgtcggaatttttcgcccaaatttggcaattttggcattatgccacatttttgagtagtatagtcggctgatgatgagtgtgatctgtccagtccgtccgcacggctatcattgattcgatcagaaaccacagtaattgctctaccgtaatgcatttgaccattttcgttatgtgaaaaatgggcagaaacagaaccatcattttggcttttctcgataggaacaatttcattgtttgtttcattgaattggcggcgattgaaatgatccgttgcattgccttcgttgctatgatcatttgcaacttcgacaatttctgtcccaatttgatagcttcttgggctttcgtatgaaaagtgatcattttgatcactaagcgaagactgtgataattggtcaaattctcgttgcaaataaatgctgccaagagtactttttgccttttgtttgtgcctttgcctttaaattaatataaaaaagtaaaaaagattttattcgggttttaaagt

SEQ ID NO: 28991 - DNA, 945 bp, Heterodera glycines
taagagaggatgggagctgggagagagagggggggcttcgagagatagagagacaggaaaagaaagaaagagagagagagagagagaaaacgagagagggtgggagctgggagagagaaaacaaaataaagagaggaagagagagcggaagagagagagaaaataagagaggatgggagctgggagagagaggggggggggggggagagagagagagacaggaaaagaaagaaagagagagagaaatagagaaagagaaaacgagagagggtgggagctgggagagagaaaacaaaataaagagaggaagagagagaggaagggagagagaaaataagagaggatgggagctgggagagagagagagagagagagacaggaaaataaagagaggaccagagacataaaataatagaggctggaagctgtgaactttggttctgcgttggatttttgctccccataaatgtttgagtaccccaaacggacacttgaaaaaatcgatttttttgtttcataaatatttttttcagaaagtgctctaaagcgcaccaaattttatttacaacttaattttagcactctgatgctttagtatcaaaaaggaagatggagaaaaaattttttaaaaaatttttccttatattttggttatatcgttttgcttttggtggggtgcttggaacagtggaatcatgcgcacccgtccgatctggcaagttaagcaacgattgctgactagccaaaaggttcggtgccgtgatgaaacgaaccagcactgcttaccccgcggcacccggcacggtcccccgaaggaatggatttaattaaattctctccttcggggatttttttccattaggtcgtccgttagcgttcaattgctctagtcaatttttaaaaatttttgttgaaatatttgtcgtgctctgaagggcggggggg

SEQ ID NO: 28992 - DNA, 1823 bp, Heterodera glycines
atatatatcagtttcaaaaataacttcaagagatagacaattaaaaaagttctaacaaaattcgagaatctgctttttcagctgtgaatatcgcttcaatatatttccaaaattaagaatttataaaataaattttaaattaaataacgaaaatggaaaagatattctctaataaaaaggaaaagattaattgtaatgaatgttgcttattaaggcaatattcaccgacacaaaaaatttttacacaccgaagtttatttatatatttactaaatttctaaatattaaaagaaagtgtttaaaggctattaattaaaatttcaattaatacaaaaagaattttaaaaattaaataaaagctaaatataaaatgaaaaaaacagaaacctaattgaaaaagaatgaaaaattctaaaaattaataaaaacaaattgaaaataaaagtgcccagtgagcgaatgacacgaatgacacaatagctgtagtaaagaacaagatacacgagagaatattattaaaataacattacatttaatcaaaatataaatttaaaataccaaatttaaactaataattattattattatctaatttaaaagtcagagcttagaagataaataataacaagaagctcgttttgatgggacaaattttggcaaatgtttatataaattcttaacaaaaattttgaaaatctgtttaaaagtcggaagatttactagaagcttttgaattttacttgatatttttgtacatttttgaaaagtaaaatcctattaccactgaaattaaaggtcaaagaatgtttgagagcaatataataggaaaatattaagcaacaataataatacaaaatttaattattttcccactatttaaattaaattattggcgttttgcccaaaatttattaacaaaaatgcattaatgataaaaatttaataaaaaaattcataataatttggtttatgacacgaagaaaattacatttaattaatgtaacaaaatctcgaatgacgattttcaaatttttaaacattcatatatttataacaatatttaaaagaataagaagctaaatcagaaaatgcaaaacgcactatttaataaattataaaaaatatattttaattcgaaaatacaaaaatgagaaaaaaaacaccatttaatgaagctgacacaatcaattttcctatataataaagttgagtgtgtgtatgtattagagatcggcctgtacctggatccaggcctgtatttttcctggatccaggtacaggtacaggcaaatttttggcaacctgtatttttcctgtactcatttcctcgaaattgccaacataaaaaaaattttttaaatacatttttattatgtaatttattttccaacattaaaataatgtaaagctgcataaaattaaatataaaataagctgaatgagcaacatattttatatttaatatttttactacaatttcttatgaacaaatttccccattttaaaatgaaaaaaaaattcaaagattttatgtataacggtgctttgtcatttcataaattccgtcaaggaaataataaaatgaaaacgatatcaccaagttactttaaaatatacattatatatatgttgtttcctagcagaattttaagtccaaaaatttaataatcaaaaaatccgaaaattgaaataaaaaaaagccaagccgacgacctttttttgccttcgaaaacgctttttttgtggcgaattttttaaaaattttgggggttggacaggggcgtccggcggtgccgataggcgccgccggaaattttttaaaa

SEQ ID NO: 28993 - DNA, 1077 bp, Heterodera glycines
  unsure (1)..(1077): unsure at all n locations
gttatattttgggggtttttattataaaacgccattttttttcttgaatacatttttttgaaatttaactttaaaattttaaacggacaaatcttttgaaaattttaaattcagaaacttcatgatatatcaattattaaatacttatataattaatttaataattaaatattattttcaaagttaattacctatattttaaaatgaagtcatttttaaaatgactatttttcggattttttaaaatgtttcttttttggaatttttttttaatttctaaaacaaaattttttattactttttttatatttcgtccagctaccgctcaactcataatcatcatccctttttccgttcgggaatttatgtttttgttttaatcccgacagtgcggggattaaatgtggactgaaattcgggaggcattggatataaaattggatggattttctgtgctcctacccatttttaaatttgtccaaaagctctctctccccaaataattttatgagttgaatgagtccatttatcgtattttaatccaaaaattaaaaaaaaaggatcaaatataaaaaaacttttgaatttgctttttttggcattacgttcttttattttgttttaaaattaaatgcttttgtaatttctgatcattatcatcctgaagctgctctttaattatatttggcttttctcaattattaatgccttatagtttgatctaataaatttatattttttaaaatttttcgaattacagtacccaaaattcgaaaattaatcacataaattgattttccaatatttccattcattgctgtaatcgacctaaattttaactttcctaatctgattacttcatacttattttttncaatttttatgtccattttcccaacaattttttttgaacgataaaaattncaatcacttttacacacaaaaaattcattttcccattaaaaataccgtactcaaatacaaccactaccgttcactttttcccattntttctcgataacacgacagtagatacaaaatacacaattcattcttacacactgtcctcataatgcc

SEQ ID NO: 28994 - DNA, 913 bp, Heterodera glycines
  unsure (1)..(913): unsure at all n locations
ataannttttttgaattaaccaatggaagaataacaattacttcctctgaattactaatatttactttggctttatcatttactataattcatttaatttaatgagagaaaatgagaaaatttcaatggtaattgaggtggaggtgccgcgaatgaaatcacttttccattgctggggattaggggaagaaaggaagtgggggagtgaattagcgaacaatcgccaggggggacggtgggcgaagaatgaaattaaatgccgtttagggtggcattatgtgggattatgccgagaatgggcggataaaacgagtgacatcagcggaacagtgaacgatcacaattaaacaaacgcccacagatgaagaaaagttaattttagtagaaatggaaaagtaattaaaaaataaaaattaaaaaaacgatggaaaaaaagggggcggaaattggaaacatttatatgtatgtacaataatgtgtttatagggatgggctaaataatgaagacgaagacgaggaaagagtgaaacgaatgcattgggaaaaggcaaaagagaggggcaaaaggggggaattcagtggagagacagacagtcacaacagcnaatgccanattatganaggaaagggcaagcgcaaacagacaaatgccaatcgcatgngcatttcggcagaatgatcggctgatttgtggagaagtacaaagggagaagcttttaaagaagcggagggggagggcaaaatgtgtgggaagagaaggggcgggcggaaagaaagttgatccgtttttgtgacaaaacaatcgcagaaagcggcggtgatcggaggaggaaaggncgtccgggcgggcggaaggatgacatgcgaaggttgggtagtgggggggtttttgggcccctcccccccccccccc

SEQ ID NO: 28995 - DNA, 1120 bp, Heterodera glycines
  unsure (1)..(1120): unsure at all n locations
ataatnagtgcgaaaaatgaaaaatttcagaattttagccccccataaaaatccatatgaaaaactttttttttaaaattactaaattgaagcgaaaaatcggtaaaatcggcgccaaaaaggcaaccgattcactcttaaccagggctcggatctgttctgataaaacaaaaatgttcttattttggggtagcgaccaaattttgttctgatttcttaaaattccttaaaaattggtaattttatggcgtaatgtcactcagatttccaaaaaatttttcatggctgtgcctagcggcaccgccggaccctaaaaatcctttggtttcttataaattggctcaaaatcacaaaatttggacaatttttggacaaaatctgtttgttaacaaaatatactcaaattttcaaaatttttcccggcggagcctgtcggcaccgccgaccttccgtcccgcttgttcccaaaaggtctttgaaaaaatgcgccgcaaaaaaaattcgtaaaaatctgattttttgagccgttgtatttattgaatattaaccatttttcattgcatataataaaaattttaaatatccttggatttcattaattttccccattatgttcttgaaaatcggcatactcgtaattggaagccgcccttggacgatacgggccctggattaaattgttacacaagcaattttaagctattttgcaaaatgttctgatttttgaccccaaaatctgatttttcgggctcgatgttctgactttgaaaattttttgatccgagccctgctcttaacacactaaaaaacagaagcccttgttttatagtctaatttgaattaattccgtccttcaaaataaggactctaaaaagtgcagaaaatcgaatttctgttcaaagaaaaacaaaaaaaaagtgcctaaatttcatttaaattaaaaaaacagtcaatcgggacagactcatgacaaaggtattattatagagaccgactttttaggcacacgcctttttttcttcgcactagttccgatgagtattaagcatttgacagaactgctagataccaaccaaccccctttcgacaaaataaatataatgaaactttttgatcaatg

SEQ ID NO: 28996 - DNA, 1540 bp, Heterodera glycines
  unsure (1)..(1540): unsure at all n locations
cccccccccnccccccgctatttcccaccagcagatcagccctccccccccgaaaatctgtttttaaaggcttgaaaattttgaaaaactaaataattcatgaaaattgtattttttgaaaaaactagaaaaaattaaaaaaaaaattcttgaaatttcttataaaaaaagttttatgtttttcttgaaaattttctaagttaaaaaaaaacccttttataaattgaagaaaagacctctagtcaaaaactttagaaccaagaacgcttaatatttgcctaagaaactaataattaattatagtaccaatttaatttaatgtgttaattgctacactcactctgttgttccttttgaatgacgcttgatttggccactaacgtctgcacattcgtggacaatgaatcaattctttcctgcgaaaggttcgaatttctgttttttaaaggaaaatagagccaaactcgagaactttgaatgatccctaatttacttttttgattccttctgaggaaagttatgagacttaagcacggcatttggaaaaaatgttcttgaaaaaaattcaggtcgagtaaaaacacaggttgtaatgaaatgaaaatggccaattactaaaaggcttttgcaacggtttataaacgtcccatcgcgctaaaaaaaagtgggacggtatgggattgtacacatatgcaaagaatccataaactgaaatgcaaattctcgaagtttcattttgccccgatttgagtgtcattttgtttacctgaaaattgtccatcagtgagcaaactgagccggtcaatgtggcacttttttccaaaatgccctggaaactggaaagccattcttcgtcctgaacatgtttgttcatttatttttttaatttatgcattttcttcactttgcttaacagttgattcaactcttcaacagatgcaccaccaccaccaccaatttttgcagctgatgacgtcattcccttaaatttttaaaaaacaatttcgtaatttttgttcgagtccaagccgaatcggatcgaatttgaggatttttaaatattttgtgataaactaatatttttccaaaaatacttttttattggtttcaaaagcccttcaaaaattaatgggaaattaattttcgataatcttaaaatttcaaataagcccctaagccaaacactcgaaaatctaagcattttttaggtgttactcaaattgagaattaatatttaaattaagtgtaaataatattttaaattccattattattccacacctttttgttgggtcgtcgatcgatgtttgtgtgtgcttattgctttttgtataatgcactttaaaatggaatttcaatcaataaagggtcagtggcaaaaaataaaaaatattttattggccatttaaacaattccaaattgaaaaatgtccatttttataaatcaatatttattatatttgacagcattagacaaatagaattataatttaatactagaatttcttttaaatttatttttttggaaaaaattgactct

SEQ ID NO: 28997 - DNA, 1145 bp, Heterodera glycines
aaaaaattatctcaacaatcagtcgtgaaacagttcaataattcggaagcagtgccatattgggaaaagatgcacaagtagagtaggctcgaaataaaggcaactgccgaagattaacaaaaattcaaatttacgggccccgttctgctttgacaggccatatctcgccagggagtggcggtagaccctttgttgatacatttgaaaatgtagagcgcgtctagctcattcgaataacatcaaactggtttgtttttgtcacgaaacaacccgctgatggccacgtcgaagaaaagtcccaaaatttgacatccataaaactccattttttcataggccagcgtgtttaaagcaaacccgaaactgataggaaatttaaattgatcataatagaagtttaatttttatttgtcccatgcattttctgggaaatcttttcgcgaaaagttgaaaaatttcaaaacggcagacaacagatgcatttcaaacaattcaacaatataatataaaatttaggcaaaaatttttgttccttcctctttggaaatggtcttaaattttgcttgtaaatattcagataacaagttttttttactgaaaattttttacacactacaggatgaaacgcaataaataatgtttgtagacaaaagaaattggcgaaaaaaattgcctcaacaatcagtggtgaaactgaaagaaaaaaacttccccaaaaaatcggagcttttccgacggcatcagctgcatttccaacagttcaacagtataaataaatattaggcaaatgaaaaatttttttccttcctctttagaaactgtctaaaaatttttgttgttaatattcagaaaacgtgttttttttactgacaatttttttcaagagaaggatatgaacaatcacttataaggctcatgcttggagataaaggaatcggaaaaaaaaattatctcaacaatcagtcgtgaaacagttcaataattcggaagcagtgccatattgggaaaagatgcacaagtagagtaggctcgaaataaaggcaactgccgaagattaacaaaaattcaaatttattggccccgttctgctttgacaggccatatctcgccagggagtggcggtagaccctttgttgatacatttg

SEQ ID NO: 28998 - DNA, 1130 bp, Heterodera glycines
ttccgccgttattaggtgttattatatcactattgtaatttatgcggtgttgatattagttttttaatgtaattattgtaatttttgtgttgaaacagcaaaactgtccggtgccgatcggcctaggccgagggtacgcgagcagtggcgctgttccaatgttgttaattctaatttttgctctattgttaccatattttgtccattttatgtgctataataatctaataatatgtatggctttatgaatccaataagaattaaattaatggacatacgcgagagggggtgggtgggagaaggacttaaacgcagcggttagtaccggaatcgcaaataagtaagggaagaagtctttgtgtgccacctgcaaataaacctaaggtttcttaattatatctacaacaatttttttttgctactccattgttttgctaggcttatatccaccatgcgtttttaaatgggatgcattgtttttgttgtcaaagtcccaaaaatccatgaaaattgttgttgttaatatcaaagtggcaaagttcgagttaaaattaaaaatcaatgaagggtagggacagatggggattttaattgtatttttgaggccggggttgaatactataaaaataaaattattttttaaattatatagaaaatttctaggctggttttaaggttcgctgattacggatctgacatccatttagaccaaatgctaatcccgacccgtattcaaacaaaaacttgaaaattctaaattttaaaaaatcattttatggtgcgaaaatagctcgaatacggattcggggttcgaattggatgttagattcgtaatcagcgacccctaaaacccactagaaacttttttatatgatttaaaaaataatttattttttatggtctgtaaaatgcataggtaccaaaattcaagtttccaaaccaccggcccggaatttaaattttcgttttttgtcagataattggcagcttaaccaaagtgcataaaagtaccattttaaatgaagagatagaaaaattttgactagcatttgtgcaagttttagtcaatcaaacataaagccttaattatgaagagaatattgaaaaataaccacagctttttttaagaa

SEQ ID NO: 28999 - DNA, 832 bp, Heterodera glycines
caaccaacacctatcatcgacctgtcgtctcaacaacgccccctcgccccgaaatggaagagcattgggaaagtggaggagctagaggaggggggggggggggggaggtggaacagaggggagagggaaacagtgatgatgaccaacacaaaatatgcgatggttgaaggcaaacactggacgaggagggaagagatggaatggaatggttttataaggggggaggggcaggacagtgtttaatgtggacatcggaggaggtggatcatcaccaatccgatcagatcagcagcattggtctgacaatgagatggaatggaaatgttcggaaggggggggggggggaattggacgcttttggcgagagatccaatcgaaaaggtgggaataatgtgaagaaccaaccgcacacaataactaatgatgatgaatggatgaattgattctggaaagagttctcccttctcccccctttcattttcattctcgcctagatgctccgccgatgggaaaaaaggggactctaaatgcgtaaatatcatgactgaccattttaatgcattatttcatcaattcatccatcattcaatgcttacattgacacaaatagaaacgcctcaaaaaacataaaccattttgattgatttgatgagaaatgtgaaatagacagaaggacgatgaccatggaagtcggaatccgctaaggagtgtgtaacaactcacctgccgaatcaactagccctgaaaatggatggcgctggagcgggccacctatactccaccgtcatttggcttgtacacgtgcttgtcgcgtagtctggccatgacgtgt

SEQ ID NO: 29000 - DNA, 966 bp, Heterodera glycines
  unsure (1)..(966): unsure at all n locations
ccccccccggctagaccattcattcgcccattgttcaccttcttaggcctctaagaatgggaggncnattgacccatcccctcgagaattgtgcaacgaaagtgacggtcaattggagggagagagagagagagagagagatgctcttggcaatgaatgggaagacaaataaacggtggcaaaaaacaattggcaaattgtggagaagggcaattcgaaatcaaaagcaatgccaaactgacagaaatatttaaatgcgaaatttatgaccaaattttgcgtctttgagctagtgaaggatttcgaatggatatttaattaaaaattggtctaattatcataaatatgacattttaactttgtgagcccaatccattcattccctttcttcgccatttgttctttctcatcggctgactgttctgtttttatttggcaattccctaattattgttgctctgttagccgttaattgcacttttattccatccccctcccttcccccaaggcattctttgattgcctttgccccattttcggcaatttcttcgcgcaaagtcacaaaagtgctgagcgaagtatccctttgcccttatcggatcttttgtagaaaagccgcctaattgacaagcaaaaggaagcgacaccgaaagacggggggaggaaaaaggggaagggggggggggaagacccccggggggaaaatggagggacggcattggcaaagggacggagtaaacaaattattcttttttttggggggaagagaatacgagacaagtgaacactattcacttcatggatttgctcttccttccgcattttanaatactttttttttgtcaattttaaattttgtcgtttttccctccgtcggcggactgagagaaaacgaattaatttattcattcgccaccaacggaaggaagtcgaatgaaatgggaggtcatcgcgcggaatttgcat

SEQ ID NO: 29001 - DNA, 1190 bp, Heterodera glycines
  unsure (1)..(1190): unsure at all n locations
tttactcatttttgtaaagacatgaaatttcctttttcgttacgcgatttacttcctaaattacaatcgctaattattgcgacgaattaattcgtttatattttaaggcaatgctcataattaccagtttcaaaatcactatcatgttttagctcaatattttattttactttagataattacatatataaagtttatatatatatattttctattatgtaattagcgggggccgggtggaaagttagagagagaaaaacgtagtcgcgagagagtctacgaaaataagagaacagacgcttagagaaaggcgagggatttgctgctcccagtgttaatggaaaagttcgttatttgaaccaatgcttttttaattataagaatttcataaaaacccattaactattccttttttaattataagaatttcataaaaacccattaactattccttttttaattatcaaaaaaaatccttttttggtaaaagtaatcattcaaaattttttcacctgcgtgataatttgctttaattttggtttttatgccgtgattaccattttatcctattgttttgggattacgtcaattaatttaatatttattaaaatatatccattaaaaggtatttaatcctacgaaaaagaaactaaatgcaacccaactcccattatagaaccatttttcaattttcattatatcattaaaagcacacaaactgttgacgtgctaacattttttattctcaaataaaaagcaatttgtgtccctaattagttttagatttcatataaaaaaaatttatctttgcagcaaaaaaaaattgtaaaaatttcatttttacccttaaatactttatttaatttacggcgatagaacataaagctaatggacttctttgaaaccaatgcaacaactcaggtaattaagccaaatttaatgttttaattaaacaattttttcaaggcattcaataagtccattttcacaatttcatcaccaacaatggaggaagtcaaaaattcagtgtttctcaaaatgattttcataattaatttgttcatcaatctgattggtggcataatgcacttcaccgttgtgtacatcagcattaaaaatcggtgaaaataatataaaatttacaaaaaaccatttttttaacctattcttgctttgaattanaaatttct

SEQ ID NO: 29002 - DNA, 1074 bp, Heterodera glycines
cacacaccgtccgaaaaaacgagatgtgtaccaataaatagagagtgccagagaaaaacattatctttttttctctaattttttgtctccttttggcgtactatctaatagtttcattattaggaaaaacaacatttacttcgctacgtttcattatttttctctacgttaaatcaacaccaaattttgcatatcgatagagaaaaaaattttgcatcgatttctatgtttattatcatcgcttaaatgttgtcttaaaaagttataagataaaaaagttaaattattattctttttaaagatttaatggctaaaagaactttattacggaagcgacagaccaaaaatgcacgtcatacgcgtgagaacaagcgggaggagaaaagctcagacggccaaggcgatgaaagcccggtgggctaagaaaagtgagttttttcaccaaattttatttaaaaaaatatctttttaatttcagcctctccagagccgaatcccaatgccgaaatgccaccgcaagacgaagcagggccgtcgtcgacatctgctgtaccggccgaagaactgatggagccgccgccaccagctccagcaccagtgccaacgccggagatggacgaggaaattttggaatttggcttttcgttgccatcgacatctgtcacggcattgaaatttaggttgtccacggcaaaggacaacctgatccctgcccgtgacctgccactgaagatcagtggcgattgctgcttcaccactttgttccatttgcgcgccaacaccgatttttggggcttttggatgagcagggtgggaccatatcattttttgggttcaattttaaatgttgtgatttttcaggagatgaggcattgcattccgtgtggcggcgacttgagcaactttggaagacgatgccggacgctgaacaaatgcgccaacagctggagcatcatttcgtctcaaattggttgatggacaccggcagactcgacgaattgaagctggtgagttgatggaaggggctttaaaataattatccaactaattaagaggtaggaggaacgacgggag

SEQ ID NO: 29003 - DNA, 2214 bp, Heterodera glycines
acatttttttgtattgatacaatacagtacctgggtctttcctaatttcaccgatggtccaaaaggcgtttattgaggtgttcggttgggcgatccagttttgcgaaacttcgatataagtgggctggaaattgcattcgaattaatgacactttgtttttaaaaaaacctccaatggagtgggcggaatgacaccggtgcaaatgctgagaaagcatccaacgttcacggaattgggaaaattctgaaaaaacgaaaaaaaaatttttaaaaaaatattttgctgttgttattggtgttttaccttgtacttgttgaagctgttccaaaattggatttcctggagcagttccaatgacgggttgttcgcaataatgcctgacaaaaataaggttatggacagaaaaaacacatattataatgggatggaatttcattaaaatcaagcaaaaatcaaaaaacagaaattcatcatttaaatttcgaaaaaccgcatttttcttgccaccaaatgcattttgattgcccaccgattaatacaacaacaacaacaaccaaagcaccactgctcacccacctccatcaatgtatttgttgtccacactggcaaaataggtaggggctgaaaattttttttgtaaatttaaaaaaaaattttttttattacccgccgatgaacgcctcaacactttccaaagcaacaaatcgtcgggcgtccggtagccgagctcctcattctcctcgtcatttgtcggcagtttgtaattgcgcatcagttccagctgaaccgggaagaactcggcccgcgtggtggtgaacataagtctggaatttttttttaaatgaggaaataatttcaattttcaaattttatcttcccatataaatatttttcagcaacgtccccgaaattaaaaaaaggaaagatattttcaagaaattttacaaaaaatttttttgctttcaacgacacatttttcaaaaaaaaaatcaagaatttttttccgagatttttttcggcgatgttatgtccctgacacattttgggaacaccgaagcaaccttggccacttgaggtcgctgaacattgtctcggcccccatctcctggcaaatgaacttctcgagcacccgcgtgttgtgcggccttcggtagtcgaacaccatgtctttgaagcgcaagtacagctgcaaaagcatgcacacaaaaattagtaaaataaaatcgaaattttttaaaaatttgttttaaaaattcccaaaatttgttttttttaaatgcaaaaaaaatttctaaaattaccgcaggaaaaattctgtttgtggttaatccgtcccacccaagcagaaaaaatctggaaatgtattgtcgctgtttagggacctcagttttagtcatttttaacataattttggcaagtttttatttttttaataattttccttgcgttgttatactttttaaaaattgcaaaaaaaaaaaatttcggtatgatggatggaatcaacggatatacttctctgcttggataaataaatattgattcaaaaagttcacccgctgaatttggtgcagtgtttggcccattgcgagcccggccgtgaccatggcaccggtggaagtgccgccaacccaatcaaaataggggaaaatcggctcgcccatgatgcgctcaacacagatcagaagctgaaatggaaatacgggaaatgaaaattcgattcgaacgagcttgtgagatagtcaggaccaaaaaaaaaaaatttggcacccaaatatttttttttcagaatccttgtaaattcaaaaaaaattccagcatattacactatcccatggtacaccaaactcattgaagtccccaggactagtttgtgggtgtaccacaacgtgagcatctcgtcccccccccctcccctacccaaaaattaaaacttttgcaaattttaaaaaatcatagaattcatcaaaaaaattttaattcgctagaaatactttttttaatttttcggggggtttgatttaggcctttgaatggcctcgcgaatcggatcggcattgtttacacccactcactcacctgaatgatgaccagcccacggatgccaccgccatccaacgaaaggacattgatgaaattgtggtcgggcggactgtcttcgtctgaggacacttcgggcaacttttccaacacctcgtcatatatgtccttaa

SEQ ID NO: 29004 - DNA, 925 bp, Heterodera glycines
tttttattgataaataaaattaattgagcagtcagaaaaatattcaaatttacgcaaaaaaacaccataacaattctctttctctacttcctctatgttttaaaactagagcacaattatttttggataaatggtaaacaccagggatggactttcgctttcggcactttcgctttcgcattttggcgcgaaacgcaaactttacacccctaagaatgagggataaattcccctaaaactttcaaaatgtgaccctagttggctaattttcagtgcaaacctttttaaaaatagtcaaaattaccaatttttcccccggcggcgcctatcgataacgggaccccaaaaaactcttatttttcttagaaaaatggccacataatcgcaaaattttgtacttttttgatgaaagtctgttaacaaattgcactcaaattttcaaaaaattttcccaggcgcgtggcttaattttcccctgcctaccggagattttgacggagaaaagtgagaggtttaaaacggtcatccttaagtgctttagagattcacatatgtaaatgaacaaaaacccggcatttctggcataggaatcggttcaaaaaattcgttcggtggcttgggaagtgcttctcgatttcctccaacagatttcccccgtcgatacattgcactgttgcgaaaaaggcttaaagaaatggatcatttattgacagtgtttgaaattagattttctcggtcatttaaataaagcgattttaatgagaaatgtaccattttattctcttatattagcccaattatgacgaattgattaagggtttcactatgaactcacaaagatatgagccccgttaagggggaaaattttactaaacctactttaatttcatgggcccgtaccccgcctaaaatattttcaaacaaa

SEQ ID NO: 29005 - DNA, 1547 bp, Heterodera glycines
ttgcgcgagtttcggcattttgtccacaataagcgaagtttcggcgattgttggtgtcgcccattttctcttcaaaaatttccctcgcaaattctgtcctttttgggttattcctaaatttaataaaagtttttcttatttattgtgccatttctaagttttgttttggcttccacttctccggcggtcactgtgccgacaatgattcaatttcaacgcaaaagaatcggcactcaaaagggcattccgacattggcattggcaaggcattcaaaaagcttttccgggctttttcaatttttcaaaattcagtgcttctgtcgacaatatattttccatttcggccttttcaattgcgttttctgtcttttctgctccttccggtgagtcattcgtcggtctctttttcctttaattaattagttaattaggccaatctcttctcactctgtccctcttcgccttcctccagactgggggatggaagggagaagggcttttgcttttgttggtgcgatgcttctgctgaacatttgtgacgtcgtttaaagggcgacgaacttatcgaaaggggacggaggagctgatggatggcataagcaaaggagaaaaagcctaacaaaaaaaggagtggagaagccgagcaaaagataactggaaaagaggaggggaagagaaacgagagggggagagggcaattaagagcattgagaaaaggggaggggaaaagaaacgagagagagtgagggagagagagagagagagagatgggggagggggggcaatgaaaagcattgatcggctgcggaaagagtttgatcagaggaaggcaaagcgaaacgggaatgaattggagaaaataacacaaatggaggggaaactgagggcaacgaccacacaaaaacataaggaaaaaaacaattgcaaaagtgaaagattgaaaaagggggaccaattggaaaagtgaattttataatttaaattggaaaaagcaatttgaaattttaaattggaaaagtgtcggttaaaaaaacaaaaaggaggagagaattctcaaattgaacacgaaatataatgaatttaatgattgatttgcgaatcacttgttcaattcggctgcattttgactaacggcgcaaaattttacacaatttttgagttcattcgccccccgggggtaaacacagaacagataaagattgaagggaaagtcggaaataataaaacacacgagggaaaaggaaataacggagggagagaatgagcaattaattcaactaattagagggaattaattcaactaattagagggaattaattcaactaattagagggaattaattcaactattagggggggggggggggcttcgctcgaaagggaacagcgagggaattttttgggaaattttggctatgctttctaactgaggatatttaaattacagcaaataaattttaattattattaaaataattttctttttgcccacctcgccacttccaacgcaactggcaaatcgccctcgggactcattttcagcgcct

SEQ ID NO: 29006 - DNA, 1463 bp, Heterodera glycines
  unsure (1)..(1463): unsure at all n locations
gatgtcaccccattgtttgatgatcgactcggaggacttgggaggacacgcaaatttcagggtaaaaacgggaatgctatggagcactctttattaccctaacgtagcaggtcgtccccctcgttccccccccccccacccccgaaatgttttttttcatttttaagagaaattttaaaaaatcttagattttgatctgacaaagcgcactctttgggccggcaatttgtctttgcccgggacgcgtcttctccaaatcacttccgaacgtgtccaaatgctctccggtgatggcactttcacctccaaatggtgccctgatcctccatgtcgcatttcgttagcttctgtcaaccaggcgggtgcccaacttctgctttcgtccggccctcgcctcttttatttgcgcgtcgattcggaccaaattatgctgctccaccgcctggaatgtgctgatgaggtcgcctgtctcgacatttccccactcggtgtgctgttcagcggtgtttgcacccttttcatcgtgtttggctgtntaagatggccaaactctgtccgacttcttctccattggcttttggtctgagcattcggtcgctgtctacgcacttaaacctggcactgtgccagcattggtcgcggaggagcgtttgtccagtgaatttgtgccccgttccatgcttatggcacgcgtccctccttgcttttcttccatttctcatttgtcccctttcattcaggtgaccatggagggctctcactttcttttcgtcgctttgggcgatggcacagtgattcatttccgcgtcgattcgctcaccggcgctttgtcggcgcaaaagaaatttacactgggcactcagcccacttcgctgtgtcttttccaatcgcccaaaaagaatgcgcttaatgttttcgcctgttccgatcggccgactgtcatttattcgtccaaccacaaattgtccttttccaatgtcaatttgcgatcggtgacgcaaatctgtccattgaactcggaattctatcgtgattgccttgcgctgtcggacggcgaaaatttggtcatcggaacaattgacgacattcaaaagctgcacattcgaacggttccattgggcgaaagtgagtttatttcgggtggaatcgaatgcaaatgttggatttccaaaattattattttatttgtaatgtgtgataacggaaatttagcataatttgttcaaaaagtaagattcaaattttcataaaattgcaatgtaatattcaatcttatggtccaaccctttttcaattgttatttttataatttcactcgttaccaagctgttcatcgacttgcttaccaacccgagagcaatttggtcgcaattttgaccactcgttgtgatgactttttcactgccaatcgcctcagcagtacgaccgtccatttccgtcgactgggccaaatcgtacggcag

SEQ ID NO: 29007 - DNA, 910 bp, Heterodera glycines
gattctctttggtctttcttcattcgtggaagatcttttttaatgaaattcaattatttttattaattatttccgaaaacttacgtttcccttgagttattggagcagaatgagaaaaagcggcaactaacgacaggattatgaagatgtcagttgaaatgagttgcatttttggaattatgaattacgaaatattaaaatatggtttttgattatttttacacctaaaaagtcttattttataaatataaaaaattaagaaaattcttttttggaagaaataatattcgaaatccaaaatatatttaattttatatttttaaatttataattttctttaaatcagttcagcatcattatttaaaatattaaatacaaattaataaataaatttagaattttttaaaaatttcaaaccaagctcctaacccagaattccaacttacgatatgcttagggactaattccatcactggtaaactggggagtgagtttctaatggagaagcgaaaaatcccaatcattaaattctaaatttaattttcaataaaattaacaaagatagctgaaacagaagtaaatccctgttttttactaaaaatttttcgcgcatttttattaaggattttagataacattcacaactttttaaattcaattaactataatttttaatcaatattttacagaacattggaataaaaatatttgttagaaacatttttttaaattaatgagaaaattaattttctaacttgaagcaagcctgaacaacccgtataaaataatgaatacaattttgtttcattttaagggtttttgtcaaattgagtaaaagtaaattatttaaaatgaaaaatatagcaaatcacactgcctatttaaagggagttattaaaattggattgaa

SEQ ID NO: 29008 - DNA, 618 bp, Heterodera glycines
aaaaaaaaaaaataccaagaatttcaaaaatcgaatctcattccaacaaataaaaggaaagaaagtggttttttttctatttttaaatgtttctaattaacaaatattttaaccttgccaattttgggcatcaattggcgcgagagcaactctttcggtgacatggacatggcagcccaagcctgaaaagaagagtaatgatttagaagaaaacggatttgatggacttggatatattttctggacaaaaccctgataaaattcaggtttgtcaaggccgggcaggtcaaactcaaaatttgagactaaaatgcagatttttgggcaatatctgttcatttaaggacgtagacttttttcgaggtcccgtttataatgccggattcgtgctcagcaccataaaatagccctagaaaaatttttccaggcttttcaaataaaaaaaaacgggaccagtaaactagacctttgccataaaaacaatttgcaattctatttttggaattaaaaaaactgaccggctcgaccagccgttcaaccaccgcttcgcgcagcagcacactcatcggcacgttcagtgccaacacaaaaatcaccgcttcatgcctttgccggcgc

SEQ ID NO: 29009 - DNA, 835 bp, Heterodera glycines
ttctgccatcatccattttttttcctctttttcgaactttcggacgattgagggacggggcacgggatttgggtgtctcaggatcccatttttaaatgctgtctttttacaccattttgcggcacgctttttcaaaagttagtggaatatgcctgaggggggggggggttcagtatgtgctgttccttttgccttaggcaattctttcccaaataacaaattgcactgacccaccaaaaatgctctgaggttgtgttgttgacccaaaccattccctgttttgaatacgtaaatattttgttaatgcttttccttaaataaatatttctctctcttcaaatggtaatttgaatggcttaaataaagccttaaacccggggacacaacagcaatgctgattggtgggacaagcaatggttgcaacagcaacgggctacagatggatgggccggcgatggtgtggcacaaaatccgggccgtggtgaggaagggtaagcagggccaagaacgccaagccaattctcgattttaatcagcaattcaccaaaatcgcctgtgcggattgatcggaagaaggggcaaatggtgggcagagcccacggattagcaattgaatatttatgtgaaaagtgggtccaattgggataatccgccgccaaaaaatgtgtaatttatttatttttttaatttttgtcggagacagggtggggtcagctgccaattttgcgaggggtttcaacgccgcatttaacgcttttttttgctttcaaaacgcttttttaaagcatgctttttccaaaaaaaatatcaatgtaaaaatttcttggattccgag

SEQ ID NO: 29010 - DNA, 1848 bp, Heterodera glycines
  unsure (1)..(1848): unsure at all n locations
gtcggtgttggtaatgatcatgttctactaatcccttccttgaggtcggtttatatgagaggcgtgatcggtgactttcgatttggtaccgaaaaccgatcgaaagaattttaaaatcaaaaatttttgatagaaatacccaaccccaaaattcccaagaatttaaatataacattttgtggctataaaatgatcaacaaaatgccaaaattacggtttttagcgctgccttcaaatgaaaaagcagcaaaggatttcgttgtgccgtttgcgcaaaactttggaagaaattgtggagaaaattgaaaatgctaaataaaaaaagaacggataatgagattggatttggtcattttttgcgctaatttagtgctttatgtttagaatttagcaacagtttttgttgttcggtcagctatgttttgtattttacagtgtgaagataaataaactgaattgagttgaaatttttaccaaatatataataatcaaagatgtaataagctattatgccgaaaaatttacattagtttgaaattcgagtttcgaaaaaaattctgggaccaaaaaaattgaaaaaattatactctattccaaatttcggactttttgtgtcgcaatttcggtttcccgggtttttttttacccataaaatacaaaaggctaacaaaagaaatattaattttcaaaataagcataaatttttattatttttacggttttctaagatttttatttattttatttttttgcacagttttctggagaaaattaaaataaatttttgatttatttgtttctgatttttacaacatttgacgaagggtcacgacaaataatggcaaacgatgtttattttccattgtcaacattatttcatcaggaaaatttggtcaattatacaaaaattgactctttcctgcgcaaaatttgcgcataggttttttttcgtaaatttctataaatgaaaagaaaaactatatttccttttaaaaaattttctaaaattgaaggatttaatgtcaattttagagcaaaaatacttaagctttttgtttaaattaatttttctatagcatttaatagcccataattaaaaaataataattccttaatttggcgcacaatgatttaattctttgcccatttttatacctgtgtttatatttcgatttttcattttaattccattttaattttcgatgtaatttctgcaaaatcttttttgattttgttcaaaaaaaaaatctgccgaattgtccagaaaccattttttacaacaataaatgtgtcgagtggaaaagaacaagttttggcggggaaggttcatgtgaaaatgaacacaaagaacacttgactttttatgaattttttaccaaactcattcattcacaaaaatcgttctttgaaaaccattttgcatttatatatttgatggacaacgaattgaaaagggattaacatttattaaaaatctttaatatttttggtcaatttttatatattttttattttctaaggaaaataaaaaaattttaataataataaatttaaaaatcgatttaggtgaattgacaggattcaaatttaaattaaattaaaatatatatatactttttctcattttaagttttttaaggaaaagaaaattattgattcttagtaaaaataattttaaataaaaactgattttaaccattttgaaagcatttatttgaaggtaaggaatttcaacggattanaatttaaattaaattaattnttttttataaatttttaattattttattttgtaaggaaataanattagcccttctaataacataaatttaaaaaaaagtgatttta

SEQ ID NO: 29011 - DNA, 1087 bp, Heterodera glycines
tctctctctttctctctccactctttctctctctccctctctctccctctttctctctgcctctttctttctctccttttgctctatctctctctctggtttctctctctctctcttctctctcgctgttcactcaccctctccctctctttctctctccctgtttctttctctccctttgctctatctctctctctttccctctttctcccttcgctctctctctctatttctctctccctctctgctttctctctctctttctctctcccactctttctctctctccctctttctttctctccttttgctctatctctctctctctggtttctctctccttctctctttctctctctctctttctctgctctctctctcgctttgctctatctctctctttccctctttctcccttcactctctctctctctttctcactcccactctttctctctcactctctctcttctcttgttctctctcctcttttctctctgtctcttttcgctctctcacttttttctcctcctttctcatttctacctctctaatgttctctttcatcttttttctctctctttctctctccctttgctttttctctcccttcgccctctctctctctctctttttctcttatttcattctctctcttcgctttttctgccctctctcttctctctctcacgtcctctcacctctctctttctcacgactctaatttttctcactttcttttttactctctctctctctgctctctatctctctctttccttctcttacgtcctctcacctctgtctctctctcacggttctctaatttcttctcagaatttcttcattctgtcccctctgttgcttcttttttcatctctctatagttttcctcttattctcattcctacacccataataaacataaacaaactcgcacgcattcaaccctgcgtgacaaccgcacgcgttacccattctaaccctcccacccgccccgacagagaaacaaacactgcactctcactactacccatccttttctctattaatctccaaatatattttttaatgttctcgttctttt

SEQ ID NO: 29012 - DNA, 518 bp, Heterodera glycines
gggggggggggccgaaggcccccctcgaggccgcgaagcggccgagtgagtaccatgggcgcaggaaaattattaaggaggagggttcattatttattgatttttgcaaaattaattcataaattttttttcagaaactgctctgaacgcgatccaaaatttatttacaagttgaataaggcactctgactcttatattatcaaaaaaggagatgaataaatattttaaaaatttttaattcctttttaaacaggccaaaaagtttaggcttaacttttttttcagaaacttatcagaagcgccccaaactttgcagggatactgaaaggaaaagaattaacctgttttatcacattagcttgtcatcagttgttataaaaatttcaaaatgctgagtcttctatttttatttttgcaaaattaattcatattaattttttcagaaagtgttctgaaaggcaccaatttttttttacgagataacaaggtcctcttaggtttatattatgaataaggg

SEQ ID NO: 29013 - DNA, 1026 bp, Heterodera glycines
gcccatgggggattatttttcaacctcctcagaattgggggggataattagagactgggggattatgatagagggattatttttcaaaacacctcgtagactgggggataattggagactgcgggattaatagagactgggctataattagagcatatacggtatgccctttgatgcaatgtctctcaattgtcattttcatacggtacagcactttaggaaatgacatccaccattcttaccaaagtttggtacttttccgttttggggcctaaatttcaattttaaaaaaaaaatcaaatctagaccccaaaacggaaagtacccaaaaattttttatcatcaatcggcagcaactgaaaaaaagagttttttttttgattcttcattgtttaaagatttttttattattattttggtttttctattttttatttttggtctaataaatattatttttttaatgttaagtgggttctgttttgctatcaaaattacaaaaattataccaaattcaaaaaaagagataaagcaaggacccggaaaatttttttttaaatttttacttgcggatcagtgaattttatgctgctccatggtggccaattttttatgaaacaagcatgcaaagggatgagtaaagacgaaatggaagagaaaaaggaagaaagggaaggaaacagagaatgcggaagaaaaaaatggacgaagaaaaaaatatggaagatcggggagaagaagaagtaatagtataagagaacaaggaagaacgggaagatgaagaaccggaagaagaaatagaagagtaaaatgaataaaggaacgaaaatgcggaagaaacaatggaagagaaaagaaaaagaagacaattatggtgaagagaagaggaaaaaaagagtgaatgataaacaagtgtaagaggaagaagaaatggaatatgaaaaaggaagaaatagaagacgaagaagcgaagataaaatggaagagagaaaaaaaggatgaattatagaagatggggaagaggag

SEQ ID NO: 29014 - DNA, 1119 bp, Heterodera glycines
ttgtgccgatcatcgacaacttcaattttaacaccaccttccaaacctcataagcatcatcattgtcatttgtgatcgtgttcattataattttctttgaaaaaaaaatttgtttggcaaaatattttaactaaacaatcaaatttagcggtgctacgccaaaactgccaaaattgtttttggcacagcggacagaaaacgccacgcaaaacacaacaccaaattggaataaataaatcaaagttggcttttgcttcggtcgagcaatggaaaacgaaaaacgctgacaaaaatgaatttgagaaagagcgattttgcgagttggataaatagagtgggctcaatgcggagggtgggcaaagaagtggagaaaagggcggccattttctgttttacaaaagcaaaggaaaaagaagagaaaaagacggtgagagaaacataggattagacaaaaggcagtgaaattgtttatccatgtactatttctccaaatcttgtttcttttccttgcatgagaaaaaattttccgacacgaattcaattgacctacgctattttgtcagtttctaagtatctgtccaagattaattgtgaggttagaaaggaagatagtagtgaaaaatatcgtaaaatattaaattgttatgcaaatccgaattctaacaaaattgatcggtatttttaattaaaaattctgttgctttttgtgccaaaaattttcgcttaaaatttttgctttagcgatggaaattgaaaaattcagggtcgttgtcccgtaaatcgttttttatttagcctttgcatttttaaatggtattcaatcgtatcaaccccattttccttgcggccggcacttcttcggcagtcgcatttttcatcggttctcaatgctcaaccaaagaatggttgaatttggttgggatcaaaaggtacatacctactcctgaattaatttcaacatccatccacaggcacccgttatggatttggaacccaaattcaaaccaaaaaccggatttaacgcataattcaaggcagggttccatattttggcaaaaatgatgccatattattgatcaacagcctgattctaaccaacccaaaggatttttaaaattt

SEQ ID NO: 29015 - DNA, 871 bp, Heterodera glycines
gaaaaaaaagacttttacaaaaataatccccgggggaaaaggggaggggggaaacagattttcaaaatttttcaatttttttttagtctaatctactcaaagcggcatccagaattcaataaaaatcacatgcgcggtgggaaaagtgggttttgacaagtttagtgggaaaaaagagactacaaaataatacccctgggagaagggagtgggaaacatgatttcaaaattttcaattttttctagtctaatctactcaaaacggttcagaattcaataaaaataacattcacggtgcgaaaaatggggtttgacaagtttattggggaaaaaaagactttacaaaataatacccctgggagaagggagtgggaaacatgatttcaaaattttcaatgttttctagtctaatctactcaaaacggttcagaattcaataaaaataacattcacggtgcgaaaaatggggtttgacaagtttattggggaaaaaagactttacaaaataatacccctgggagaagggagtgggaaacatgatttcaaaattttcaattttttctagtctaatctactcaaaccggttcagaattcaataaaaataacattcacggtgcgaaaaatggggtttgacaagtttattggggaaaaaagactttacaaaataatacccctgggagaagggagtgggaaacatgatttcaaaattttcaattttttatagtctaatctactcaaaacggttcagaattcaataaaaataacattcacggtgcgaaaaatggggtttgacaagtttattggggaaaaaaagactttacaaaataatacccctgggagaagggagtgggaaacatgatttcaaaatttt

SEQ ID NO: 29016 - DNA, 1125 bp, Heterodera glycines
agatttatggggaggccgaatccttcgggaatagctcccctacagcctgtactttaattctgcgttgggatttttgctccccataaattgtgtgagtaccccaaacggacacttgaaaaaatcgatttttttgttttcggggcagtccccccgaaccgatgcgcccagatttatggggagaccgaatccttcgggaatagcttccctatagcctgtactttaattctgcgttggatttttgctccccataattgtttgagtaccccaaacggacacttgaaaaaatcgatttttttgttttcggggcagtccccccgagccgatgcgcccagatttatggggagaccgaatccttccggaatagcttccctatagcctgtactttaattctgcgttggatttttgctccccataattgtttgagtaccccaaacggacacttgaaaaaatcgatttttttgttttcggggcagtccccccgagccgatgcgcccagatttatggggagaccgaatccttccggaatagcttccctatagcctgtactttaattctgcgttggatttttgctccccataattgtttgagtaccccaaacggacacttgaaaaaatcgatttttttgttttcggggcagtccccccgaaccgatgcgcccagatttatggggagaccgaatccttccggaatagcttccctatagcctgtactttaattctgcgttggatttttgctccccataattgtttgagtaccccaaacggacacttgaaaaaatcgatttttttgttttcggggcagtccccccgaaccgatgcgcccagatttatggggagaccgaatccttcgggaatagcttccctatagcctgtactttaattctgcgttggatttttgctccccataaatgtttgagtaccccaaacggacacttgaaaaaatcgatttttttgttttcggggcagtccccccgaaccgatgcgcccagatttatggggagaccgaatccttcgggaatagtttccctatagcctgtactttaattctgcgttggatttttgctccccctaaatgtttgaggacccccaaccggaaacttggaaaaaatcgaattttttttgtttt

SEQ ID NO: 29017 - DNA, 975 bp, Heterodera glycines
tttttatttgaatttaatgcgccgttaaaaataggcacatattttttatcgcgttttcacaattgataattcacaattaattccaacatcatatttaactttttattagtgttttgttatattatattaaaaagatttacatattacttattgcccttcaattaaaagtttaattaactcgtcttaagccaaaatgtttcactgttttctgattaaagcaatgtgcgaaaaggtgccaaaaatatattaattgaaattttcttaataacaaatttaagagaaagcctttaaaaaatcaaacaaaaatacaataaaataaagaaaattaacatgaaataagagttgatattctgcttcaaaaatgcatgaaaaagtgatgattactaccaaaataaaatcaaatcaaatcaaatttataaggtacaatatttaataccctacaatatttaatacccacaaaatgtgaaagcacaataggtatcaccacataataaaatatctatattaaaatcaattgaaaatagtattaggcctaaattacatatactaattatttcaatgtaatcaattacagtagttttattaaattaataatatctaaaaatataatgcgtgtgtttaacataccaataaaaataagcatgacaacacctcagcatagattgttcaaagaactttgcaaagggaaataattaaagcatttaaaattaaaatattaaaatcaattattattaacataatacttgaaaagtacaaaatgcagacaatacataaatttttgtaagatataatttttataaattggaacattctcagaagtgccatcatggtcatgcatggtctaatattttccaataaataaatatatacttttcaaaacattgggaaattagcatcaagttaagacattttacaaaaaaaaaaaaaatttaaaaaaattcctataatgattaattatggaaaaacaatttgatt

SEQ ID NO: 29018 - DNA, 986 bp, Heterodera glycines
aagcgtgtttaaagcaaacccgaaactgataggaaatttaaattgatcataatagaagtttaatttttatttgtcccatgcattttctgggaaatcttttcgcgaaaagttgaaaaatttcaaaacggcagacaacagatgcatttcaaacaattcaacaatataatataaaatttaggcaaaaatttttgttccttcctctttggaaatggtcttaaattttgcttgtaaatattcagataacaagttttttttactgaaaattttttacacactacaggatgaaacgcaataaataatgtttgtagacaaaagaaattggcgaaaaaaattgcctcaacaatcagtggtgaaactgaaagaaaaaaacttccccaaaaaatcggagcttttccgacggcatcagctgcatttccaacagttcaacagtataaataaatattaggcaaatgaaaaatttttttccttcctctttagaaactgtctaaaaatttttgttgttaatattcagaaaacgtgttttttttactgacaatttttttcaagagaaggatatgaacaatcacttataaggctcatgcttggagataaaggaatcggaaaaaaaaattatctcaacaatcagtcgtgaaacagttcaataattcggaagcagtgccatattgggaaaagatgcacaagtagagtaggctcgaaataaaggcaactgccgaagattaacaaaaattcaaatttattggccccgttctgctttgacaggccatatctcgccagggagtggcggtagaccctttgttgatacatttgaaaatgtagagcgcgtctagctcattcgaataacatcaaactggtttgtttttgtcacgaaacaacccgctgatggccacgtcgaagaaaagtccccaaatttgacatccataaaactccatttttcataggccagcgtgtttaaatcaaacccgaactgataggaaattttaatgatc

SEQ ID NO: 29019 - DNA, 834 bp, Heterodera glycines
gaaatttggcattttaaggggtggggcagaccacattttgacatttgagaagagaatgttgaaaatgaacagaatggtgacggtggacaagtgatggcgagtgtggtggagcagcacggagagaacggtcgtgttcagacaaatgccgcacaaaagggcgatttccaagccaaggccaagccgtgcccagccactcagcgtggagaactcactgaacaattaaattttaattgccactgccaaaagcgacgatttgccgtcgtcacctgacactttcctcggccagcagcccctcgggcacttcgatcttttcgctgggccttcggttgcacgtctctctgagctgctgcgtctccgcctcgtcctccgcttcgctctgcagctgctcttccgttggcattgtgtccgtcccattgtttgttggttcgccctcctcttgaaagcgttcgttcgcttggaccattttgcatcttaaaattatgaccgatgttttggcattgctttttggcattttgacttgtaaagcatttcgacgcgagggtttagccaaatggtggccaatgagaaatgctgcaaaagaagtcgcgtcttcagcaccaaatggggcagcgaactcttctgcttgatcatccttttgatgtaactgctaaaacggcaaccaaatttggctttcggcactccgccaatgcccaaatgcctttcgcttatcttatttcgttgccgaccatcacatcgttggtcaaggcttggcccatcccaacacccaaaggtcgatttgcctcgacgaactcgcgaaaagtaaagcgatgcgttccctcgcaagtgtgcgagaag

SEQ ID NO: 29020 - DNA, 978 bp, Heterodera glycines
cccaactcatccaaacccaactcatccatacccaactcatccatgcccaactcatccatacccaactcatccatgcccgactcatccatacccaactcatccatacccaactcatccatagcacgatacgagtcgtcgccgtgacatttaatgccacgactaagaccgtacaaccaaaaaataccacgactaagaccgtacaaccaaaaaatgccacgactgagaccgcataatcaaaaatgtccacggtcaagaccggcataatcaaaaatgtccacggtcaagaccggcataatcaaaaatgtccacggtcaagaccggcataatcaaaaatgtccatggtcaagaccggcataatcaaaaatgtccacggtcaagaccggcataatcaaaaatgtccacggtcaagactggcataatcaaaaatgtccacggtcaagaccacataagcagaaaatgccatgccacgaccacataagcagaaaatgccatgccacgacgatgactcgcagcgttatggatgagttgggtctatggatcagttgggggtgactcaaatacgttgtcatgaatctgcaatcagattttgcgtctttttgtgatatatcgtaacgatgctaaaaaaaagtgatagataaaaatatacaaaaattaagcgttttttatagctttcaagcgagaaagtgtgtttaaccggcggcagaggttgcattatgacgcaaaaaaaaacgctgcggttgcgtaaaagagaaaagcattagtatatggcaattactttggcatccgtcttataaattggcttgctgaattgtatttttcaaaaatcatatttgtaggacccaaattatagttttggccccaattagattttattttggtaaaaaacttggcaaatttgtgaacaagcaagtattgggttcaaatactcttacagcacatcctccgacttcaccgccttgccttgggttctggccatca

SEQ ID NO: 29021 - DNA, 631 bp, Heterodera glycines
ctcattactctccacctcttccccattctctctctctctatcgttctctctttcccttcactctctcccttctctctctttcccttcactctctcccttctctctctctcccttctctctctcccttctctctctctctcttctcttctcccaatctcctttctctccccctcttcccccttctctctcttctctctctcctcccactcttcaccttctctctctctccttcgccctctctttctcttttttgaaaaaacagtaattcaacattaaattttgaaaagtcgctggaaaattttttaaattttttttttaaattttttctcggctgtgttatgcagggctcgtatccgtccttgaatggcaaggacgtccttgaaattgggccctctttcttgaaaataaaaaatgtccttggatgcaaggacgtccttgaaaatgagcatttggaaaatttttataaaattcaaagaaatttgataaatttttgtaattttcaacaatattttgattaaattatagcattatctaaataaaatgcaaatttaattgcccaaaatctcaaaatttggtcattttttagacaaaatctgctaacaaacagcattaaaattacaaaaaattttcc

SEQ ID NO: 29022 - DNA, 1599 bp, Heterodera glycines
ctcatctgcagcataagttgaaccgacaattttggtctcttttcgactcacaattctattacgctttttgaagcaaaacagccaatatggtgaagcctaattttagaaattgttcttcttattccaatttataaacaccttgaaatcatttaaatgcacatctcgggccttaagcaaagctgccgtaacaatgtccgcgtcgtgcaaagcttcacggcgttggcgagactctcggaacatcgaaatgcaatgctcttcgatttgtcgcaatttgtggaattttgttccccccttttcaacgtattccttaattctaacccgcctttcgtgagatttttcttgtcatgtcttaccgaataatttcaatgtcgctttttaattttttgaattggtgacgaatggatttataagttttgccatcatttagcatattcactatttgtatttgggtttcaaatggatatttggattgggttgggtcatgattattttcctcctgatcagtgttgttttctgattcgtcgtcgtataagtcgtcctcctgatcagagtcaaaatctagcccaatttggtctgctccaggctgttcatcgattagcgattgggcataatcgataagcccactgatcacttgccgtatttcaggattattttggtgttgttcaaaactggcgtttaactcgtccaaaaatacattcattttgggttgggaaatggggtgaaatcaacaaaggaatggcgaactagcggaaacgatgaccaaacgaaaggacgcgacgttttttcaactaatttgcatattttctgccctccccccaccggttgtaacgaatgaattacaatttttgaccaattgatgtgaacagaataattaaattgaaaattttttaaaatttatttttttttagaaatcaatcttgctttgatattaatgggtgccaaagagaattagggattgttccgaccgcaatcaattgtaaactttggttcttttggaaactcaataaaaagtggaatttcatccgatacccatactctgtctaatttatgccctttccacgctccaatgaatttataagaacaattcgtttggttatcaggggtccacacaattaaagttttgtcattttgtttacagtttcctttttcaaacgggcaatttaccgtttcacccataggcgcaaaaatggaagggtccccaaattttgacattacttgtgtcgggatgagataacaatttcactggattcgattttccatccccatgagccaaaaaaccatgttctcggggttgtatcaatttttcgatcagtatgtaaaaggcccgagtcatttttaagtgtacctaagctacatttttatgtctaatcatttgatcacattcattcaaactcacatccaaaaattcagggtcgagtagttctgtgattggaacatttgttaatgaagtgtattttctaagcgatttccttattttacgacaagcccatgcttccgtgtaatgtccaaaaaaatttggagaaaacagccacagtgacatcctttctgggttttggtttgattccactgaaaatttgggacagccaccgaacgagggaa

SEQ ID NO: 29023 - DNA, 1207 bp, Heterodera glycines
tgttttttccgccttagttttgcattttttacagaaaattactaaaaatacttactaaaatgtatggacaaccactaaaagtagtcatttaaaagattttaattcatgtttaaaatgtttcctaattgcgtgccgtgccgtttgtttgacggttttctaaccaaaatcactttttttgggtactgtaatatcatatcatatcattttatgttttcaatgattacttcctctgtcaggcaaataacacagatgtgttcagaatctgacgttgactgtttatttgtttgatcaatctggggcttttcgatgtaatttttcattttagctttcaaatgttgttcgctttcgtgcccggcggatgtttgagcattgttctttgggtacaacttccatcgctgacaaaatgctcttaattcatttacctgtaaaattttattttgtatttttatttgatctgttttaaaagtgacccgaatctctaattgtttctctaattgttctttaaattttatgtcgtccaataaagactgttgttcagcattttgaatttcacagagtccgtcaacaaagccaaaaactttgtctccataacggcagatattgcttaacatggcatcatttgtgctcgccttgatcagcgcatttgaaaaaatgccgagggcaatggcatccctttggttaaatggacagccaattgccttttgtgatttggcttgattgatggcatgacggagaatggccaggacaaagaattgtgtcttaagagcattgcagatgagaaatatttgtacattttattctcttttttcgcattagcacctattttcgttttcattttttggaccattcaaaaaagagaaactcaataaaaaaacgtttaaaaaataaaagaaaattatgacaaactctggccgatacggtgggctggtggttaaacgccgtgttgagtagaggtttaaaaccactatccaacaactcgaaatagtaaatcaaacaacgtctttgttccgaaaattgacatagatcattaattgactgatcattccttacaccgttctccacttttccatcaggagcaatgatttcctattgaatgtgttataaatgaacgattaaaatcaaattaaaaagacaatttttaattttaactaatttaaataatatgactaagaagataattaattaattatttttaaatgaaaactgg

SEQ ID NO: 29024 - DNA, 973 bp, Heterodera glycines
  unsure (1)..(973): unsure at all n locations
atttttggctttactttttttcttttcggctctaattttgaaaatacttagtacttaaggcatttttgccttacttttaaaataagacattttcaaagccaaagaacaaacttgtatgtttcccagtcgaattgaagtcgtaagtacgtggcgctgatgttccgcacacagtacatacaacagtcacacgaacggcacggtaccgaaatttcttgaattgatgatgatacgtacgtattatttgacgactaataanaaaataaccgtgtttctttttttaataatcattaaacttttttgcactttccattttaagtatggcattttttatattttttgaaagcagacgctattaataatcaacaaataggcgagactttttgttatccaaatgaagcaatttttgaagcagaagaacaaactttgcatgttttcccgacccgctgaagtcggaagtccgaggtgcagttgtttggcaagccaagcagcaaacttcgacacgcacagcgtgatggcggaattttttgttgagctcaaatttgggcatttgatgtgacaaaattgctgcattcgtgcaattaaaatgggtagtcttgtggcggcacatctgagttcgtccaatgagaaagcaatgccgtattcggcttactactatcgtcagaggaagatgaacgtaatcgaggcatattctagaattacgctgaaaaagcaattgtgggcgctatactttttcgtcagtaagcattttcgtcagtgaacgatttcgtcagtgattttcgtcagcggataatttcgtcagtgaacattttcgtcagtgtactatttttatttattttgctgttttccatttttttcgtcagtgttccaattcgtcagtgaacattttcgtcagtaagtatttcaggctcaattttttatatatattnctctcttaatagatttttaatagctgagaatttattttattcaaaaa

SEQ ID NO: 29025 - DNA, 1134 bp, Heterodera glycines
  unsure (1)..(1134): unsure at all n locations
tcagtagcatatcgtcgggttcatttacggtgaccttctttaggaggagaacagatgaagaaaatgaacaagcgaactttgaagaaaatgtgagccaaacaatggcattgacaatctttgttttttggaaatttcgaccaatttccgcatttgacgctttggagaaaaatcacaatttatagtacaaggagaagaatattggactaaaagcgaggctgtgtgtatgtatcggtggcaaattttcggattttccgttgccgggtcgtccgctgcccaacaaaatccgctttaatcaacttcggattgagtaagtttaatgtgttgtttgcattaaaggctgatgattgatcccttttaagctgcattgccattccgtcattgaatttctccgtgccaacaagcacatttgggagagaatgggcaccaatttggaattgaatctgtgttcaagcgataatgatgatgatgaagagccgatttgggatgttttggcgcgtgaaatttggccaatttttgcaccaagcattcgccacttgggttttgccaattttgacgctttgtgccgtcgcatttcaccgacaattctcgccgatcttcatcaattgatttcaatcgatttcggacatctgtttcttcatggaattgatgacgacgatgaaccaaatgcaacttctcctggccaagtgttgtccgaatggttgcacactccgaaaaaagacgggcaaccgaagcgactgtttcataacttatgttaaatttgataattttatttaaaattttgcaagctaacagagaaaaagcttggctattttatggtactaagaatgtaaaatatgattgcctttaagcaaagttatgccatgttttgtcgaaaaaattgccaaaaattttgaattaacgggatttctggcgtaatgatgacaagttctgcttttgaaagtcaggtttctgcggtcagacgctaactgcatgaacctgtcaaaaatgacaggttttttccggtcggggtcgttttcgcgtgagggccattttcgcgcaccccccccccctaataaatgaaaaattttctcaaaaattcgactccaaattcttttacatacttgatatgaaatattttagcctnaattcacacaa

SEQ ID NO: 29026 - DNA, 570 bp, Heterodera glycines
agcaaaagtaaaagtaagcaacaagtaaaagtaaggaactttttttaaaaaggaaaggacattctgacaataacaacaataaaaatagtgagtttcaattgtcggtgggtcgattgctcagtgatttgaccccccccccccctctttctccccttcgcttttccctcctttctttctttctttttcttttgtgcgccgttttccatttttttctttcctgaaaaaatgaacaattaaatgaattatctttgaacaaacaaatgaatgaatgggctgatcaatgtcagtctttcattatcacttttattcagcgcggagattccatccgttcgtttagcgaagtcaatcagcgaaaagagttcagggcggatgatgggcggggagaagagagtgttgggaggtgagagagggggaaaagagggagagaggggagaaagggaaggggaggatgagggaggtattcacgctctagagtgatattagggatcagcgtatttttctaccccatagaaaaatgctttttaagagcttgctattttttactatcgggaccacaattctgcacctttg

SEQ ID NO: 29027 - DNA, 985 bp, Heterodera glycines
  unsure (1)..(985): unsure at all n locations
tttatgggcncaatgaaaaacaaaaaacgggtgagtaaatcttgaaaatattgcaaatcaaaagccataaacccacctcgtactgcgatttgagataaatttctgttttttcacactatgagttggtttttttaccaatgattttaccccaaaaatccccccctccatccctgtgatttttttcgtaggggctcattaaactgtaaaagtgccgaaaaaaccaatcatttaaaaatcctcacattttttttcttaaacgtcggttcattttgcggcaattagcgcacaattattgtcgttatttgtgatcggtaggggtcaactgcgtctgagccaactgctttcgtaccggcaaaggttcacagttttcggaatatgaaacaaaagggtccataaaatacaaaaaaaggaatttaaattttttttaggcattaaatctttttttccgagaattaacgtttttctgctttttttttgtaaaatttgcggaattacttttacaaaaatgttaagaatcaaatttaaaagagtcaatacgatttatgagaaaatttatataaaaggcagagaaattgacagttaatttcatttttgcaattataacttacgacaaaattgtgcagctaattgccacaaaatgaatcagcggcgtttaaagaaaatgtgaggcattttttaattgaagctttatcggtaatttaattaatgttttcacgtatttcagctggatttgccacgatgtttggatggatattttgccattttttcgtcgtcgtaaactcggcctcaatttggcactgatttccgatcgtttcgatgttttggtggacgcgcatttcgatggcaaatcagaattgacgatttggaaagctatcaggattcacaaagacgctttcacagaagtgccgaaattaagtgtgctaatcgataatgccaatcctgtaaagtttccatggcctgaccgtccgttgcacaacaaaattcg

SEQ ID NO: 29028 - DNA, 1547 bp, Heterodera glycines
  unsure (1)..(1547): unsure at all n locations
gtatagctcgcctcaacggtaacatgtagcacagttgtaccccttcctataggcgtcncggtttcctgtgtcgtaaaaaaatcttaaatttctctcaatcatgcagaaacagaagagtggggtgcggtgataggtggcaatataatcagaatagcggctttcgtagtccctgtgtgttataattttataatttgaagcctcaattaacaatgcctccacttctgctctgtttttctgccagaaaaaatcttctttttcgagagcctcctcaaaatatttttgaaacgagtacattttaactgaaaaattaataaagaaaaaaaactcgaataaataataatggaatgaacaaaaaataatgaaagggaaaaaatgaaaaaattttatttaacagggaaagaataagtgccaataattattgaaattctctggtctaacaaattcacttccccaaatgattgctgcctgtgcatgaactcgttgaaaacaatgtctgggttcgattgttggaaggggcgggcagggatgatcactgggtctgacagggcactgcaataaaggtccactgaaattttctcaattttccagcccggctcagcttctcggctcattgcatcccccattaattttttcaggatttttttaaacattttttcgggatcttcgttttctgggcatttaaaatagaaagttgtcacgtgctcttttatcccaaattttttattttcgtttgtgtgactctccacttcttcgaaacatttttccaaattaggactattcttgaaataatttttggtatttttcgagcggcggacttcttttgaagtttcttggaagtttttctttgacatctaaaaaataggaaaagaatatgattaatttaaatattaaatgttataaacattaatacaaaaaaaacaaaatttttaaatctcttaataatgtccaaagggcaaaacattaaaatgatcgtcgataattccttttttctgcaccggcgtatattctttttgtacatcttttgagagaacccggaagtcgtttgtcggcccgatcttctccgggtagtgaaaaacttttttgactccttccttgtggtctagcaccatctctttgaacaattcatatttaaattcgtttcgtctatccaatgtcatccctctgattttggttttgtgccaaatcaccccgtccttctttcttctaagtttcaaggcgtactgcttcggacccgcggacacaaactccaaaatttcgctgtcagcatactctcgagtcatctcccttaaaaccacaatttaaatgcgtttcaaaatttatgttttaccctaaaaatttcccctccaccaacggacaccgccccttccgatgagcaaaagctagagaatctaaatttttggtgtttattttctttttattccttttcacctgtgtcacaatagagcagtttacacccctccttcttgtagacctgctccatgtactcgtacagctttagcctcgcagcactcgtggtccacaatgacaaaacaatattcgacacttta

SEQ ID NO: 29029 - DNA, 965 bp, Heterodera glycines
tgaatgttgtcccattttacgttgtggtctgcggcctacggtcgcttcagagccatttacgccttcttttcaatattcgtatgtaaaaacgactatctctttttttcggaacacttttttgaaaattttttccggaagagattttgtgacacgcaatataactaacattcgaggcttctgtcatttcctttttataatgcgtatataatttaggctatttgattttatcagcaaattccgaaattagcttgggaatgggcccttttgaggccaaccttttttatgaatgttgtcccattttactttgtggtctgcggcctatggacgcttcagagccatttacgccttcttttcaatattcgtatgtaaaaacgactatctctttttttcggaacacttttttgaaaattttttccggaagagattttgtgacacgcaatataactaacattcgaggcttctgtcatttcctttttataatgcgtatataatttaggctatttgattttatcagcaaattccgaaattagcttgggaatgggcccttttgaggccaacctttttttatgaatgttgtcccattttacgttgtggtctgcggcctatggatgcttcagagccatttacgccttcttttcaatattcgtatgtaaaaacgactatctctttttttcggaacacttttttgaaaattttttccggaagagattttgtgacacgcaatataactaacattcgaggcttctgtcatttcctttttataatgcgtatataatttaggctatttgattttatcagcaaattccgaaattagcttgggaatgggcccttttgaggccaccctttttatgaatgttgtcccattttactttgtggtctgcggcctatggacgcttcagagccatttacgccttcttttcatattcgtatgtaaaacgactatctcttttttcggaacacttttt

SEQ ID NO: 29030 - DNA, 1319 bp, Heterodera glycines
gccatgcctccgattgctggtggcacaccatgtcctcacttagtgaaggtgcatttgaaccgtgccgattgtgttgccggtgtcgtcgcgcagaattaatgagctctgttggcctgccggaagcagagtcagagtggtggcggtgttgacgcggcaggtgagtccagagtgactcttgaggcaagattcggtccgagtggtcaccgagatggtctcggcgttgccgaagatgacgggagtggccaataggatgccgatcagtcgagtagctgctcgctgagctcgccgcccgtggtgccgtggctgccgtcggacccgttgaattccaacttcgagacgttccgcaacacgttctcgatcttcccgtgtccagggacgaccggcgagggagaatgctagtcggaggggccaggagagaaggaacgcggtgatttgatagccgaaattgagcacaactcgggcggatgagcagaaacagactacccacccgatcagacagctgatcagcgacccgataattaggaaaaggaagacagagaggcgggggttgcaccgccaattggcgagttggtcaatgcaaacggagcagtcaatcagctcgcattcgtcgatggctgagcagacggtttcggcggcgcaactacgggtcgatgagaggctgaacgttgcggaacagccgtaattgttgacgagaaggtcagcggacaactcatattcaatggtggcagcgcccaaccgatcaaggcacgaattggcgcaacaaatcgtgaccttctggacggcgggagtggaggagactcggacgcctcttctggtgcaattgacgtggtttccgatgcaatgggatgttgggggtggctcgggatggtctgaggcgaatggccaaattccttgtgctggggaggcttggacgcccaggaaagtgacgaggatggccatgatcattgtcgtggtgggggggattccgagaagccgcgattttcgtcgcgttaccatgccgtcgtgcccacgggtcatcggttcttcgggaagtgacgggacaggcgtcatgtcctgtccaacaagttcggcgtttttggagtctctgcgactttgattagtcgggttcggttcggtggcgtccgattcgggttccagggcctggttttcggtctccaaggggcaaagacggctgattggtcgtgtgacggtttgcccattcggcattcgcagctggacgctccgcacattcgggggggatccatttagggcgacgacgacccccatgggccataagttcctggtgcggaggtcctcttcgacgatgactacttggccga

SEQ ID NO: 29031 - DNA, 1067 bp, Heterodera glycines
taaatggtcattcttttctcaatttgtctacaacattcatacacattgggctatatatatataccagcagaacaaactcaagaaatgggccaaaatgtgaagcaaaaataggaaacggggggcagacacgaacgacgacgaaagagcgaccaaagaagccgctgccgctgatgatgctagtggtgaagaatcgattgtctttcaacatatatatccttcggggggaagggggatctgagtgtgtgctgcttggagaggatggggcaagaagagggcacagggaggatgaggggaattcggaagagagacaacaactgctgctggtggtgctgtccctcttcccccccccccctctttcagttgctgctgttgtaccccgtccacctcatttcccctccatctcaccatccccgtcaatttgcccctcttccgctcacaaaatgcacttgccgcttatatatgtattgaaaataaataggttttctttctttctctctctttctgtgtgtgtgggggcttgaggggatttgtgaatcgtgagatgaattagcctctgaggaagtaaattaatagcccaatagcgcccgatgacttaaaaaattttatattccactcatcatcataatacataattatcagcatccacccacccacaaaaggagaaaaagttggggggggggggaaggaataaataatgatgattagatgatgagatcatcagcagcgtgatcactgatcacaggacaatggggcgggcggacagatgggtgtgtaaaataaatgaatgaacgaacgaatttgaaagtgaaaccgggggttgaaatgaaaatggaaatgaaccaaagaatatgggggacactaaatttttgtaattaatgtgtgaagcgcagaaatgaaaaatgccattggcggcgcagcggcgcgagggttatgccgcgctcctcaagggcacagccagcagcagcagatgaagaaagaaaaggcaacccccaaccccaccacaccaccataaatgtgtgtgtgttgtggggggggggggggtaaataggtattttagttgtgattct

SEQ ID NO: 29032 - DNA, 1286 bp, Heterodera glycines
gactttttccattaattatttattatttgcaaaaaataattcataaatatttttagaacgtgctctgaaacgcaccaaatgttaattaaaagttaaataaggctctctgatgctttcactatcaaaaagggagatgaataaaaaatctaaaaatttttaattgctttttaaatttgcgaaagattttaggcttaactttttttttataaactgatcagaagcggaccagattttgcgagggcatcaaaaagacaaggaaaagcactgctatgatgctaactccagtaattctgaatttaaaattttttattaatttttaaagcttcactattttatttttttagcaaaattaattcataaatattttttcacaaactgctctgaaacgcaccaaattttatttacaagttattttaggcactcagatgctttcactatcaaaaagggagatgaataaaaatctaaaaatttttaataattgtttgagtaccccaaacggacacttgaaaaaatcgatttttttgttttcggggcagtccccccgaaccgatgcgcccagatttatggggagaccgaatccttcgggaatagcttccctatagcctgtactttaattctgcgttggatttttgctccccataattgtttgagtaccccaaacggacacttgaaaaaatcgattttttgttttcggggcattccccccgaaccgatgcgcccagatttatggggagaccgaatccctcgggaatagcttccctatagcctgtactttaattctgcgttggatttttgctccccataaatgtttgagtaccccaacggacactgaaaaaatcgatttttttgtttcataaatatttttttcagaaagtgctctaaagcgcaccaaattttatttacaacttaattttagcactctgatgctttagtatcaaaaaggaagatggagaaaaaattttttaaaaaatttttccttatattttggttatatcgttttgcttttggtggggtgcttggaacagtggaatcatgcgcacccgtccgatctggcaagttaagcaacgattgctgactagccaaaaggttcggtgccgtgatgaaacgaaccagcactgcttaccccgcggcacccggcacggtcccccgaaggaatggatttaattaaattctctccttcggggatttttttccattaggtcgtccgttagcgttcgattgctctagtcaatttttaaaaatttttgttgaaatatttgtcgtgctctgaagggcgggggggggcg

SEQ ID NO: 29033 - DNA, 1225 bp, Heterodera glycines
gtcatattcaagcgggattttagtaaccatgcacattgtttcaaattcggaatagcctatatcgattgggatgtttaccaatccgtaaacaggaattttttatcccttataggtggcaaactgatatggcagtcctctcaaatcacccccctttctttgtctctctctctatctctttgtctctctctttcttcctctccatctctttgtgtctctgtctgtttctttctctatctctctctctctctttgtctatctatttctttgtctctctctctttctccctccatctctttctctctctctttgtctctcactctctccctctgtctctcactcttctttgtctccctctctttctctcccctctctcattatttctctctctctctctcactctctctttttgttcataatttttttatgcgtatatgtataggagagatttttgtattctgttcaaaaatattgtaaataatatgaaaatttctgtgaatacgtttttaatgcgtatacgaatagagatttttgtattctgttcaaaaatattggaaataatatgaaaatttctgtgaatacgtttttaatgcgtatacgaatagagatttttgtattctgttcaaaaatattggaaataatatgaaaatttctgtgaatacgtttttaatgcgtatacgaatagagatttttgtattctgtgcaaaaatattgtaaataatatgaaaatttctgtgaatacgtttttaatgcgtatacgaatagagatttttgtattctgttcaaaaatattggaaataatataaaatttctgtgaatacgtttttaatgcgtatacgaatagagatttttgtattctgttcaaaaatattgtaaataatatgaaaatttctgtgaatacgtttttaatgcgtatacgaatagagatttttgtattctgttcaaaaatattgtaaataatatgaaaatttctgtgaatacgtttttaatgcgtatacgaatagagctttttgtattctgttcaaaaatattggaaataatataaaatttctgtgaatatgtttttaatgcttatatggagtttgttttttgtgcagaataagcatataaattgactggattgcggctttcaaaatcacaatttccaaaaactaaaactaaaaaatgaaacaaattaatgctcaataagcgctgccattttttgaatctaaaatataaaatagagaaa

SEQ ID NO: 29034 - DNA, 994 bp, Heterodera glycines
aaacccccggaaactgattttgatcccaaattaaacatcttattttaagatagaaacccccattcttcaggattgccagtctttgaaaccatttccgattagcaaataataatttcgctattataaaaaataacattttgccggccatgtagcgctgcactttgacctttttcatcacaattctgcctttctcatcttttactggaattgcgcctgccgtgggcaatggtcgcgggcccaaaggtttgttgtccaaattacgctcaaattttggcacgaagtcacccattatttctgaaaaataggtatgtgtatgtacaaaataggaaattttttataaaaaatgtcaatttaacggactgttaatggaatcaagtgcaagcatttaaaagagattcagacattggcgatttgtttcaaataaaaaacactaaaaaaagaaaagttatttcatttcctctgggaagcctgccaaaaagtacaatccttttgtttctatcaaaattttaagcattgtgtcgacaaactaatcttattacattgcgctcgaatatgacaattcactctcgtaaagtggtggcctactattatgatggtccattttttaaccaaatcggtctcataaattccgttacaggtgatgtcggcaattactactacggccaaggccatccgatgaaaccccaccgaattcggatgactcacaaccttctgttgaactacggactctatcgcaaaatggaagttttcgtaagtatttattgctttttcgtttaaaattgcctttgcagagaccaaaggctgcgtcactagaagaaatgactaaatatcacagcgatgactatatgtgttttctgaaggttagtcaggttaaacacagtaacaatttaaaacgcttcagagcataaaacccgacaatatcgccgattttggtcgtcaaatgcaacgcttcaacgtgagcgaggactgtcccgtgtttgacggtctatttgag

SEQ ID NO: 29035 - DNA, 960 bp, Heterodera glycines
taaattcaagaaaatttgaaaattcatggccttttttgatttttcagataggtaccctcaaatttcaggccaaatctgaaaaatcagtagtagacttggtagccctgcagaagaagcaaaaaaattcaacgactaatttaacgaaaaaaaatcaaaatgttaccccgccaaaatttattttatttagtcccgtcatttgagtcctaatggtagaggaaatttcagtaccgtcgcgaagatagatgacttatttttcggaattttcttcactaaaatcaaattttggctcaaaaaatgacgaaaaaagtcataaaaacgcaaaaaagccataaaaatgccaaaagatattttaaaaaattttaaaaaaggtcacaaaaaatgcattttagaagcttcaaacaaagtatagaacacataattcatttgacttaaattcccatccctaaatatgaatgtagaataaaatctcaggtagtaaaaaaaaaataataaattaaaaaaaacattattctacaataataatttttttaaaaataaaaaagggcaatctttaatttactatgtttttaaattagatggttgaacttttagacaataaaaatatatttttatgttttacaatccttaatttgatgcccaaatttctggtgcccaaacttcccccccccccgcgtccatgacatgagtccctttcgcactgagccatttcagtcccagttctgtaactgtgtacataggggaattgttgctgccaaagaatttttctgattcttactttacagatagaaaggagaagtttgtatataaaaattgttcgattttgattcaaagatttcaaattaatattttcccagttaaattttgaatttattattaaaacgaacaaattggaattattaaaactgttaattaatgtgaaaggaaaattcaacaaattaatttttgaataaatttaaaact

SEQ ID NO: 29036 - DNA, 1131 bp, Heterodera glycines
cagtccactttcacgcctatggcgccaagccgtccccctttagtgtcctaagaggaccccgtggccaagccattgtctcttcattagccccccccccccccggtcggctaactggcgggggatttgggatttgttcgttgcttcgacgagattttctcgtccatttttgtttgtccagtcagattaaacaacagagagagaggaaggacatcccacagtttcttcctgcttcatccattcattttcattctcacccagttatttctctgtgtgtccccccggggcgattttcttttttttcggtgtccgtccgccggcggtcaactcagtccctgcgctgtgaagtgagtgaccgtcgtttgtcgagaacaacataaccagggccgggactggcttctgcttttgtgcattcggggtggacacccactcactgcttgatcaccgacacattgttaatgctttagccgctttccccccccccccccctcccctctgatttcgtaattatttggcggctttatccccccccccccaacccttttgcgttttgttttgttttattttcttgtcgtcaccggactttacgagaacaggaatatcatcatcacattggataagaaattgtacgagtaaaaattacatggaataatgcgactggcaaggcttttcacacttctgctgcctgctcgtggtggcatttttggcacatcgttttgccggtgacggcacaaatattcccttggggcgatttccccccctttttcaattgtcaatcattctcagcaaaaaacaaaaacaaacagacaaaagagaaaacttcaaaaggaacaaaacagtcaaagtcaaactgaaatctttaatttatggtttttggttcaataattttggattttggggctttgttttttggagttttggcataaatctttgattttcggtttggcttttaatcgcattgaccgttcacatttctcatcatgcaattttaattgatttattttttagcatttcatccatattaaaatgatcaaattgaatcaattcattacttttttggtgcactgtcacacattttccaatggaatattactgataattgaactctgcagcagggatgggtcaaatgaaaaa

SEQ ID NO: 29037 - DNA, 1386 bp, Heterodera glycines
  unsure (1)..(1386): unsure at all n locations
aattttcgtttttttaacttttnatctgtcatcacaggagtcacattttcncataaatttncaaatgaatcatcatcaattccctcgatatcgtntaggagaattaagaaaataataaataattcaaaaacaatttttaacatntaagaaactaggaaataatttattaggtttaaacagactaatattaatattatattaaaattaccagtattttgccatgattcagcaagaaaacaattaagtattagaaaatcaatgaatattattattttacaattatttttcaatttaggtttgtcaaggcattaataaattttttagaaagattaattgtaaaattttttcaattttaaaacaattaaattttcattatttttaaattagattaaatggcatttatcaaaagatttttgtcagcatgtatgatgaatagggttataaattatatgattttgcatattttttctgcgcatatgcaatgaagaaaggggctcaaaaatagcagttctgcgttaaaattttttgatttggtgaaggtttttagtccatataatccaaattttggggttttcgagaataaatccatatttcgacatttttgcatttttagtccatattttggccatttttaacaaattttcacaagaaaaatgcaaaaaagcgaaaaatacacccctaaagagcgactttttttgtaaattttttaaaaatacacgcctaaaaaagagagttttttttttcgaaatttcggaaagttttttaggtattttgtccacttccgaaaattttcgctgaaaacagaatgagattattacaaaaattttgagatgtatttgatttgcaattgtgaagtttgaatttaattaaaattggcattttttaaatgttaaatccattctttggcagtttttagcgtatttttaagtctaaatttcgcaaatattgaattaaatacatttttcggaatttgttaggtttaaaagatatattttggcagtttttattccatattttggtccatatttcgccatttttgagctttttagtccatattttatgtacatatttagcgcttttttagtccatataatttataaccctaatgatgaatattgagtcaacaaatacaatagtaaatctgttttgtaaaattttctatcaagattttaactgaaaaaccaattaaaaaaggtatttttattaaacaattgtcaatgattgatgacattcattgctataaaaataaaacaaggtgctatgacgttactcaaaaggctacccgacttttgggacccgacatttggggattttaataaacaanaaaaaatatttaattttatgtccaaaattagacaaatttacgtctgctttagccagatttaa

SEQ ID NO: 29038 - DNA, 987 bp, Heterodera glycines
cttcgcctcgctcctcttgattctccaactcattaatcacattccttctcatcccctccggctgtaagcacggactttcgaatattgttttctctgctgctctcacacttttcttcgccattcttcggctgctttgccccaggccaattttgcccatcacttttaatcgctcttccttttctctgtccaaggaagtggttgtggccagaaattctcgccatggctcattgtgatcatttcttcggccaattcgcaccaaatcttccttcctccggctttcttcatcattttgctcttccattgatcgctttcctcttggatcaattaccaccaaatcatttccgtcccactcttcgtttataactttttccaccacatattttgccacaaccgggtccaaacccggttttttactcattttgggtatttgctcctcttcctcctcctcttcatcatcttctaatatgacttcgtccacttgttttaacttctctttttccttatttcgcttttccagttcaatttttcgcttgtttgtctcttccaatttcattttcatcatttcaaattcattcaaaagtcgtttttcctctgcacttaactgttcatcgtcgaatggcaccacttcaggcgcttttggtgaatccatgactaaatttgatatgattttggttcagcaaaatttggatcatttttttcgatttttcggcatttttatttaattctgtatcttttgaaatttccgcacttttttctttttgtttttctgtttctgtatttatgtccaatatgctcatgaataaatccccaacagaaatgacattaattcttggtgaattatcccaatcataattttgatcaaattcaaattatcaatgggttttcggaataagttattgttatgtcgcgaattctctcaatttctagaatttgttcgtcaatctcacccaattgttcccaatatatttcacttttcccctcagtttt

SEQ ID NO: 29039 - DNA, 1875 bp, Heterodera glycines
aggaatgagcaaaaattagaataacgttttagaatttcttctaaggttggtctctttttggagaaaaaaacgatttttctgggtacagtttctaaaagaattttttgatttttataagaaagttttataaattgttaaaatttgaaaatatatagaaaattgaaatatagtacatatttttgtatttggtttatttaattctaaacccgttaacaaattgattaaaattttcaatttttgctcagcaaaaaaagttaaaatgcagcgaaattaggaaaatgctctgataatcacctttattaataagatgctgatagtttttgaaaaaatccttaacaaaaatgcaataaaaatgaaaaaaaatgaccccaaaaaattgaaatatttaagtttttcgtgttaataattatttttagtagataattttatttatttatattgtttagatgtaaaattcaaagagtaaataaattgtttaccattaatgcccaatattttaaatttttgaagcagtaattcactctgaattttgtgttactgtgtatttttaataaatataggttttttgtaaattaataaaaattagatactgtactataattatattattattaaaaaggcttataaacgtgtcacacaaaatcccaaaattagtagaataaaaatgaaaataattaaatataaaaatgttaaaaattaatttgttataaataaaaagagaattaaaacagaaatagaaaatttaattaatagacaaaaaaaaaatacaatcaaaaaatgtttagcaaatgccaataaattcaggagttcgaaatttaatttcaaaatttattgagataaatcagggctttctttcaaaaatcaaaataattaaaaaataaaatttatcaaaaattttatcaacaacaaaaactaaaattaataaaaaaaaatgtaaacaagcaataataataaaggaaataataatgtaaaattgtatatttatatttaaaaaagatattaaaattttttaagcgaacaatgcgattattttaccctgtaatgcaaaaaggaagaaataaaaaaaagacaacttctgagtataaatattattaaggatgaaattttaggttctaaaaattgcgaaaataggaaagttttttagttcaaaaacccaaaaatagacaataaaaattgaaaatatgcactaaaaagttccaaacagtcccggtcacggcgagacaaaataagtagggctgcgacatttagtgacgaaaaatctcgaaatctttaactaaaatagtgatgaaaaaagtgcaaaaatagtgacttttagtgatattattttcggccaaaaattaagcaaaaaaattttaaccactgaatatagttggaaaagaggtgcatttcttttctaatagtttcttagcaaatatgaactttttaaatcaaaaaatttgtcaaggaaaaaaattgggggaataatttttaagaaaattttgaaaaaaaaaaatttaaggtcgtttattatgggtgtatttttagaaatttttaaggtcgattcttaggtgaatattttttatttttattgcatttttgttgtgaaattcctaaaaatgtcgaaatagtgacaaaatggatacatttttgaatataggcaattttccaaatttcaaaatttttcttttttaaggataaatttttgagaaaattttgggtaaaacgccaaaataagtgtcaacatatgtttttaaaaatttttttaaggtttctcggcataaaaataaaaaacctaaaaatagtcacttaaatataaagctgttcacaaaaataccacctagcctagtgtataaatttataataaaaaatttataaaaaatgaacactttcacatgc

SEQ ID NO: 29040 - DNA, 950 bp, Heterodera glycines
cttgccagatcggacgggtgcgcatgactttctgaacatctatattatgaaacaaaaaaatcgattttttcaagtgtccgtttgagggtactcaaacatttatggggagcaaaaatccaacgcagaattaaagtacaggctatagggaagctattcccgaaggattcggtctccccataaatctgggcgcatcggttcggggggactgccccgaaaacaaaaaaatcgattttttcaagtgtccgtttggggtactcaaacaattatggggagcaaaaatccaacgcagaattaaagtacaggctatagggaagctattccggaaggattcggtctccccataaatctgggcgcatcggttcggggggactgccccgaaaacaaaaaaatcgattttttcaagtgtccgtttggggtactcaaacaattatggggagcaaaaatccaacgcagaattaaagtacaggctatagggaagctattccggaaggattcggtctccccataaatctgggcgcatcggctcggggggactgccccgaaaacaaaaaaatcgattttttcaagtgtccgtttggggtactcaaacaattatggggagcaaaaatccaacgcagaattaaagtacaggctatagggaagctattccggaaggattcggtctcccataaatctgggcgcatcggctcggggggactgccccgaaacaaaaaaaatcattttttcaagggcccgtttgggggactccaacaattatggggaagaaaaatcccacgcaaaattaaaatacaggctttgggaaagttattcccgaaggaattcggcctccccctaaattttgggggcatccgtttgggggggattggccccaaaaaaaaaaaaaaaaattttttttaggggcccctttgggggagcccaaaaaaatatagggaggaaaaaaacccccccca

SEQ ID NO: 29041 - DNA, 962 bp, Heterodera glycines
  unsure (1)..(962): unsure at all n locations
actttttgtttatatttaattagttttttcattttttaggtgtatatttaataattaataaaaaaattagccaaataattgcattaattaattaatttttttggtgttaaaatttagacgacattaaaggcacatgagcgagtgcatgacataacgcaggtattttaaacttaattttatattttaatttaagcgtattatttatttttccgtaaatttaggcgtaatttaaatttatttattttttttgtaaatttaagccctatttatgcaataaatgcggcgaatcatttcattacatgtgcgagcttgaataccatgcaaaaacccatctgcgtaagcaattttaatatttttaaataatatttaataaaaatttagaacaaaaaggctacaaatgcgagtgtgggcgtacattttaccaagtcagtctgacaatgaacatgggatttatttttcagtatttaatttgaaaaaataataaggaattttattaaaaaaaactattttaaatttattaaattacacttccaaataaatttgtattatgtgaacatataaattataaaggaaaacccatgaaattttatgggcatttagaaaataaaaaaaatttttgaaattctatttttattattaaaatttatctgaaaaatcctagagaaaataacaataggtgctaaaatcaaacaattcttataaatgtaaggacagatgacagaaatcattgataatttaaatgattttccatttgtacttcgccaaaagcggattttgttgaaatcagcttaagtctttatcccaatattttaaattaattttattaataacaaaaaatgctttttagtacacagatttgctctaccataagcatcccggngaggatgaaccgttgccagcggctgtgcccgtgccgtccgcctcattggccgactttagcgctttgacatgtccagctcatc

SEQ ID NO: 29042 - DNA, 1223 bp, Heterodera glycines
aaaaagacggtcacgcgccttaagtcggggggccaaatgcaacgagcgaagcggcggcctttggagggtcagtcaaatcgccccaattaacaaattaagccatttgaaatggagcagaaaagtacacaattggtaaatcatttagatcaaaaacccataaaaatgcactttaggcaattctcaatgacgcttggcaatgatgagtgacacggacagaaaacgtatggcaggcctgctgatcatcggcaacaacggcacactgtcaccaattgtgacgactccggcgccacaaataccggcacagcgcagtaattagtaaacaaaaacaaaaaaattgtctatttaatgaaattagcaccaattaactgttggcattagtttattttcatccttaagtaatttcaaaacggcgccgtaagcgtgcaacgtgcaccacgacaattagctttgatgcgcgccaacttttaaaaagtattttaaaattatttatgcttcgaaatatttattcacggaaaaacaaaaaacggcactttgttaattagctcaaatgatttaattgcggataaatacaacaaattgcagcggaccagcaacacgaatatgggcggacacgcggtgcgactgatcggctggggtaaacaaacatgcactgacgggaccatccaagacttttggatagccgtaaactcgtggaacaccgactggggccaaaagggcattttctacatcgccaaaggcgtggacgaagtcggcatcgaaagaatgggaattttttggggcacgccgaaagtttaagacgaattgattggcatttgatgtattcaaggcgacaaattgagagttttttactttaaatgctaacaaaggaaggtccccaggtgtccgtgggatttccaaatgaaactttgtgggtgcatagagcacccatgggttcttaagaaaaatggtttcaatttctgccaaataagtacgagtgccgagttatgacgtgccaaactttttttatcccaataaattgaataatctattgcactgttttgtgctgtttagtggtgcagaggttgtgttctcacctttactttttccccccacaagttcgaatccctcttaagtaaattaattttttttaattttgcccttgaatacccttttagaaatgtaattattttcatttataatatgcatttatattttttaaatttatttttgaacgaaaaatgcat

SEQ ID NO: 29043 - DNA, 943 bp, Heterodera glycines
tttttcatttcattttaaaattggggaagaaaaaaccccaatttaaactgctaattgtttagtcgaatacatttcgaattaaaaaattattttccaaaaattcacacgcagaagaataattaataagtgaaaattttatgtgtgaaataaggttcggctttaacatttgtaagaaataacggaagaattaattttattaaaataaatatttgtaatttttgatatttttacattttgtcagtatttgataatgacatcagtctgatgagtcattatttggtcgttctgtgcccatcgccgggtgctcacactttcgccgatcaattggcccacaaaatggccgctgatatcactgtgttcgtccggctgatcgaagcggtgccccggggggcaaaatttgacaaaatttggaaagaaaaaaaggaaaaccaaatcatcgatttgtacgacagctttttcgagatggactatagcaacgaatatcgaacacaaatgcattttacgtggaaattgtttgacgctgtccgatcagagctggccgatcttagttttttgatcaacgagaaaaagctgagacagaaatgggacggcatggaaaagcgggcacagcgcgacgccgcggaccaaacagcgagcgacgatggtacagtgccaaccgcgccaattttggtggccaaattacatgcgcaaacgctgcaaaagttggcatttgaaaatgccgaaacggcgaaacggaagacggcagaaatggccaaacatttcagggaaaagctgaagacaggtgaactcataaaaggggggggggggaagcaaacattcggaatttttgcatgtgctaatattggcacaatgacatcaattagtgccaatcatcccgctgattatggcatgggcattttggtgccaaagacctctgacgttataacaactcatacaaaaggca

SEQ ID NO: 29044 - DNA, 1207 bp, Heterodera glycines
  unsure (1)..(1207): unsure at all n locations
gtagagcgcgtctagctcattcgaataacatcaaactggtttgttttgtcacgaaacaacccgctgatgccacgtcgaagaaaagtcncaaaatttgacatccataaaactccattttttcatcggccagcgtgtttaaagcaaacccgaaactgataggaaatttaaattgatcataatagaagtttaatttttatttgtcccatgcattttctgggaaatcttttcgcgaaaagttgaaaaattccaaacggcagacaacagatgcatttcaaacaattcaacaatataatataaaatttaggcaaaaatttttgttccttcctctttggaaatggtcttaaattttgcttgtaaatattcagataacaagttttttttactgaaaattttttacacactacaggatgaaacgcaataaataatgtttgtagacaaaagaaattggcgaaaaaaattgcctcaacaatcagtggtgaaactgaaagaaaaaaacttccccaaaaaatcggagcttttccgacggcatcagctgcatttccaacagttcaacagtataaataaatattaggcaaatgaaaaatttttttccttcctctttagaaagtgtctaaaaatttttgttgttaatattcagaaaacgtgttttttttactgacaatttttttcaagagaaggatatgaacaatcacttataaggctcatgcttggagataaaggaatcggaaaaaaaaattatctcaacaatcagtcgtgaaacagttcaataattcggaagcagtgccatattgggaaaagatgcacaagtagagtaggctcgaaataaaggcaactgccgaagattaacaaaaattcaaatttattggccccgttctgctttgacaggccatatctcgccagggagtggcggtagaccctttgttgatacatttgaaaatgtagagcgcgtctagctcattcgaataacatcaaactggtttgtttttgtcacgaaacaacccgctgatggccacgtcgaagaaaagtcccaaaatttgacatccataaaactccattttttcataggccagcgtgtttaaagcaaacccgaaactgataggaaatttaaattgatcataatagaagtttaatttttatttgtcccatgcattttctgggaaatcttttcgcgaaaagttgaaaaatttcaaaacggcagacaacagat

SEQ ID NO: 29045 - DNA, 589 bp, Heterodera glycines
ttttggaattttgattaaaaattcgaaaaaatttttatagtccattattttagcttagaaatgtcaagccatgtaaatcgacctttttgctcttcaaaagaattttaaggtgcattttttcaaaaaaaaaattgaggacaatggaggggggacgataggcgctgccgggaaaagtttttgaaaatttgagtttgatttgttaacagatttacacgaaaaaatgacaaaattttgctactttgagctacattttagaaaaacatttagcttttttggaaatcttttttgataaaaaagttatgcgagtgttactcaatttcatttgaattttggagtctttttaacagttgaaattgttccaaattttcaaaaatccaaagttctaccttgaaattttgaattaaagacatttcgccaaaaataattattaaatttttcaaattttgggcagtttcgctggcgaaatttaagcccgttttagcctggtcaaattgaccgggcccgggaccgggcttagccatttgaccgggaccgggccgcccggtaaaaagcccgcctggcccccgggcccgtccgggctctagatttt

SEQ ID NO: 29046 - DNA, 1327 bp, Heterodera glycines
taaattgaaagaccacactgggggacccgacatatcatgtccccaaatgccattgtcatcaaatcggtttcttaaattttgggatcctcaaatatcaaatgctcaaaatttttccacaaattaacatgccgctcaatttttgggtgcttttaaaattaaaaaaaaccttttttcaactctcgaaaataaataattcgtgattattaattaattatttaattaattaattattttatttttttacttttttcgttacttctccaaacaaattttcacatttttttgaagcatttttgcttttcttatcccttataacaattttgtaattgccagaaggcgaaacagtacccgcaaaagtcacttcgtttccaagaagtgattctgtttggagcaaaaagaagaaataatataaaattgtccaatacatttaatcaaatctattaaaaattaaaataaaatttctttaaaatataataataaaaattataaatgattttgataggtattagctatttctgcaagttaatatgaaggttttagaaaaggcttttctcaattggaaacaatggaattattttcaattcactcatcacatgcaaatcaatcaatcaatcagccgatggcaaaatgggaaaacgggcattatcaaaaatgtaaattgattttgtattttaattgttatatatgaatatttattttaataacttacatttttacgatttacgaaatgaaagaaaaaaaaattgttaggaaaaggggcgctatttgcttttttctattgttagagcgggaaaatgtcttaacgccggagttttgggagtcactgatttcttggacaaaatggtgagttttatatgaagataaatctcatcagcagagcttatccgcctgcttatactacataaggatttctaaattttgttaaactttgtatttacaagacacggagaaaagcaccaaattttgtagttttatcacaataattaaaagtgcagaaaaaatataaaaactgagagaaaagaaaaaaattggaaaattaaaaaagacaatatctgcgagatttttgacgtcggcgctcaaacatcgatttgatgaggcgaagaggcgaagctgaaataaaaacaaagtcctttcaaaatatgtacataataaagtacaagctaatttcagtgtgttcattcctttgattggttataaaattacaaaatggtaactttttagcccgggaatttaaattgacgggtgcgaaatttgtaaaaattggataaattttcaaaatgttcccagggtgactgtaagcaccgccggactcttaattctcttaatt

SEQ ID NO: 29047 - DNA, 389 bp, Heterodera glycines
cattttgtggttttttgatatgccaatgaggctaaattttcaaaatgaggctttgaggctttttgtggttttttcagaaattttgaggctttttgtggtttttgttaaattttccaaaaaaccacaaaataaagaagtttttaatgaaaatctgctaaaaatatggtcaaaattctcaatttttcccccggcggcgcctatcggcaccgccggaccctaaaaatcctttattttcttaaaatttttgcttaaaattgtaaaatttggccatttttgtgggcaaattctgttaccaaatcacattaaaaattacaaaaattttcccggcggtgcctatcggcatcgccggacccctgttcccccaaaaaattggaagaggcgccgcaaaa

SEQ ID NO: 29048 - DNA, 708 bp, Heterodera glycines
ctgactttgtaattggtaaatatatggtcaatattttctactagctcacatttttgcttttcttttttttttatatatcttcatttttttatcaaaaaaaccatttatgtataaaaattaaaataaactccgatctaaaaaaattaaaaaactcttattgtaaacaggaaaactactgtatttatattttataaattttatacagtttcccttctctaacaattacagtacgcccaatatttcacagtcacctgtgttgcgtctgatttgaatatgtttgatgaattttgtggttttgttgttaaacgcatacgtgcccaacttgagtacctcaacaactgcacgagtggcgatgtcgatttttgccatgtgattttgttaaacagttgtccaccgtacatcacacagaaacacatcaaaatgtacggtagtttaaattatggaaaaacatgaaaaatgggagcggagtcgtcaaaaaattattggcttatactccagggacagtaccaggatttcggcttggggcgagtattggccccgggggcgacgttttacaccacttttttttgcggtgcccttttttaaaagttttgatgaaaatttggcttaatttgttaacagatgttgtcaaaaactcctttttaatccgaaatccaactcgggtaaattatggaactcttgaccttgaaccattcaaaattccgctct

SEQ ID NO: 29049 - DNA, 877 bp, Heterodera glycines
  unsure (1)..(877): unsure at all n locations
attttgcaggctaatagagcatctaaagagctttctcttccttacaacaatgttggatttggttggcaaagaaaaaagctatagccaaaaacgagatgttgtcctgcaacagtcccatgatcgtgacggactccgcgcaaatactctcgcccgttgtctgcgcatcggaagtcgcgtcgtcataagcctgtaaaagttcgtgcggtttcgtatcagcgacctctaaaagggtgccatgtaatcccgacactgggtaataatttttgaaaaattcaaaaaaatctctccaaccaattcgatcaatttgaatcgcttcacagcctaggtagcgaagctcaagaagcgcgaaggatataggtagcgggctgaaattttgcatacgtatgcaccctgggacggggcattcgggaaaaatacggattttccggtccggttgccaactgagtaccaggggcttatttcacacttttgcttgcgtttgaaggcccataacttttttcggattttaagttgaagtgttgactaaaatacaaaaaaaaattcagacctctacctataataggaagggctgcagaaattggcaacttttcagtaccaactttgtccaattcagtccccgtcgaataactcattaagctttgatctgagcgggggggnngggggtggccagtagacttattatagagctcaatgagctcgatttttcaaattttaaatttcgaaaattttcaaaattttcgagttaggcctaaaagtatgttttacagcagagatgtgcaggaaaatcatggcatataaaagcacaaatggaaagatgccaaaaaccattcatcaccaaaaatccaaaattaacactaaatttctatttttgcgcccc

SEQ ID NO: 29050 - DNA, 679 bp, Heterodera glycines
tctgtttctcttcactttctcttcctcttcactttctgttcctcttccactttctgttcctcttccactttctgctcctcttcgagtttctgttgctcttcttctcttccactttctgttcctcttccactttctcttcctctttctgttgctcttcttctcttccactttctgttcctcttccactttctcttccactttctgtttctcttcttctcttccgctttctgttcctcttccactttctcttccacgttctgtttctcttccactttctcttcctcttccactttctgttcctcttccactttctcttccactttctgttcctcttccactttctcttccactttctgctcctcttccactttctgttgctcttcttctcttccactttctgatcctattccactttatcttccactttctgatgctcttcttctcttccactctctgttcctattccacattatcttccactttctgttgctcttcctctcttccactttctgttcctattccactctatcttccactttctgttgctcttcttctcttccactttctgttcctcttccactttctcttccacgttctgtttctctttcactttctgtttctctttcactttctgttcctctttcactttctcttccactttctgtttctctttcacttt

SEQ ID NO: 29051 - DNA, 788 bp, Heterodera glycines
tgccaatcaaatgagtgaatgaaatttgagtttacatatttgtggattttgaaaaaaagttgatgatccatatcaaaaaattaaaccaaaagctttgtcggaggtgctactgtaggttgtgtaataacacagacaacaactgtgggatcatggaccgctctcttagtattgtacaaatcaaagaatcattgcctaaaataccgtaccccaacacacccttcccgaaaatacacagtaagctccaccagtctctgggtgttagatcactacattattttttatttttcataatcacttactcacataaaaagtcaaatgaaaaagtcctataattaatacagtagtctatcttaacatcgaaaattactgtataatgttatattgaggcctattaagcatcctcccatacactgtcgcgccgtattgcgcacactatgcgcaaaaaattcagcgccgcggcacatcacagcagcggcacaaagtgtccgtctgtgcgatgaccgtggattttttttattgtgccccgaggcgcgctgcgcggcggtgaaagttgtcccacgcatgcataattttgatggggtgcaacaaaaaaaaattaggaagaatgtctcgcgctcacatcttttcttccatctttcagcactctctttctctactttcctctctcccgtttttcagcactatttctctctaagcgcctccgccctttttctctccctctctctttgtctcacattattcagtgttttctatctcgctctcatcctctctcaaacatactcatatgc

SEQ ID NO: 29052 - DNA, 803 bp, Heterodera glycines
ataactggaaaattaacaaattttacacataaaattggcctttcagatctattccgactttctcaaggacaaatgtgccaaaacttgtggccattgcttatccgaagaagacaaagttcggcttgagaatgattacggcagtgacagcagcaatagcgaagattatgaccaaccctttgaatctgttcgacgcattcgaaatcgtccttcagctgctccccccgccggcgggcagaaaaattcagcggacaatggcactaccgttgcccaaagggccaagggtacggtatttcaataataaaaaaaaagtcaaaatcatttgcaattaattgtgattttttggttcaatttatcatttttcagaaggctcttcaaagcgaagcaaatcaagtggaaaattttccgagcgaattatcatagaaattgggggcggtgatcaaaaagaacacatcgaattgcgggggaaactcggcgaagcattacggtactaaaaacaaaaagatttaaaatcgaaaaacaaaattttaaaaaataaattaaattatatcaaattaacaaaaaaaaaatttaattaattgagcaaaattttaaagaatttcgcgagagattttgttggagaatgacgaagaaaatgatgatgaacaagcggagaagaagaagagaaagcggcagaagaaaaagcaaaggaatttgagtccgcttttggtgattttggaaaaagcgcaaccgaacgaagccgaagaaacatttccggaagaaatgggaatatttccggaaggacggaagcgaaatgggaccgaaat

SEQ ID NO: 29053 - DNA, 977 bp, Heterodera glycines
  unsure (1)..(977): unsure at all n locations
tgatttcccgcaaggaaacgttggcacaaaaatgatacctgcccatttttgtgtatatatatatatatatatatatatatcagggatgaaacggaattccttttcgacatttttggcgtcgtaattccggtttcctaaataattgggaatcaaattctgattccaaaacttaaagtcggaaattttcgacaaaaaattaatataaaaaaaaaactatgagtgattctagtcagatctggtcctttttatggtattttgtacctatttcaccatttacgaagacttttttaaaaaataatcatttataaaaaatttatttacatattttctgattttttgtaaatatttcgggatttttcttacataatatgtacatgttttaccatttttatttttgacagccctagttatgaacataatttttatgctataataagaattttcttagaataacatttgattgagaaaatataatctggtcagaacataatgtttctggtcggatttgtgctgagtcggaccgaaatctgggtcgagatttggtatcgaaaaacgcttttcatgactcgggattctgacgacaaattggtctgcaccctttgaattttatttgggttctgatttggaatcgtttgcctgtggcaaattttgtgatttattgttttccggaattttctagaaaattgtggtgcatgttgggctttctcagcggcccttgttcattcaactgcggtttttgaaagccgagtcggtgacccggatcgtctttacctgttttctgcgcaatgcctggttgattgtaccgttcgtgaggagccttatgaaggatgcaaaggagttgctgttatggacgcatnntgagtaaccaatttttaactattttgtaaatgnngataactataaaaggtgtctttgaattacatggttttgcgtcccggattttcatatccaaattttgtggcgactgattcctgaaa

SEQ ID NO: 29054 - DNA, 1309 bp, Heterodera glycines
  unsure (1)..(1309): unsure at all n locations
aatataatccaaatagctcagtttttcaatataataataaactaatanatagtctctgatcgatcatcaacaaatgaatgaatattaaaaaatcaaaaaaagcaaattccatttttaaattttctatttgtacaatgcttttacatttattttattataattttataaattaaaatattcatcctttaaaaattagttgagatggaatgcaaaaatttcatatttttaagcaccccttaaatttcacataattttcacgttatataattgaaaatcatctttttatagttttttttatttctattattttaagctaattaattgattttgaaggctaaatatttttaatcatttacataaaacacatcccaaacagcccaatttttaaatataataaacgaataaatgagcgaatattaaaaaataaagtaattgccattttttaataaaaattttccatttttggtaatgcttttacatttgtttttttataattaaaaaacatttgttcttttaataattggttattaatccaaatatttcacttttttcctgtcatataattgaaattcgccttttaaaggctatccaattacattaagccaagaactcaaaatttacattcctaatgtcctgacaattttttttttaattttttgatttatttgtccatctacgacatttcacaaacattaataaaaaatatttcctaaaagttaatatgtgaaattcttggaaatgatagtttttaaaataattttatttttattttcttgtgattctcgttttttgagcgcatttttctaaatgatcatttggttcagtaattcgtcagccagatattaatttttaatatactttaattgaaagatcattaagttcaattccaaagttttagtttgtttgcccaaatatttcatttaaataatttatttttattttttaatagactttaattgaaagatcattaagttcaattccaaagttttagtttgtttgcccaaatatttcatttaaataatttatttttattttttaatatactttaattgaaagatcattaagttcaattccaaagttttagtttgtttgcccaaatatttcatttaaataatttatttttattttttaatagactttaattgaaagatcattaagttcaattccaaagttttagtttgtttgcccaaatatttcatttaaataatttatttttattttttaatatactttaattgaaagatcattaagttcaattccaaagttttagtttgtttgcccaaatatttcatttanataatttattttt

SEQ ID NO: 29055 - DNA, 1459 bp, Heterodera glycines
  unsure (1)..(1459): unsure at all n locations
aaaatattatnaattttgaannttaattttgaaagaatttntantaaatttattttanaaaattataattaagtgactaaaaatttttaataaattaaaaaaaacttttaggttgccgcacagttcaaaatgcaaagaaaaacatttaaagatattcatttacaattttttttgaattttttcacgaattacgccaataatgagttcgggttggcaatgattttgcgcaaaaaccgggcgcaatttcacgccttcgccatttgttaggcgcagaaatagacaatttttggtggaaaaatgaatacatttttcgtcaacaattgataaattggaactgtaatttttattaaaaaaattatttaaattttaatttattaattagacatttatatatccataataatattaaaattaattaataatttcccttattttatttttccacgacaaaacacgtctattggaacattaccacagtactctgatatcaaatgaccttcctggtgatcagatacggttgaagcatcgtttatcagcagatcttacggtattttgctttttcctaagtcagagtggtccattttcaaataaaaaaaagaatttaattaaaatttgaaataaaaattttttatttgcaattaaaaagtttgaaatttttgttacaaatgtcgaaaaaaaactcttcctcaagtattttggtgaaatttttgaacaatttaacaaaaattaatcagacggtccatttttgaaaaattgaggaaaacttgaaaattcaaaaaaattttttgtattatttgcaatggaaaaaatttgaaatttttagataaaatgcctaaaataacatcatgcattttagtcatattttgggatataattttgattgatccacccaaatttcaggtgtggatgtgccgttttgaacatctgttgagcctccaattgcccgcagttaggcaggaaatagagaaaatttggctgttcttccggtgttactatgacatcatcagcgattttgagccgccgattagcacggaaattgattggcctttagcggctgccacaaaggaattaattttgagtaattaattagtgaatttattactttataaattaatcaataaaaaatatcggaaatacgtcaagggaaatggagttgatagaaattttaatttagtatttattacatcatttttgggtaaaaaaaagtgatttaaaccgtttaaaaaccctaaattttgaaaaatggcgccaagacaagaaacagtaagaaagctttaatgggattactgtaagaagcccctctattatttataggtttttaaatttaattattgttttttttgcaaaaaatatgcagtaaatcaatttaatttccaagagccattatcatctattattttaaaaatgatttttaaatatgggaatgatgtaatattcctaatttaaattaaaaataaat

SEQ ID NO: 29056 - DNA, 774 bp, Heterodera glycines
aggggagggcggtgtcaagtgttcttgtgcctcgacatttttgccgcccagcaaaattgaacatttgcgccgttcatccaaaaatatatttttcaaatattgttatcattttcaacatattttcctcaatctactacgcgacaacaaaaatttgattaataaacgaaatactaaaaaactaatcacaatgattgatatctgtacgagttgccattgccattggccgggacttgcgcattcgcaattttgtccattacattttaataatgattttcatgatcaggctgttcggcgtgtgcatgtgaccctaacggcgtgaacattgacccaagcacgggtgaaccatatttgaaggttggtttcctttttactatttcagtgacccccaaaaacattcgtctgatacttttttataccatctgccggtgcttttaattgatgcaaattaaattacaaaataatttttgttttttaagtgtaacgacattgatggacaatgccattgcaagcaaggaagagggggacgaacttgcgcggattgccaagacttttattggggtgcagtttgaaaaaaaaaacttaatttttactgcatcgttgggtcggattttgtcaacttttttttaggtaatccatttgctggggaatgtatgtcatgcgaatgcgacaccgacgggtcgcaaacgctgcagtgcgatcggcagacggggcactgcgtgtgcaaaccgggcagcggaggcccaaagtgtaaccattgcgcccgagggtgaacat

SEQ ID NO: 29057 - DNA, 1158 bp, Heterodera glycines
agcttctccacgggctgagagagaccgccaagagcactttcgtcaacagtttgacgaagcggaagtactgcaggaacaactacaaaaccaagaagagctgcagaatgatgagaatgtggacccgcaactgcatcagcaacgtgcagcacagcaggcgcaatatgaacgtctcgtgcgtttacaattgcgagagtcccgccgttttcgaagcggggtcgcttcgtcagttctcgtcccccctcccttgttttgggagggggactgtgtcatttgcactaatgcacgtgcaaacttttacaacattcgctgtgggcatgtgtgcctctgcgctgattgcgcagttgctgccgtaatccagcgaattactgtttgtgttttgtgccgtgctccagttaatggcatatacccatatgtccgttaactggagcacggacggatattgtgttagtacatatttaaattaattgcgaataattttggcaaaacaaaaaaatttttttgtaattgacttttttttttaacactaacacaacatttatcagtatatgtttgagaccatccacttaatcctttttattatcgatcacttaattcattaacctaatcatcttatgtaaacctttttttttaattggacgacattttctaacctttgcattattatctcaataaagacccgtaaagttcaaaaagtttaataaaaaacgtgtgaaattaagttaattgagtgaaaaaatttaaaaaaaaaacaaatggttaaatcagccaccccgtgacacttccgtttaatttttggaaatacaaaatgaaaatttaaaaaatttttgtgccattttttgttgttgttcgccatctgcttcctccgcacttttcctcctttttctactcttcgttcaatccttctcgcactttgaacgcttcaaacaatgcatttgcctgaatttttaaatatttttggtcaggcttatcaaaacacagaaacgaggaaatgtgtgagagagagagagagagagaaatgagatgcaaaaaacaatagggggaccaacacggaggaaggcctgcctaccgcttttcacagctccgaaataagcattgaagggggggaccaacacgagggaaaggctacccatcaacacccagactttatgaaatgtgaga

SEQ ID NO: 29058 - DNA, 1238 bp, Heterodera glycines
  unsure (1)..(1238): unsure at all n locations
caaaacagaattgggaatattactgatgctattacgagatgaattaattttgttgtcacgttaatatcttggatactataanccctatcaaatttntagttaagttgtatnttatattatatattaaaaaggaaaggaagcgaaaaaatgttttttataataaaaattcggaatttttcggcgctttttggcactgcgacgttttgtcccgacgacgtttcagcaacgacgttttgttcttctccgctcaaaataataaatgaaagtgggaattttggaattctctccctccttccggttaggcctgcttaagtgtttaattcttgaggtcattgctgttcatggctttaccaaacgtgaaatgctcgagctcaaatatatggttcggatgattggtgctcgcttcagtgttgccattgaacagaaaagcgattttttggtcgtcaataaaaggtgcgtttcttttacacatttgaaatttcaatgcaccaatttctcgtgcagtgttttcactgaaaatttgtgccaattggctgcaagagttggcactgttttggtgaatttccaatggcttcttgagctgtatttcggctcgatcatttgtctaacttcacccgaccatcaacgcttttctccccagaatgaaaatgcttcactcactgcttcatcttgctctcctcttgcactgtcgaaagtgtgcgaagtgtgtcataaattattgggtaacaaaactcactttttgtagtttctttagtaaattaaggttttttagctccttggagtcattcgccgatttcattaaatcaagaaattattcgattggctcatgaaatgaaatacaacttaaaaaatgacatcgccattttcccggaaaagcaatttaggtgagttagggaaaagaaaacagtgttacaattttggcagaatctccaacaaagcgcctactgaaaaacaaatcgaagcggctattgacgtttatgcaaattcgggaaacaagcctaaagtattagcaatttttcaatatagaaaacctaattaatggtttttatgttcagtatgccattcttttcgaaggttttttccccgaccaaattgactgtctttcaaaaaaagcgcgttttcttggtgctgatatcgtttcttctgttgcgttgtgtacacattttgtgacttcgagtttataccggacgtttgacattttctttcctttcacttaattaaatttgctgcttaagtgt

SEQ ID NO: 29059 - DNA, 1114 bp, Heterodera glycines
  unsure (1)..(1114): unsure at all n locations
aattattatcacatcgaaattcacttctgctggagataagaaacgcccaaaatatcaatcaaatggcaaaaaagggcaccgccaccaaaggaaaagccaaaggaaaagccaaagcaaaataaaaaacaaatgccttttccgtcggccatttgcgaaggcaattcgctcttttggtccaaaagaaatgaatcggtcagcatttttccgcctccgtccgccgtcgaattttgggaggcgttgtgatcaccgccaaccgcggaagaatcggaagagttgggactgaacaacggaggttggccggacgaagacggtggtgaggcggcatcgaaagggagggggaggacggacacctgcgaaagtgcagaaaaagtgatgagtcattgggtggcgcaaatgcgaaaggacaaaatgatatcatcgggggaagaagagcatttttgaaacttccaaacagagcgagacatacccatcaataaatttgaaattgcaaataattttatgatcggttaattaattaattaattgtccatttcccccgtccttcaccaccgaatggtccctttgctgatgatgattgttgtgcaaaagctgttgcatttgtgcggtggtcgtctgcatttcacaaattgggagacccaaaaagaaaagggaggggaggaaaagcgaagtgatcagcaacaggagagaatggagcaaaattaggacattggcaaatgactgaaagggacgaacgacggacactaattgttggacagaattgctgatcgatcagaaatatggacggaaatgccatccataaagggaggatgcggtaaaagcaaatccctttgaaggtgaagtgaaaaggaaggccccatgaaaaacgcgaagcacgagatatttaggtaagacttggactcagcccacccgaaaaaatgacatgaatttgttataaaactgcttgatattgaatattattcacgaaaatgtatgagaaagtgacgatatatagtgaaaatttttttttatcaacatttgaaatttttcaaaaaacgtcatttttgagtgaatttatcaagaaatatgctgttaggtatctatttaaaactgtatttttagctaataatngggtgat

SEQ ID NO: 29060 - DNA, 302 bp, Heterodera glycines
gaaccccgtgggcgggggtgcctttcgcgggggcggaggattgcgggggtcagagtcgcggggccgggggcggggtgagcaaatgactcgcccccggggacgggggcgggggtttgcttttaattagcttcaaaaaatctcacaaaaattaatttttttgaatgatgtgtttggctccacattcctttagtctatgtatcgcctcgatttaattctttttggtataattgcacagatattgtctaaaaatgaccaaatttagggaataaattatgccaaatagtcaattttatgggtgtttt

SEQ ID NO: 29061 - DNA, 1137 bp, Heterodera glycines
caaaaaagtgttcgaaaaaaagagatagtcgtttttacatacgattatgaacagaaagaccgtaaatgactctgaagcgtccataggccggagaccacaactatatacgcattataaaaaggaaatgacagaagcctcgaatgttagttatattgcgtgtcacaaaatctcttcctgaaaaaattttcaaaaaagtgttccgaaaaaaagagatagtcgtttttacatacgaatattgaaaagaaggcgtaaatggctctgaagcgtccataggccgcagaccacaaagtaaaatgggacaacattcataaaaaaaggttggcctcaaaagggcccattcccaagctaatttcggaatttgctgataaaatcaaatagcctaaattatatacgcattataaaaaggaaatgacagaagcctcgaatgttagttatattgcgtgtcacaaaatctctttcctaaaaaaattttcaaaaaagtgttccgaaaaaaagagatagtcgtttttacatacgattattgaaaagaaggcgtaaatggctctgaatcgtttttacatacgattattgaaaagaaggcgtaaatggctctgaagcgtccataggccggagaccacaacgtaaaatgggacaacattcataaaaaaaggttggcctcaaaagggccattcccaagctaatttcggaatttgctgataaaatcaaatagcctaaattatatacgcattataaaaaggaaatgacagaagcctcgaatgttagttatattgcgtgtcacaaaatctcttcctgaaaaaattttcaaaaaagtgttccgaaaaaaagagatagtcgtttttacatacgaatattgaaaagaaggcgtaaatggctctgaagcgtccataggccgcagaccacaaagtaaaatgggacaacattcataaaaaaagggtgggctcaaaagggcccattcccaagctaatttcggaatttggtgataaaatcaaatagcctaaattatatacgcattataaaaaggaaatgacagaagactccaatggtagttatattgggtggcaccaaatctcttcccgaaaaaaatttccaaaaagtggtcccaaaaaaagaaaaagtccgttttacctaccaatattg

SEQ ID NO: 29062 - DNA, 1374 bp, Heterodera glycines
tgaaaatggccaacggaaaaaattcaaattcgacatcacctccgtattccatcgataaaacgactacggtagcgaaggatgataatgtaaataatgccgaagcagatgatgtcaatgaactacaaaattcaatgagcaaaaccacttcggtagagatggataaagacgatgatggaaatagtgcggcatcggacactgacaatgtagtacagcaaatttcaaactcgtcaccatcgtattccatggaaaaaacgaatactgtagagacggatgctgttgagaatgatgatgacgaaagtaatgcggcagcggaaactgacgatgtagtaccgtattccatggacaaaacgacgacggtagcgacggatgataatgagagttacgccgaagcgaatgatgctaatgaaccaccatactcaatgaacaaaaccattacggtagagatggataaagacgatgatggaaatagtacggcatcggacactgacaatgtagtacagcaaatttcaaactcgtcaccaccgtattccatggaaaaaacgaatactgtagagacggatgatgatgaaaatgggcagcaagagaatggtggaaatgcaaatggtggtagaaaacagaacacatcatccataagcatcagcagcagcagaagaattacaacacacaatgaatttgatgatgaattacagaacatccaaaagtcgaatggttgcgataccaatgagaatggagataataatgatggaatacggtatgaaaaaaagagttggatgacaactgagaaaaaatcttccaatattggtggaacaaatgataatgatgatgacggaaatgatggacggaagaggaagagcaaatggacaaaaaaggcatggaaatggaggaatgaagatgatgatgaagaggaggaagatgatgacgaaaatgaacaggaggaagaagaagaaattgttcagcgcaaaacaggtattagaaaaaagtgaaaatttaaattttcgaaatttagtaagccaagaaaaatgaaaaaatgggataaccgggattagaaattttttaaatcttcaaatgtgtataggattagaaaaattagaaaattgggaaaaagtgaaaaactttatactgaaagttagaattttaattgtgaattagcagggaatagatgttgaaatttataaaaaaaatttttttttgtcagaaatttccgaaaaaaatgatggaagaaaatggaagaaatcatggcaaatgtcttgggaagaagaaaatgatgaagatgaagaggaggaggaggaggaggaaaattataatgggaagaaggaggaagatgatgaagaagaaatgtttgaagagaacggtacaaaattaatgtttaataat

SEQ ID NO: 29063 - DNA, 1075 bp, Heterodera glycines
  unsure (1)..(1075): unsure at all n locations
gtcacgaatgtcgaattttcggtcagtagttacccgaacacatgattttggcattttggaaggcaaaattgcaattagttcttccccttttataggaaaaggacgaatttgggatggaagtgcggcgcaacggacggccaatgcccgtggagtatttactcgtcgacgtcccctgcggcgtccgtttgcaagaagtgcacaaattcactgttccggagtcagccgacgaaacgtttcccatcgaaaatcgcacaatcgtcgaccaacaccaggcgagagattccattagtttagttttgctccatgaaatttttgtagaatttgcgcgacttggccaagtacgtcagtgcctttgacttgcccgatcagtttctcaccatggcctccgacttccatttcctcctctttctgttcaccaaccatcacgtggaattcagcgtggccgagttgaagtcgctggtggcgtcggtgcgcaaaagcgacgcccaaggggcgaaagaatgggcagagcgaagtgaaaattggggcacgttgcttttgctgagtcaaagcggaggtaagtgaccgacagaggccgacgcggttaatagtgccgatggtacccccccccctttttgaaaaaagaaatttttttcgagaaaagattgtatcaggggttttaagggctgcagaatccaaatctgacattattttcgacctattcgaaccccgaacccgggttcgggcaaaaagtcgaaaattcaaattttcgatttcgcattttttgtctaaaaatggtttaaatgatctttaaccctgaaactatctttaagggatcggcggacattcgccgaccgcaccagtcagcgaaagtgacgccggcagttggaactgtcaacactgcacaatgctaaacccacggcagagaaacgattgttcggtgtgcggcctgcccaaagcaaactaacattgaacgcgggatgaaaagatcgatcacaatgatcgctcggattatatgctgnggtatcgcgtgaatattatagtttcgggtccaaaacaacggagccatttcccagcaactggccacaacacctca

SEQ ID NO: 29064 - DNA, 1398 bp, Heterodera glycines
atgtgtgtttataccgcatcttctaattcatatgtattattatatgtgattatactattccttatacaatttaacattaaaaaaatactattataaatataatatgtctcggacctgaatgccatcgttaattggtgccgacggagagcaatatctgtagggtatagcgccttcgccaggcaccggcacaagttgtggaggacaatctaagttaattttttcctaatatttactgaaaatgaaataatttcataatgaaaatgaatgtatggcactataaatgtttttttcaatttatgatattaaaaagaacgttataacgatttctatttaaaaaaatctctatttaatatattaggaaaatgaattagggtatttgaaattgataattattctaaaattcattcacttaattaacattgatataatcattttcctatatgtcacctatttactgtttttgtctatgcttacaaaacatggcataactttgattaaaggcaatcaaattttacattcttggtacctttcgatagcccatctttttctctattagcttgcttaagttcaaataaaattaccaaatttaacatagttatggcagaaatagtactttttttcatgcaacttttccaaagttgaccaatttttttttgaattatgcaggctaatagagaaaaaacttggctatcgaatgataccaagaatgtaaaatttgattacctttaagcaaaagttatgtcatttttcgtcgaaaaactaaattggcggatttatcaaacgacctagcaccacatttttccatacatcccgtgtcgatgctgctttccggcgaacggcaacaataaaacgcgttcactgatgacgttgtagtggaaaaccaacagaagaaatttccaggacaagagccatccacgtctatcagaaaaacatttcattttgtttcgcataagactgcgattttattgttttgagcgaaattaaattctctgacattttaattaataccaattatttttaatgcttcagaagaggcaaataaatatgtgcacatacctatgttcaaattctgggcatttcgcccttattccggcatttttgaagaattaattaccaaaattcaattaaaaaatgcaccgattatgtccgacctcttaaaaaattcttcaaaaacttggaaaaagcaacaaaaattttgagatttttggacaaaatacaattaaaaattctttttaatgattgaactaaaaatgaaaaacaagttgaaagttgaattttgtaattaaactctttttttattaaaaaaaaaatgaatttaaaattcttttgtaattaaaatatatcacttggagtgcaatgcataggctgtagtgacaatgcggaaatgaacggtgaaga

SEQ ID NO: 29065 - DNA, 1870 bp, Heterodera glycines
ggggacctctagagctattgattccctctcattctttggtcaatttgtcctttgcactgtgcgaatgggagagcagcgtggacgagctgcacccgagcgacccgcgctaccgacgctatatgatggcacggacgatgctattggcacggcatcgacggcgaagcaaaaggaatagggacgaagttgcgagagaggagccgaaggaggaggaaaaagccgaaggggaggacgaaatgaccgagtttggccagaatctgctactgacggacaatgaagaagaagaagggcacacgacgacggcgaaaacgaagcaaaaaaagacggcccaaaggacggaggaacagccgccgcaggggggacggacggtgctgcgaagttggcacaattgggtgggccgataccgaaacagactgaccggcatttcacagtcgggcaagtttttgttgagggggcggggggggcgagtcggaactaggggtaagtaacccgcaagcgaaaaaattgaggaaatgcagaatgatgtcccatttatgatcaagaccaatgcaaaaacagatttaaaatacgacagattaagtcaaaaaatggatttaccaattcagaagtgttttcgacgagaaatcaacgcttcgctgcttcgtatttaaagcccggccagcgctccacgctgaccggccgccttttgagcggggacagggccaccgtccgtttcaaagcttgggaagcgaccaggcaattaatcaattgtttgattggcatcattaaatgcctgaatgcttattaggtctctccaattgcgagtgtgctgtgatcggactgatcgagaagagaattgtgtgtttgccaccgaattgggcgtgaagcgttcgagccgaaaatggacggactatttggccacgtgtccccagggcacaaaaaaggtcaaatttcttttgcatttttctaaggcatcagctgggtgtttgccattattcattcatttgataattaatttcagatcattttcgagtgtagcaaccagggacccttcccaggggcgtgcggagtggacaacattcagctggtcaatgcttactggccatccggtacttcgatgaaagcaaaccgaaaattataaaaaaaagaaaagtgaaatatttaccggtggtaccaaatatggtaattattggttaattgctacaaaaatccaagatattaaatgcataagtgataacaattaaaattccaaagcttctatttatagttttcgtttgtgaatcataaattaattttttgagtatttgtctgtattacgccactgtcccctattttggagaaattctctaatttggagacatttttcattaaataaaattttccaagatacaactaattagtaagtataatttgttttcctgtcggtccacaattttcaaaccataaaggacaaaacaaattgccggggtcaaagaatggcggcgatgacactcaaatggcacccacacatttgctgctgttcatgggccaatttattctgtgtgatttctgtttcattactcattcattcattcgtcattaatgatttctctgagtcattgctaagaaacaaatgaaaaatggaaaaacggacgttattttattttattaactaacaagcctttcaaatgggaagcaaaaagcacaacaaattaacggtaaatgaacggcaaaagtaaatttaacttactttttaatttagacacttttatttgctctaataacttttacgattgtaacttctcagaatgcgacaaatgtaggaaaaatatcattcagacattttttaaatatatttaattaaaatatattgaatttgtctaagggcagtgacagtaattgtccatcattgttt

SEQ ID NO: 29066 - DNA, 2101 bp, Heterodera glycines
  unsure (1)..(2101): unsure at all n locations
cagcgtgcttacggtagagaaaaaaaaaaattttcctacagtatttttcgcaaattttccatataaattttgnaaaatttntaatattataaaatatttaaattaacagttgtccttgcccgcatccgattgaaagcaacaattttgctacctcatgtgtcgtttctgagcgaggtagccttgtaaagattttttttttgagaatttcttatcccctatcgcacgctttaggcattctgcaacactgcgcgtgccgtgagggctacgcgggcgaacgctgcgagctgtgcgcgcctggattttttggcgacccattggtgccaaacggcgagtgtaaacgctgtgattgtaacaacaacaacgacctgagcaatcctggtaaaatttttattttttaaaagaattttttaaattttttcaaccctcaggcgcttgcaatccgcggactggcgactgcgcgctgtgcgaaggcaacacggacgggcgccactgcgagtactgtaaagcatggtaagtacggtggataaagtacggtcgatgtgaaaatttattaaaatttttaaaatcaagactaagttttcataaaaaataatttatgctcaagagctttcgaattttcctagaaatttttctgcaaaacttttagtcattaattttaaaatcgtaaatttctccataaaaaacgaaaaaaatttcaggaattttcaaattaaaaaatatttcaatttctttttagctaacttcaaaatttcttacccttaataaaaaatctaaaaaaatttaatgtaattttttcaataggtattggggagacgcggtgcatgcaaagaattgttcgttgtgcgcgtgcaaccaatgcggcgccgcgtactgcgatgggcaaaacgcgcactgcgagtgccagccccgtgtgaccggtccattgtgcgatcgctgtgaagaaaatgcatggggctttgactcgtgcaagggctgcacgccgtgccagtgcgggttggccgcgtccaactcgcagtgcgacctgaagaacggccaatgcgcgtgcatgcctggtgcaggtgcagccaacaaaaaaaaaactatttttggaaattttttttttatacgaaaattttcaaaagctggccaattttgtgatcaatgtgcgcatggcttttggaaatatggggcccatgggtgccaaaaatgtgactgtgaagcggacttgtccatgggcacggtgtgcgatgtgcagacgggccaatgccattgccaggagggggcaaccggtgggcgaatgttgttgaaaaaattgaaaataaatatttaaaaataattaattttattttttatttttttctgtttttgggcaaacattttctataattaaatattttttattggattttatattcaaattattttattaaatatttttgtcatattattttattaatttaaatgttaataaaatattgttttataagttactataactatatatttttttaaaatgcaaaacttttttaaatggttgggcaagtattattttaaataatttttaaacaaataattatttttaaattaattctacactaaaatatttttgcgttaataatttttaatttttgaaaatatatttatttatttatttttttttaatgttgaataaaactaaaaaaaacattttctattcttttaaaagaaaaaatatgtagtaaaataatttattttttggtgttaaggtcctcgctgtgacaaatgtctaccagggtatttgcgtgtgccaaactttgggtgccgtttctgcgacgaatgcgtttatgctttggtaattttttttttttcaaatttcaaaagaattatcgtttttttcaaaaaattacacattcattattaaaggattttaattttttaaataaaatttctctgcattttcgaaacaaaaaaaaagtccccaaattatttgcctagaattaggtttctacaatcaaaaattctcaatttttcataactaaaatttcaaaaaaatatattctcagctactctacctgtaattttatgtgattttaatgattctttaacaaaaaatttcccangctccangcactgatgcgatgaa

SEQ ID NO: 29067 - DNA, 1339 bp, Heterodera glycines
aaaaaaaagcgaaatgcgaaaaagtaaaatatgcgaaaatgcgaagggcgaaatgcgaaagcgaaatttttttctgcaacttttttaatagttaaaatcataaagcaaaaaattattttttttaattttattccaaatttaaaaatcaataaaccgcttttttgaggcgtgctttttccaaaaaaactttttgggaagagggggcaggccgtcgcggcaggtgccgccgggaaaatttgattaaaatttgttgacagattttcactaaaaaatgatcaaattttgtgatttttatcatttttctaatgagaaatgagttttggggcgccgctgagaacagtttttcatcaaattaccaaattttgcgattttgggccattttctaagaaaaaataggagttttgggggcgcggcggtgccgataggcgccgccggggaaaaaattggaaattttgatcatttataaacaggttttcactgaaaattaatttccaataatgaacaattaaacaacggggatattttatttatacttgtagttaacaattaaattttttttaaacaaataaaaaatattaaaagtaatcatttgtaaataaatctcaataaaaattttgaaattttttcagctatgcctattcaaaaatattcttttggatgaatttcacatgaatttattttggtgacataaaaacatataaaaatatttatgatttctatttccgctttattttaagttttggagggtaatcatcacaagtaaaagcagtgtaaagcaaaaaataaaaaaataaattaccccatttaattacttcattcattcatttgcttggaggaagccacgccatatgtttttgtatataatataatttacatataatatatgcgcatatgtggatatattctagcaatcttttataaaaataaataaaaatatccatattattattattataacatgtaaaaacccacaaaaataatgcataaaaaaagccataaatttattattattatattcaacacattgcttctttttcattcatttttcttatttagtctctcaaatcaaaccaaacaaaaacaaaaaaatgcttaataattttattttctgcgcttttttcctctgctttttgcatcgttttccacttggttctgctgctaatgatgaaattgatgaagcaatgcccgggtttggtgaagaaaatgctgaagaaccaaaggcaagcggagcaattccgacggacaaaaaagccgaaaaagaaacatttgcaagtaaaaaaccacagaaaatggccagaaaaatggcacgcctccaaaagttcgcttcacttgttgagtt

SEQ ID NO: 29068 - DNA, 1608 bp, Heterodera glycines
tgaaattgcgcacgtcgctaagaattgtggaaatgaactgctgtaaaagcgcatcagcaatttgggcgaaggagaccagcaaaacgtcacaagccttaaaatgaacaaataatggaaatattgctctgtttttattttattcaatatttccatcaatatatttttttcgtaagtattatttaaatatttttggcatttcgcattaatattgattgcactaacagcgcttttgtgcggcacaaattccaatcgcacaaattttgtgttcagtgcggccatttcttcggcgcaaaactgaggcatccgatcacgaaattggcgacgcttaaagaacaaaatctgttagtggaaattgtttaatcttaatttttaatccgcgactttgtttgctcgaaatgcctttggaagaggctcgagagtttcgttctcgacttgagacaattttagttttttcattacttttttatttaatttttttttgctcacaatttttcggaatggcaaatgcgccacgaaacgtttttgatcaagcagtaaaactatttgtatggaaacgaagccattatcgttgggctgcacaaagaaatgggcgagtaaaaattcatcggggcctttttgatagtttcgaggaccaagtggcaatttgtaaagaggcatactcttgttgaacttgcaataacgaccttcgaggttctaggaaaagttgaacacatttaactattaattttaaaaataacaaataattaagcatttaattttgaaaaaaaaattataaaataaataaatcatttaattattattttttcatagctattccataaaattcaatttttcatttaaagattaaatcgcattagctttaaaaatgtacatataaaagataatattcatttggtggactcccttttacacagggctcgcagatgaaaattttcaaaagcctcatttggcaagaaaaaaagcctcatttttacaaatttattcaaaacacgtttaaactgttcaaatattctatttttaattgtccatgatcaatttgagcaattttttgtagaactaggtaaacattttgggaaattctaagctttaaaagcgaagttgatttttttgcgccgctttttccaaaaaaaaaacttgggaaagggggaggccggcggtgccgatagacgccgacgggaaaaattttgtgatttttaatacgatttgttaacagatttgtccacaaaaatggccaaattttacggttttgagcaaatttttaagaaagaaaaattaagaattttgactatatttttagctgattttcattgaaaaaaattcttaattttgtgaattttcggaaaagaattggttattttctagtttttatcctatcaaaaaaccacaaagtgaggctaaagcctcacatctgcgagagtgaaaaaagccgacaataattggtcaaacgcatcaaaacacacgacgacacgaaagtcttcactgtcattctcaatcattccttaaaaaaatttgaacttcgcaaaagggagcatgcgaagacggagcaagtagtggggcgagacggagggcagaggaagcagtctgacgagcgccgcaggcggttgactg

SEQ ID NO: 29069 - DNA, 566 bp, Heterodera glycines
ttaagacagttttcggcacttttacacttacctgtagctttattttctttaaaaaagagaaaagaaataaagaagtcaaagacatgacgggccaggacgttttcgtaccgccgttttcgtaccggagacttttcgtaccgccgttttcgtaccggagacttttcgtaccgccgttttcgtaccggagacttttcgtaccgccgttttcgtacgagttgatttgcaaaaaaaattgcattcaaataatttttttaatctttaagtaattacttttaatgttttgacaatttaagctttttcagtaacgatggacttaacaatattgtccctcaaaatgatcacaattatgccaaagcctatgtaatcccgaaaaccttaacaattttctccgtgtatttcccgaaactatgagatgcgaccttattttgtcccggaattttgttatttttgttagatttatgaattttcgacattatattttatgaatgggaaataaaaatgataaatttttggatctattagctctgtatgttttctaatcgaatctgacgcttgtaccagaactc

SEQ ID NO: 29070 - DNA, 892 bp, Heterodera glycines
ccagtggcggcagaagtccattcccatcgcacattgtcgccacgttttagagtcgaagtggaggacaacgatgactgacaaattaacgagaaatgaatttgcattgttataaatttaaaaaagggattaaaaaaattcataaaaattaattttaactccgtttttaccattggaaagaaagtggaaccaccggatgatctctgctcgagtgaagaggcggaagataacaggggggacatattttgttgaacaccgccaaaacgatcatcaccagcaaacggcgagccaattttactgcgtttgggtgggggtgagccagaaatggagtgcccatttgacgggccaatacttaaaaaatggtggggtgcgctgactgattttgtgagccacacgcattccaaacagcaaaaattgcattgccattcatttccaaaaaaccaattgccaaaatcggtcaaaactcggcctgatttcgaatttgggtctcaaatgtcgactctttgaaaattttataccaatgaacaaccgcagcgttcgacttgaagggattttaagaaaatgatatgccaaaaaaaggtgtcataacaactcgcacaaaaggcaattcatacattattgttttttgttgatttgaaaaaaatcaaattaaaaaaaattcatttgatttttttaacaaaaattgtacgaattgccattgccaagatgcggattggttgctgtttgtgagggggggagggaagggaaacaacaccttttggcaggcgacgaccactgctgggaggaggacggactctttccgccgctgccgcgatcccatcggtcgagcgaagcgggaccatgcttggcggagaaaccgccaccatctttttctgccaatttttgctgaaatttg

SEQ ID NO: 29071 - DNA, 813 bp, Heterodera glycines
aaacaaaatacccataaaaattagtcatcatttattattattatttttactattattattattaaatcatattcatacaaattattttaattattccaaataattgctcattttcttaaaatgtaggtgatatcagaaaagcaattatttgaaggccatggaattcatccctgcttccactcatgtacttttcactgtaaataagcgaacttaaatactgttttagcgttatgagtcatttaatttaacacctgctgctggagtggagaggtttagtgttaccgtaatctacatgatactgaatatattataaatcccgtacccctcgcaaaattaaattcaacgcatttaaaaaccaaaaaagatttaagttgtttagggatcattaagataatgggggggggggggaattaaatgaaaaaaatggggggagcagccgctgatgctttttaagttccgcgaaaactcaaactgtgagaatcattcatttgcgtcacaaaatcataaggggctgtggggagcacgacgatttaaaaatgaacagtttttcaacctcctcagaaagggggggggggataattagacacggggggataaatggagaaggggggattattcttcgacagatttattttagtaaaatttttgaaaatttttgaacatgtcgccaaaaaatatcatcgagtcaaagaaaaaccatttttattgcattttttataagaaattctgctttttctagtttttcaactatctataatgcacaaaaaaacacattctttttcaaaaaattttgttttagcgccacttttcatc

SEQ ID NO: 29072 - DNA, 762 bp, Heterodera glycines
  unsure (1)..(762): unsure at all n locations
aattcaaaattacagtgcaattcgtatgctgctggaaaagtcgcccagcttgctgcatgaacgggacccgacaaacggaaacacggtaaaaacgaaatcgcaaaaaaaaaatttctggttgccttaaaaattttgatttttttttcgatcccattttggcattcttcatttaaaccaatttattcttcaactgtgtgctttttcgaccaaaattatttgatttagttgacataacttaaaaatctcgtttttatggcaaaaaaaaaaaatttttttttcccagtcgtcaattacaatttccgattgccaaaccgtttaagacttacggaattccgatgcccaaaaaatgcatcttccatccgttcttaattttttcaaaaaatttctaccccaaaacagtgtttgcatgcagccaaccagaaggcctcgttgatgagcttgcttcagctgaagcacaatgagttggacctgaacgcccggaacaatgccggcttcactccgttgcatttgttcgtgatgcgtgaagaccttggtaagaacggacggaataaatgagagcaaaattggcacccaaatttttgttttttcccaaattttgaccgtccctgcccctgtcaccattccattcggttncactgccctgatacaaatgagagacgaaaacgcgggatttttatcaaatttgttgtgctttcggtgactttcggtggcgctgatcatgaatatgacattaatttcaacccatgtagaacccctgagtcg

SEQ ID NO: 29073 - DNA, 972 bp, Heterodera glycines
ttcagaaaggcccaaatcaataaattcctcagcaaacttcttgagttcttgagagctcaggtcgtgtttcaagcgacgccaatcgcagcgcaaaacactcgcgcctccgtttgagtgcgtttcaatgtgtataaaccttcgaaactaaattaaaattaccaataaaatataatttttcgtctatttaccctttcggaaatttttggcaatttgtttgtttcccgctttcttctgccttggttttttgaacattctgtttctgagtgcttcgcttcattgcaaattggaatgtttgtgtcgttcagtgggaattcttcgttatctctataaatataaaaatatgaaggcaaaagaatttttgaaattttcattatttcttttgcaatgttatgaaataatttatagaatttacagattaataaataacagaagctgaataaagggaaaacaattgtaccgcagagtccgttggctgttggtttcggcttcaaaattggacagctcatttttagcttcctttgtgagtgctgatggaagtggagatttggaagcatccgaaaaagacgccgatacttttggtatagtaaatggaatgggaaattttgtgtccgatgcaacctgacataagtttaaaattgaaatttcattttgttcaattaattacttgagggtgcacagaatttgatgtagcgtcacttttcttgtcacttttgttgcaatttgaagtgtttccattcggtctttgtgcgtttgaattgtcacttttgtgcccggtcaaaacagaatgttccatctttttgcctgacattgcgttctggtcacaatcggtcttctttgttccgcttttttttaatttcttcatttgtcgtgtgttgtcttgttcttcgtcatttaattttcgcttttcactttttttgtttgctttttgcagatccatcaaaattggatcagtcgcaagaaacatttcagctg

SEQ ID NO: 29074 - DNA, 802 bp, Heterodera glycines
actgatgtcgatacaatgaaaaagaattcgacccttcaaactcctgtttttatgggctcaagaattgatgaaataaagaaaaaggtaaccgacaccccacttaaaaatcaaatatcttttttaaaatcagtttcttcttgaattggaagaaaaacaacagaaaatcgttcgcttggaggcgaaacttttggcagcagaaactgagatcgattcgtttgatcagttggagggtggcccacccatctctccctggtctttcctttatttgcccttttatagaagaaatgcttgcagagaatttcaaattgcaaagggagcttcttaaaatcaaagtccgtttcggtttgattactattgaaaatgcgttcaaagcgctcggctgttgcgacaaagaaattctggaggagattaaagccgcggcctgtcagtgattcgatttaacattgtcttatatttcatcagatctatttgtgttaccgattatccgtacaagtacatggtaatcgtacgctttactggtcccacaaaaaaaaaaaaggaatttccaactttgtggtgcaattgtggggttttcgggggcggtgatcacgaatatgacctccatttagacctatttcgaatctcgaacaaaagtcgaaaattaataaatttattttttcgacttttgttcgaattcgagtccggggttcagaattgaccaaaaatggtgttagattcgtgattagcgaccacgaaacccccaggaaaggcgtttttgaaaagtaatttttaattttataaaaaaattgttcgaattcgcggg

SEQ ID NO: 29075 - DNA, 1259 bp, Heterodera glycines
ttcatattttgctgatttatgaagcagaaagtgacaggtttgttgtcaatgatcctgaattccaatttagaaagaaaacccgacgaaataaccaatggtgttggtagttgagcttcattccacgctgaagcaaccgcaatttttcttggtgtgatttgtccgaacttttgtaatccttctcacaaaggtacgaacactgtttgttttctttgaaatttatctgaaataatggcaatggttaaattgttttttaaaacagaaaacctcatagggacttggcctaatccgttcaccgaacaaaacctgacccaagttttcgacaggcgactcttgctcactaccaatacaaaagtcgaagctgtaaccaaatcgctataaagaatatccattggaattaatttgcctgtggtattcatatgggatgacggattgatcactgtcaagtttgtttacgaacaaagtcactttattctgtaaaagatggaggcagattgtcaatggatgggtaaaacttaccaggcaagtgggctttttatcctttccctcacaaaagttcacaggcgctaaacctggcaaatagaaagacctcgctgaaggaataaatacagcaaagaaaagtaatattcgcaaattcataatttgcttcctaaaaattaatattattaacttttttgtagtttaactattgttctaatttgtaataataaaaacacaaaataagaaaaacagtgtgtcgaaaagaaagggcgaggggggggggggatgaatgcgagcattagtaacagccaaaaggcaaaagcaatccacgacacaacaatgacaacgacaacacaaaccaccgctttttcccaatgcttttttggcatgttgttttttttaatttattctttttcgaatcgaattttttttttcaatttgtcgtctgaagacttaatacgatcgttgtaacgtcttggaaaaaatgtcagatgtcatatattgtttcaatttacaaccaaccatcgtatatccgccgacattgtatatgtatgtatatatgacgaaacgaagggaaaaaattgttgtaaattcatccgtactctcaaccagggatggggatggcattccgatttccgacgttttttggctcggaattccgacttccgaaattttttgggacttggaattccgatttctgaaaaattttggggccttggccattcctggtgcagatttgatgcattttgagctcaagattgattaaatttgagctaacaaat

SEQ ID NO: 29076 - DNA, 759 bp, Heterodera glycines
tcttcagtttctcttctgtgatcgttagtcgccgcccgtttattcaacaaaaaactgtcattgcgtcccgaacgactcgcgcgctcagagaaagagaaagcctcgggcattttccgtctccctctgcgtctctgcttccagtcaggcgattattattaaatttttctgtttcgcgcaaccctcgggggcggtttcgtcggttgtacgatcgcccgtgttttccatgcctttcatcccacccactcgaccattaacttcttcgtcccccccgtccgtcgtccatttcgtgtttttggcctttctctctcacccagacgataggcactttttagcgctgctgctgctatcattagtgaataatttggtgtaaaatgttttgggttacattcgctggattttggcgagttccgaggggagcgatcacttcagaagctgggaaatgaaccagaattggattggattgggcggaatgaaccatgtgcttattgctcagcccgaaaaagcatttggcggaataaatctgtccctccccgctcctccggcggacgttcacagcccaacagcggcgaaaggtttgcaccagcagcagaagaagcttttccccgtgcgcaattcgtttcccccgcccggtccaactcggcttttcccccaatcccccgtttatgagaagccaatgcttctgcagcattcagatgtttggagtgatgaatgtggtgcggatcaatccgatcccccccaatccctcaccgcttcgcgttc

SEQ ID NO: 29077 - DNA, 1603 bp, Heterodera glycines
ataaattcttagttttcttaactcgaaatcaaaattttggtttttttagacaaaatctgttaaaactccaccgcgctaaatctattgctaatttcaacattattttttttcattttcaatattccttttcaacatttaatccatcctcctatctatccatctcgtgcacaccctcaataacatcccagcaaatcctaccaaatcccccgcgggaatcgattcaattttatatcccatcccaatccaccagtgtcatcctcctctccttttaaacatttggatgcttctgtctgcttagtagatttgcgcttgcattcgtcggcattagtagatggagttactaattgattcccattctcattcaaattagtgtccggacaatccgtcattggacaattcgtcaaatacttttttcgcaaaaatcaaactaaagaaaataattattttgattgattgtccattgacgaattttccattaattgattttcttggaaccattcaaattttgataattttaatttgcgtcaggaaagaaccaattctgccggacgggatcggtatcccgcgggattgtatcgggatcccgccctcgggatccatcccgaacccttttaaattcaatgagatcccgagtcgcctatccttccctaccattttgccaatcccatgggatcccgcgtgatttgagtcattacatttttcgaatacaccattttctaattaagatcttgcacattcaaatacaatttactttttcatttgctaattatcttaaccaattccttaaaaattccaaaaattttacacggaaacgcctatcgcaccgccattcaccccaccaataaaagcaaattttcggcccaaaaagttggccatttatgaagatctgttaaaataactaaatttcaaaatttacctggcagatcctaagaaattttggtgcttttacaatctctcaaaaaacaagggaaaaacccatatataaattgtatgaaattcccttttcaggttttccggatgaagttaaaattattaaaatttttttttacaatttattttacaattccttgcacaacggctaatgatgaaggaaaaccgcaaaaaagacaaggtatacaataataattattattattatcaattaaatttaatcattacgaattattaaattgccaaattaagccccatttgatgagcttatcagcggagcattgcaattagtgcggcccatttttggcactgctgcgcgacaatttgctaccagcagcaaaattgattcttcaaaagagcagcagaggggaaaccgaatcaaagtagaaaaataaatttatgtcataaattaattttaaaaaaagaaaaattcaacaatgaaggctcgcacattctcacttaccgttaaaagagtgaattaatatttttttgaatttaaattcctctgacgtaaatgttataaatgccgaaaggctgctaatctatctgctgatctggaaattttatctagcattgttgcattatgccgcttaactaatttgtgcgcggttgtgttaaatttgcgcgccataattttacttgttcaaatttttttgtctgttacttagaacta

SEQ ID NO: 29078 - DNA, 1171 bp, Heterodera glycines
atttttatctcttaatattttgtgtgtggtcaatggcctactatgtcttcctgtcgtttttttgaaaattgatttttccttttatgttaatccccaaaccaaagtgttttttaaatttccgcaactaataataattgtaatattttttaaaatgcaaaattgtaacaagtttttgagagagaattggaaaccaaagggaaaggcgaaattagtggaggtgctttcagcatgtggccaaagcccaggcgggcacaacaaccccaaacgatttgatcagctggcacattatctaaaaaaagtttcggcattagataataaaaagaggagatattggtgttatacttatcgcggacaacggcacacgtgaaatgcgcggagtagaaaaatctggttatttattggttttatttattttggttaacaactaaccgttctcattgattgctgctcctccctcaactgaacccttgactccattggctccattcgaagcggaagttgatgctgttgcgcctatagccattcgatggcgacgagctctctcctcgaaacgttgcccgagtagagtagcagctgccatcggaatatagcggaggtggaaatttccgcgtccagcatggttcttaacaaaataagtatttttcatataaaaatttaaactgctcagaggtttagaataaaaattacattcgatgtgaagcattccaatgttcgatgtgcgcgattctgtaacacacagccatttgatctatcaactgcgatcgcaagttgaagatgatgcggttctgatcactgaacattcttgtaactcctgaatggcatcagaagtgcgggcggacattttgatcagttgattaatggattcttattcatttttttttaattgaaaataagcaattataaaatgacaaatttaaacatattaaaagcccactgaatgagcaaccatagctattgctctactcaagaattattctcgccgttcgttacgccctcaaagacccaaagccttccatatttgcaacaatcatcaaatcttctgaaatttcaaaggcgaccaatagaggaaagtacttgatctgttaatccgcaatctcttttatcattccgcaattaacgccaaccctgagtctaatgcaaatattgttttgctgatggaactcgtgaattc

SEQ ID NO: 29079 - DNA, 829 bp, Heterodera glycines
  unsure (1)..(829): unsure at all n locations
cgatattccctactaaaatttatttaaaaataatccttttttcaaatatttataacacctcgtaaagtataaaattcccccatttgatgccgcaccaatgagcaaaggaattccagtgatcgcttgtccgaaccaagcagtgatcggagaagagattgagggcctaattaacatggcataaagtgccgaaataaaatatccaccaatgttaacgatgataatgcatgaaagtgcacgaaaagtacgataattaatctgatcaactgagggtaaacctaaaatattccttaattaattaattttttattaatttgctggccacctgctgatttaatttttatcactattccaacaaacaaataaataatcatagtcattaaagtgaagcaaaagtaaattgcgatttgatgattaggatgcttaaaggaatattgctgctttcattttataataaaagattgttttttaaaaaaaccatgaaaaaatcgatgtaatgtccagtgaccatctgatcaccatacaattcaatattctgataaaaagtgaaacataaatctatacagaaaatagagcaaatcaatgttatcgtagtcaaatacagtcggattttgcgtttattttgcctgtaaaatttaatataaatggtgattttttgtctattttttacatttcatcaaaaaatatgacaattagtcggtcaatggcagtgaacaacattgccggattaattccacctgcatttaaatatattttaaatatatatatatatatttatctataattttagctgtataaattacctaatccaatcaaaggaattaantaaaat

SEQ ID NO: 29080 - DNA, 844 bp, Heterodera glycines
  unsure (1)..(844): unsure at all n locations
attattaaaaggaagcattggattaattatgtcatttcctctcattatgaccataaatgtaactgttagtgcaaataaccttatgaaaaatatttacaaagttaaagataaatgcacaaaatgtgatttcaaatgtggtcttaaaggaatagaacttactataccagattttatagaaaagttcgaaatttgctgtatgggaagatgccaaacaaaatcttacgcaaagaaattcaccttttatttagaaaaacataaacttttggctgaacattactgttcggtaacatattggtcaaaaaaagaaaaatatttataaaaaacactttgtgtgccaaccaattgaagaatgcactttaataaattgctggttttgtttagaaaagttagtaaacccagaatgtatgttgctggaaacccgaattttaatgggaattgggctggcctgcattttggcggttattttttgcgtaatcacaaatattttaaaattaatacaaagtttatggtggcttataaaaattgtattctttggtccttatttgggaattaaattcgtatgcaattttaaaaattataaaactaatgaggatgagttacaaaaaggactattgaaagaattaaataaagatgacaaagaaaaggttcaaaaaagacgaaatcgaagattgtacaaattgngtagcattactttgatgatttttctcattatcaatacaattgtcgaaataacggaaggagcagcagaaattgtcgtaatacaatcgaattctgaagattgtgaaaggaagtcaaatggatcagtatgcagaatacgccgaacagcagaattaactatattacc

SEQ ID NO: 29081 - DNA, 881 bp, Heterodera glycines
catgtcttcatctatcggctcgtccgccgagcacactcctcactaggtgtagccggggcccggtgttgaaccgccgcccctactgctgccgccgacgtcgagcatggcggagtccttgaaaaacaatttaaattgagaaaaatgtattttattgttttattcggattggtggcaaagggagcggaacaaaatgtcgccacaaaaaaaaataaaaaaatttctttaataatttcataatccaaaacctaaatggtgttactgaaaaaaaaatttgcaaaatttcaagaacacaaaaaaaaatctgaaatttttttgggtacttttcggttatgcggccacacccctccaaattttaaaaaagaaaaaaaaaggcgccaatggtagcgcgcacaattgtttatgtggcataaaagtcgttatttgagccaaaatgtcaacgaaagcatcatcattatgctaattgcagtcgttgtcaaaggtaagtaaaaaatttcccattaaatggtacaaaatttgcccaaaaattgaggaggacatgttgggaaatttcaaatgaaaatttttcatcattcccaacaaaaattgctgaaaatttaccgaaaatttggcccctttctccagcaacaggtccaactcctcctcctcctcgtcgtcctcatcgttccgccgtcgttcactgccgaacacgtccgcctcgtcgtcgtcctcgtcgaacatgtccgactgacgccgcgggggacacggctcctccaacggcaccgccgccgccgcaagcgctgacgacgaagacgatgaagacaattgggcagcaagggcctggaaagtaaatgaagttttggattttttttaattttaactgccaatagaacccctcccccctc

SEQ ID NO: 29082 - DNA, 1262 bp, Heterodera glycines
  unsure (1)..(1262): unsure at all n locations
cccataatttacttttatacaaattgggaaaaaattggtcccccaggtaaacttttaatgtggataaaggggtttttgagcttaggacttttcgagttaaaattggggattntttatnntnaagtaaaaaagttanntntggngtnnnnnagggntctgtnntgggncctttattatttttgatttatattaacgatcttcctgatgccttgccatcaggagtgaaaataaaattatatgctgatgatttgttataaagcaagagccgacacagaaattatgcataaagcattgcataatttattcgaatgggcaaataaatggcagatcagaatctcaatttaaaaaacttttgtattatatttgggttcaaaaaacccaaaagaaacatacaaatttgatgggaatacaataaatgctgtggatacaattagggacttaggagtaaatattgacaacaaattacaattttccggtcatgttaaccaaataacaaggaatgcgtatttacgtatgcgttccttgtttcgaataattaaatccaaatcgtctaagatttggattacgttatacaaaacttatattaggcctttattggaatacgctccggaggtttggaatccgtctcttcaaaaaaatattaaacaaatagaaaggtgtcaaaaatatttcaccaaaagggtattttttaaatgcagccttccgccaattccataccaaaatcggttagaatacctgcaactgccaacacttgagaataggcgaaagctgtttgatctgttcatggcgcataaaattgcttatggccgaacagatctgaaactattttctatttttaatccctcaacgcgctttaacatccccttttacagatttaacacaaaatacaaactaggcaaaaaattcattccctttgctgggagggtaacaaaattatggaatcaacttgataaaggaaaaacaaattctttaaatcaatttaaaacaaaacttagaagttcactagggtaatatgtaagaccggaaaagctagaattattaacaaattcctaagtgatttggtatttttatattttgacctcatttgactttgacctcaatttattaatttaattattttcacattgtctttttttaattcctgtgatcatccatatattttgtaacttactctacgacacatttacctgaatagtcgtcagagtaaatggttctcacccttctgatgacttttttatttttacggacaaataaatanatat

SEQ ID NO: 29083 - DNA, 766 bp, Heterodera glycines
  unsure (1)..(766): unsure at all n locations
tagagtctnttctttaaaaatnttgctcaaaaatcgcaaaatctggcccttcatagtggtgaaaaaatctgttaacagttaacactaaaactttcctaattttctccggcggcgcttatagacaccgccggaccccgcccgccctgttcctaaaaagttttttagaaaaagaaaacgtgccgcaaaaaaaaaaagacaaaaaatttttttttatttaccaattgcacaaaaaaaaataaattgaattgtaaattaaaaagaaataaattataaattactctaatgaatcaagaaacacccctcctaatttgggatttctaacaaaaaaaaaattacccccccccctcttctaccgaagccaagggtctgctggtggttgttacgtatgctcttagctaaagcccaatgaaaccgagactttcacgagaccgagaccccctcgagcagtactacaggcagaaatggcatggcatctataagaaaatgacgtcttcctcgtcctcgttctcgtcctcctcctccccctcatcttcggcacttttgtcaccccattggctttcccgcaatggcatatatccccggcggggttcacagctgcgccttcgcctcctccaaccgttgacggacgatgaggacgaggaggcggcactcatcggctgcaagctgttgctggtggtggcatggctaaaaagaaaaataaatttttgaatttactgtaatcaaatttgtataagaactacagtagggcagcattagaatcagggct

SEQ ID NO: 29084 - DNA, 864 bp, Heterodera glycines
  unsure (1)..(864): unsure at all n locations
tttttccttaccctaagagctgcagaaattgtgaattctccttcagaaaaatggntccattaccgcaagagctgcggaaattgtgaattaattctcagaaaaatggctatctctttttaggacaattttctatctcgtaaccccgatgctaatccgttccggagagcctcttcaaaattttttccattaccctaagagctgcagaaattgtgaattaattctcagaaaaatggctatctctttttaggacaattttctatctcgtaaccccgatgctaatccgttccggagagcctcttcaaaattttttccattaccctaagagctgcggaaattgtgaattaattctcagaaaaatggctatctctttttaggacaattttctatctcgtaaccccgatgctaatccgttccggagagcctcttcaaaattttttccattaccctaagagctgcggaaattgtgaattaattctcagaaaaatggctatctctttttaggacaattttctatctcgtaaccccgatgctaatccgttccggagagcctcttcaaaattttttccattaccctaagagctgcggaaattgtgaattaattctcagaaaaatggctatctctttttaggacaattttctatctcgtaaccccgatgctaatccgttccggagagcctcttcaaaattttttccattaccctaagagctgcagaaattgtgaattaattctcagaaaaatggctatctctttttaggacaattttctatctcgtaaccccgatgctaatccgttccgcagagcctcttcaaaattttttccatttaccctaagagttgcggaaattgtgaattaattctcagaaa

SEQ ID NO: 29085 - DNA, 1247 bp, Heterodera glycines
  unsure (1)..(1247): unsure at all n locations
aaaccatgacaatgaatgtcctggattactgtaggctcctttgtgtcccattattccccatttcaatacagtatgcaacagtaacgcctttattacgggaaaggaaatgatacattattaggctctttacccgcttagggctcgggaacagagactgcccagggagagaggctcgttatgaataaagtggtcaagagcaagaccccgggatcgtaataaatcactgctgattttattgctttgattgaattattatttattcgaatattataatatgttttcgtcaaggttttttgtattttatattttacatatattttttgccaggtcaactgatcgccagccatttaaacgcctgtcagagttcagaattttcagttttgtacaaaacccattgcatggttttggcaatcccaaacgtttgttgcttgggtggttaatttccaaaaatcagattacgtgattggtctctttttattacttgaatatttattgcctattagatagtaaaatttcaaaaagttaatgaatttgaggattatagggtgcatttaaatttagggttatagaaatataaacaattgaaaaaaatatttaatccgtgataaaactgttttgttaatatatataatattaataataattagagatcgacattttgaaaatgcctggacctggacctggattccatgttggacctggaccttgatttcctggacaaaaatccagaaaaatccatgtccaggaaaaatccaggctcctcgagacctggatccagacctagatccaggaaaaatccaggcctagatccaggtcaaggtcgatctctaataataatgtntttacannaagaaaattcaaaatccctcaaattggttcccgaattttgaaaaaatcctcgttttttttagtctttcttgggagaggcgaaattgttggctggagaatttcgttcaattcccattcaccaatcataatcatggtatatgtcagggatgttgatcgtttcgtgtttcgtgttcgtatttttcgtattttcgtgtttttaggacgtttcgtgttcgtgtttcgcatttcgcattttattttagtttcgtattattcgtatttcgtattttattttagtttcgtattattcgtatttcgcattttattttagtttcgtattattcgtatttcgcattttattttagtttcgtattattcgtatttcgcattttatttttcgattcgcaacatccctggta

SEQ ID NO: 29086 - DNA, 1315 bp, Heterodera glycines
  unsure (1)..(1315): unsure at all n locations
atttttaaataatgacatagcaccaacaaaaggcatcctccaacaaagtcgntagacaaccaaaaccaagtagaaaattcttctttgtgcttatctgtacttataagtgctccggaattttaggcatttgccaaaaaatacatcactaaaaattataaattattggtaacattcgagagcagtaattactttgtccattggatcgacacactttgtcttgttttctgtcgacattttgtccaaccatgtcgaaattgccaaaaacacctttttatcacttttcccaccctttaagagcaaaaatcgtttcaccacaaatttattcaatttcttatttttcagccgagaattgcttttttcatcgcgattttctcgaaaaaatgtcttgtgcatttgtgcttatttctaagatttggtgttatttttgttaggtgtgcttatttttgcgatctccgaaaaaattatttttgtgaaacaaaaacaaaaaaaataaattgttttccttgattttattagaaaaacatataaaaattaaaaacaaaaagaaatatttaaaataaattactatttcatacctaaatttaaaaatttatgtgatttttttttcatttttaacagttttggcaccaaaaatggtaattttagtgaaataaaaaaagaaaaatcccagaaaaatttacggcattccaaagtgaaatttcgccattaatttgcagtttttcctgcccaaagatttcgcacaagaattgttgatcaatttgcaaaaaatcatttgttctgagcagagtttccacctttgtatcaatataatccaaacaacgattggcaaattcttaaaatattataaaaatttaatttttacatttaatagtgaaaaatcctgtctcacttccaagtcgagaagtcgagtcaattgaacagcctcaaaaatattgggcaattgtgaaatgggaaaagttacacaagcttcgacatacatattgaggcgacaatgatcctatacgattgagcaaattggggagctggagtatgcagcgtcggtagttcagctagttgaatcctttccggaaggcctgagacgctgatacaaatcccgccctggaaaggctactcgtgccgtgacaacctaccgtgaaagggataactatgccatgacgtcccagcactcagcgactatcgacgacccatggaaaattaccaaggccttcaatgttttttcttagaaaggggcccccatttttctgggggtgtaatcttttgtattgacccgaaaggaaaaaaaaaggggggggggatgtcccccagggaattgatg

SEQ ID NO: 29087 - DNA, 600 bp, Heterodera glycines
cgcaaaagagacgatttaaaagcgattcgaaaattctatcctcctgatataataacgatgcagtcgcggcgttgacaactgagatggaaccaaaagttccataatatctttccataaggctggaaaggcagaatttgaatggccagtcgatatttacactgagcacccgttgaagcgggtgatgcgaagccatagcaaactgtatttttaaattctggccgcaattctaccaaaaacgtgtttagaccgcagtaactcggctcagagtgaagattaagggacgcaaaagagacgatttaaaagcgattcgaaaattctatcgactgatataataacgatgcagtcgcggcgttgacaactgagatggaaccaaaagttccataatatctttccataaggctggaaaggcagaatttgaatggccagtcgatatttacactgagcacccgttgaagcgggtgatgcgaagccatagcaaactgtatttttaaattctggccgcaattctaccaaaacgtgtttagaccgcagtaactcggctcagagtgaagattaagggacgcaaaagagacaatttaaagcgattcaaaatctatcgac

SEQ ID NO: 29088 - DNA, 2149 bp, Heterodera glycines
  unsure (1)..(2149): unsure at all n locations
aaaaagatgaagaaaagcgcagcagcagcagcaatggctgtgttgtgtgtggagttgctggctgactgatcatgtaatgtatatgtatttaacccacactttccataatatatatgtcaatcgcatggacaaatgggcaaaacaatttgagtggagatgagaggggagtaatttgaacgagagtttgaaaattttaatttttaagagcctcgggtattaatgatttgagggttcttgttttttaaattgcatttaaatatttaattctggttaaattcttgccatttaaaattttttttccattttggatgagcagcaaattgagcaagttaccggctaatgtcttttttgaggtcccactattgattttgagggtccagatttttttttaattctttctaaatattaagtctgattaaattctttacacactttccgagcaagttcattttccatttttttaaaatttggattcagcattttcttcctctccctaatcgcgacattttgtccccctaattttccatttattccctctccccctcccacttttgcctccttttccaatttgttcgaggatcgaccccccccccccaccctcggcgtgtacataatatttatattgcttataatgagattatgtaggggcttcatcaacagcagcagcaacaacaacagaagtctctccccgtattctcacaaacacccccccccccctcctttttttcacgtggcgccgtgtcgcccgccactaatttaataatgcttaaatcaaaacaaaaatgaaaacccatggtcagcagatattggggataatgtgccctttaaaatttgcactttaaaattcaaagcaaaattgttatgagaagggcccggcttcttaggagtttttgtttgcttttctacggctttgtttctatgagaatttcacgaacacatatttttagccagcttataaatccttaaatccaattggacttcacccgccccccccaccactatgatgtaggagagcccctaatatagagacgtagggtactcgatgagtaacaggagaatacaaacaaagctatggaaaccgtacgtcactgagaccatccaaatggtaaacccaaattgctaaaaataaatcaaaatttttaagacgctctacgtttatatttggaccgttgaatccatctaacaattatcctattttggcatattatgaggcgaaattccgtggcgacgctgggtattttcaaaaatattttaacgaattattttaaattaagaaccttcggtatcggcctgtgtgatggatcccttgaccgtagcgatttcgtgtgttggagccagaaatcttatggatatgagtcgtcaggcgaattgctaggattttccgcaacaggcggtccaccagttgtgcattcgcaccgttttttccaaatgatattgtcgggtgtggaattaatctagcaactcgtgaggctatttttacattaaatggccaaaaaatcattttgtttacttgcaaaacattgtaaaagtttgatttgaatttttagatactactggcctcagaattgagaatccggccgtttcaatgataggcagcggaacgttagctactgtaaattttgggcccatattgatgttcaaactttccaaagtttttgagccgtaaacagaaacacataaaaggttaaaattttgttggcaaaaatagaaatttattgaaaatattttgactttttttgcgcaaatatggccaaatttttattatgtaaatgttccctttattttatgtgttagtacgattatattgtttttcattagacggttgtctttgtccttttgtgaaattttaaactgtcctataaactgttgatatggtaaaaaattaaccaaaattctaataattgcaagtaacagcatgtactttaataaataaaaataaaaataaccaaatgtttanataaatcaaaaagcgaaactataataatgaaaagaattgtaangaaatggcgaacatatgaataaatttgattttgtagcgataacaatggaaatagggagccaactcgaacaaaagcaatttagaccaaacattctttttgcgctaaaatcacgggtaattaaaaaaacaacaaaatttttcataattttt

SEQ ID NO: 29089 - DNA, 743 bp, Heterodera glycines
cagtgagtcgcgaccgactatgattaggacacccttcactcggcttgaaaccacaattggtttgactgcgcgtatcacttcagctagcgttccatttttcggtccgatgtgaatggactgatcaaagaagggctggagaaggcttgccgatgaatctccgatcagcacgcgtgggtgcagtaggatttggtccgccttatgcactgcttcagcacgaaccaattccaggatccatgccgattcgtcaaaaattggcttccactcttcttggtcttctttgcgcagtcttttcaggccttcgggtgggtgcatcgtcagtgggccataggcggtttttgccaaaatgtcacgcggcatagcaactgccaatccacttggtgagtgccttgtaatggtcttcatcgctgggcaactttctagtggtcacaaaatcgcttcttttgccaatataagtacaaagttccaactttggcccgcattccaaaatggtttccacaaaattccgagcagctgccattgacgaaatggtgcccgagcgaaggacaaagattgaaaggagtccttgcatcggagttttgacggcaagcgacccgatcggactgcttccaaggactgggtccaactccgccaaaagcaatttttcgcaaaattcatggctttccgatccagggcaacaggttgaggtccagccgagttctgtaaaatggaatttccctaattttttcattaattccggatcgttt

SEQ ID NO: 29090 - DNA, 1349 bp, Heterodera glycines
tgcaggaaaattattaaattttaaaaattttttaacccctccaagaatatgccaaaaaatgtaggcttaacttttttacttaaaattcgatcactcatattttttgctaattgagcagaagcgtaacaaactttgcagggatactccccggtaaaggactaacttacactgaaatgagcgccgagctagctggctcaaaaaaattttcgaaaatctgagtctttcgtttttatttattttttgcaaaattaattcttaaatattttttcagaaagggttctgaaacgcaccaaattttatttacatgttagtttaggcactctgatgctttttctatcaaaaagggagatgaataaaatttttaaaaatttttaattcctttttaaacaggccaaaaagtttaggcttaacttttttttcagaaactgatcagaagcgcaccaaactttgcagggatactgaaaggaagagaaataacctattttaaatattatctagtcagttcatttaaataatttttatccaaaaaatttttttttgggttttcggggcagtccccctgaaccgatgcgcccagatttatggggagaccgaatccttcgggaatagcttccctatagtctgtactttaattctgcgttggatttttgctccccataattgtttgagtaccccaaacggacacttgaaaaaatcgatttttttgttttcggggcagtccccccgagccgatgcgcccagatttatggggagaccgaatccttccggaatagcttccctatagcctgtactttaattctgcgttggatttttgctccccataattgtttgagtaccccaaacggacacttgaaaaaatcgatttttttgttttcggggcagtccccccgaaccgatgcgcccagatttatggggagaccgaatccttccggaatagcttccctatagcctgtactttaattctgcgttggatttttgctccccataattgtttgagtaccccaaacggacacttgaaaaaatcgatttttttgttttcggggcagtccccccgaaccgatgcgcccagatttatggggagaccgaatccttcgggaatagcttccctatagcctgtactttaattctgcgttggatttttgctccccataaatgtttgagtaccccaaacggacacttgaaaaaatcgatttttttgtttcataaatatttttttcagaaagtgctctaaagcgcaccaaattttatttacaacttaattttagcactctgatgctttagtatcaaaaaggaagatggagaaaaagatgattaaaaaatttttccttatattttggttatatcgtttt

SEQ ID NO: 29091 - DNA, 603 bp, Heterodera glycines
aaaaataccagtcgatagagctcgaaaaactatgttccccacccaggtctccatttctctgggaaaaatcgttaaaaaaccctaaaattcaaaaaccaaaaaaacgttttttaggcctaactcgaaaatttttgaaaattttcgaaattttaaaatttggaaaaatcgagctttcaaagctctacaataagtccgctggagccccctcgctcagatcaaaccctgacgcggtattcacctgggactgaagtgaacaaagttggtactgaatttctcctattttttgcagcccttcctactataggtagaggcctagaattttttttgacttttagacaacacttcaacttaggttcctaccagcggaaagtttttgattcgagatttagaaaaaaagttatgggccgtcaaacgcacgaaaaaatgagaaatcagtccctggtactcagttggcccttggaccggaaaacctatatttttcccggatgcgcctcaaaaagttgtaagacctttccactactttcagggcgctcccggccttcggccgggagattttgtttttgcaaacgaaactccttgtcaatataacatatatagtaacta

SEQ ID NO: 29092 - DNA, 584 bp, Heterodera glycines
gtcggggatcggtgacgcggatcggagaataacctcccaccaatttaataaacaattaaatttttcttttttacttttgaaaagcgtctttaaaaagtaaaaatctgtttttcaccttcttcattttctcattcaacactcgctgtactaatataataaaagcgtgtcgaagtaagttttaccaaaaagaatttgtcgcgcagtattgccggaaggctttttctcgtcttcttccaaccctctcatgagtatttgtattccttggtatcatacgatagcccatgagttgcttattagcttgaaatttcaaaaattatattaggatgtttcaatatatctaggaaatacatgataagatgatcatgacttttgaaaatgaacacttatccccatactccgaacctactgagttcgtagccccgttgggtctgtttcgtttggatattatgtttttgacgaatatttttagaaaagcacggataagcgctgtcataacaatgacctaattaggcttaaaataagattatatctatttaaaaagattggtttctaagacattttttggaagaaacgattttaatgta

SEQ ID NO: 29093 - DNA, 1068 bp, Heterodera glycines
  unsure (1)..(1068): unsure at all n locations
ttttttatataaaattttatttgcatcaaattttaaatgtgtcacaattttcgttagagtaaggtcacaaacgttttcattttcttaaaaagaaaataatatgtaaaaacccaaattaaatagaaataattcttccatttccaaatttttgaaaaaaaaacctctgaaaatggtgacactaccagccccaaatattttcttactgtatttttgaatttttttaaaacataaaattcagcgagcaagaaggatgtgcgccgctttatcgacgattatttgcgtcatgatggcctttttgtgatacgaatgttaacattacacacagggggtaattaattatttaattacttaattgtatggctgggatttttagataagcaaaacgctaaataagtaattaattgggcataaaaaattgcaagcaattatgaaaattacaaaaacgcaaatatatatatatatacgaaaatcggtaaataaaattttttttacgattagcttgaaaaacactcaaaaaggctaacttttttctattgtaagcgattactcaataattcaaaaattttttgaaaggagcaaaaattttaaatagccaaaattttgttccgaagataagtttaggagtgcttttttctttttgaatttttgttaagcaattttttgaaaatcctgaaaaatatgtacttttaaataatatgtagaaagacaattaataagaaattggattataaagttagtctagaaccgtcaaatcatgtggaaaatgtgtattttcttgcttattttcatttcgcataaaataactatttacctaaaaatccttcacttcccttttatttttnttttatttnccaaaattctttttcattaatttttaatacttaatttttccattctccttttcatttcttttattcccacataattcattaaatttataattancaattcatacccntatttctaatttccaacaaataattaaaagaaaaacacttttaatattattttnaatnctttccctatgtagatcaaccatttagaaaatgctttgaataattagcgaaa

SEQ ID NO: 29094 - DNA, 1009 bp, Heterodera glycines
ggggacctctagagtctgccaaataaaatttatattatgagagaaaaaaattgcccccccaatgtagtattttacttttcccgaatagcttttcagacttcagttacgaatttttttctgaaaattcgaatttttccagaaattctggaataacttttttcgttttttagatagaaattccaaataaagtccataaaattctcctgatttttctctatttttaaggctttattcctgtaaaattgatcaacccttcgatttgttatgaattttcaaatattaggccaaaatcccgaggccaaaaaattgccaaaaaataaagaatttttaaaaaattccaaaaataatgaaacgaaaaacaaacatcagattcgtgctcagcacatcaaaataccccagaaaaatatttttgacccccattttcaacccaaaaaaaattttcgaaaatttctagggggcctagctcgaaaatttttgaaaatttcctgccatatggcacaccattcgatagagcttaaaaagttctacaattttgccctaaggcattttttggctaaaaccgacccctgacgagttatgggcccgggactcaaatgtcccgcttaggccaaaaattttttctatttccggaaaaaaatcgaaaattttctaaaaatgtcaccaatcgatagagctcgaaaaactatgttttggaagtggtctccgttttcccgggaaaaatcgttaaaaaatcataaaattcaaaaacccgaaaaccgttttttaggcctaacttgaaaaattttgaaaattttcgaaattttaaaacttggttggatagcctttcagatactacacatttttgctcagaaacaatttttcggtcaaagcaacccctggcgagttattcgcctggtactgaagtgtacactttttggggtaaaaaaaattagccaaggctacagccttgggcgcccaacgtagggcttaggttttgctggcaaagttgtcggggatagtctgacttaaa

SEQ ID NO: 29095 - DNA, 748 bp, Heterodera glycines
taattttgcgcttggaatgggtgttgttgttgttgcttcagctgcgtttgttggctgctcatccttaactccaacccaattatcactcctctgtcaattgtcatttgtcttctcacccttccatcccaccgtacggcgaatactgtgggtactgttgatggaatatttgcggttgagcagacggcgagtactgttgcggattcatcctcgtccttactgtacttctgccggaaggaacgcgcgtaatgccgccctttttgccccgcatcttaacctttgacttattgaggccaaattggtacactcacattgaccacacaaatgtaataaatggctgtgactaccaacgcgaggagtaaaagaccgccgagtaaaatggcaaaaacaacggcaatctgtggtgaacaattccaattttgatcaaaagccgggcttcttctttgttagcctgtccctcctccgcccacctgatagtcgtaatattttgttgcatatgccattgctgtttttctgctgttggaatgctaagatggatggacaaagcaatgtgtgtcaaaatatgacgagtgaaattccttgtgcttcgttcgcttgctgattcaaacgtcaaattgccggcgatcgattggagcggggccaaggcgcggggaaacgacggctgagagtgagcttttgtggtggccactcgccgcgtctgtcccttccgccgcctggcgttttgccccccccccctcccgccagtcagctg

SEQ ID NO: 29096 - DNA, 1242 bp, Heterodera glycines
ttgattctgtattccgctatgataccgtatcgttttcccgtctctaccaattctcttttactccaactgcaatcaaaaattgtttgactgtgtgactttgatttctcataatctgttgtttcttttttttacacataattgttttgtattcttttgacgattaattttttttatctgactttctttttatgttaatattttcgccaacagttgcatttcaatcactttttgtttttcattcgcaattcgtttgccttatattcgatttgtttgtttttagggtctcaaaaaatgccaaacaaatcaaacagtcgccaaagcaatttgtttgcattttttcaaaagaagccaaaagatgagcctatcgaaaaggaggagaagcagcaaaaggtgagtatttttgacaagaaaaaacaatgccttattaatggtgagtttttagtgtgttgagaatgagtgcgagaattttcacacgccccagcgaaagcggacggaagcgacccgaaattctgtcaacaaaagtcagccgatgacaccgctgaatcagcaacgaaatcagtcattggtggcggaaccacggaaggacaccacagacaataacacgacaaacgcagcatttaccgactcggaggaggagggggaagacagttcgtgcggcgttgggtttatgagttgcgcttctttggccaccccttcttcggctgaatgtgcttcggcaccgaaacggcgacgagtgattttgtcatctgacgacgaagaagagaaaatgatgggaaatggacagagaaaagaccaaaagggggacgaaacggagaatgaaccccaaagacaggcgacgaagcgaaagcgaagggacgcggcgaaagaagcgaaggaaaggacgcctccttccgttgtccgtgtcccgcgggacgaaatacagacgacgccttcggcaaaatgtgcacattcattcatcaattcatttgtatgccatctataattaagaattaatatcttttttatcctttttccaattcattacagagcatcgacttaccaaacgcttcttccgtgcagttgcccttttcatcgcttcagatccaacccaaagacttgaaaatacgcaacaaaaatgaccaaatcgcagagagcgtaaacgacggtgatgaggaagccgaacgtttccctcacttggactttgactttcttcgcactgaaaaaatcaaagacgccaaaggacgaaagcccaatcacccggaa

SEQ ID NO: 29097 - DNA, 992 bp, Heterodera glycines
caaagaaagccaaccccgcagaggttgaagtcgcagatctcgacgacgcaaagcagccaacgtcttcgactacccaacccttttctggaagctcgcacgcccaaaggtaatgtttgctctggtggcagcactacaatgtcttcttccgttgcagtatggggtgttcacctttatgtgcaacgaatgccgtaacgaaaacttcaagcgaggcgacaagcgcttcatccttacactggcagtggccaagagaagctggagttcacccaaacattctgccaagactgtgccatgttgaactttgactgcaccgacctgatcatgaaacaccaaaaaaaggatgatggaccacagaagaacggaggacggaacacctttttcaagacggaaaaatgatcgtttaccattcattcattgatttttcgttaaaatgagtaactctttctttgtaattttgcccagcaatacgccgggatttgtcggcaataaaacgaataaattcaaagtacacttgccaaagaaattagtgtttgatgggccgggatggatagtgggcatgtctggcataatatatcccaacaggtgagtgggtttgcacagttctcattgcccttgtacagtttagctgggcgactgtagggaccctggagaggcaatacgtagtggtgcacctgcgcgatggtcgcaagttccggttcagagtgccaaggggcagcttcctttcgcctcagcagcttgaacgtggaatgcaccatggcatgatagcggaaatggaacgacacctgacccgaaaaaggtcaatacagtacccggatgagggggagattgttgacatggaagtcgttgaggaggaagagcctgaagaagcaccattaaatccgttgaaaaatcgcacaaaactcgctcaacttagcctgaagcatgagcgagacaaaaaagagagagaggaggaggataaaaggcgacagcagcgagaagagcagcagcagagaaag

SEQ ID NO: 29098 - DNA, 912 bp, Heterodera glycines
aaaatacccattttagaatgtgtttttatttggaattatttatcacaaaaacacatttccgactatattattatgaaaaatacccattttaaaaatgtgtttttatttggaattaattatcacaaaaacacatttccggttatatttatcataaaaaatacgcattttaaaaatgtgtttttatttggaataaattatcacaaaaacacatttcctgttattttagcttgaaaaatacgcattttaagaatgtgtttttatttggaataaattatcacaaaaacacatttccggttatatttatcatgaaaaatacccattttagaatgtgtttttatttggaataaattatcacaaaaacacatttccggttatatttatcatgaaaaatacgcattttaagaatgtgtttttatttggaattaattatcacaaaaacacattttccggttatatttatcatgaaaaatacccattttagaatgtgtttttatttggaattaattatcacaaaaacacatttgcggttatatttatcatgaaaaatacgcattttaagaatgtgtttttatttggaataaattatgacaaaaacacatttcctgttattttagcttgaaaaatacgcattttaagaatgtgtttttatttggaataaattatcacaaaaacacatttccggttatatttatcatgaaaaatacccattttagaatgtgtttttatttggaataaattatcacaaaaacacatttccggttatatttatcatgaaaaatacgcattttaagaatgtgtttttatttggaattaattatcacaaaaacacattttccggttatatttatcatgaaaaatacccattttagactgtgtttttatttggaataaaatatcacaaaacacatttcc

SEQ ID NO: 29099 - DNA, 715 bp, Heterodera glycines
atcacttcgaaatttgaaaataggcacgacaagcaaatcgatcggagcgcaattccaccgcctttttgctggtccaacccccgccggcgggggacgaagaagcaaaaggggagggcaaaagcagcgaactgatcattttgagggtgggtttttgtgccatttgcatgggtgaagcattgatttgtttgaaaattcaaaaaaatattcaaacgatcagttgccgaaaaatacggccattggcaccaaattaatgcgattggtggacgacgaaaaatgcggcactgaatcagcggcaagagagggagaagcattgggattggaaatggtggtgccgaaagggcagcagcagaagcggaacaaattgccttttttcatcgatcagaggacaaaatggctgaggttggccaaacggatggaaattggccaatacgccggtgagtcattcattaatgatcgtttaaagtttattatatttgatcaaatcagtgaaattgggttcaaaagttatgttctgcagaggacggatcattccataatccaaaatgccttgctgaaagttatgttttaaatctaaattcgttcaccagattgacctggtcatactctaaactttgagatcattgattagtattaagccttagcttttggatgattattttttaatgatcactaaatgatattatatctgatcgctctggcgaatggtcaggaagtg

SEQ ID NO: 29100 - DNA, 1028 bp, Heterodera glycines
ctttcccaattcgtcagcaagacgaactgatgtttggtcgaacttgtagatgaaaaggtccaagtccgaaccgtgtcgagccaattgacataatgaggaaccaaaaactaggacttgacaatttatgcccgcatatttgagccactggttcatcctttctgacaatgcaaatttctcatttgtcttttcctccgtctcggccacttcgtctgcgtggctcatcaatagttcactgattgagttggcttttgtcgaattttttggtttattcccccttttagcttcgtctgtgcttgttatttcgagattttcgaaactttttaagtcgaatacgtcttcctcaacaggaatattttgaaaattttcttccctattttttggccatccataatttggctgaacagcccgtgttgtaccttttggtgttgcctccttcacatcatctcggagttgcatcaacaatcgtcccagtgtgttcgaaccgttccactgttgtatgtccgctgttggccatttgtcataaatgagtcccggtctacaacccaccccccaaaactggtcgggtgataattcgcaaattatggccgatccagtgctcaacagcacatctttaagatcaggcaccgaaaacttggctttaagtgcttctttcatgatgccaactttgagctcagcccattcttggacagtcacttcgtcctccccgttcatgtttgcgaatttcttcatctcaaatgcgcttattcttttgccatatctatttgtccccagcataatcgcatccgccgcgtcgaaacgtttcagatacaacgctttttgggcacagtaatactgctccacacatcggtaggttcttccgtggatgacgaattcatacgcttcgttgaaattcgaaaagtaaaattgctgattaaaaatcctagcaattcgcctctttcttcaacccgacacggcggcaaaatggtgctctgtcattgatgaacggcggaattggcgggatactttccatttccaaaatcgtaaacggc

SEQ ID NO: 29101 - DNA, 1210 bp, Heterodera glycines
  unsure (1)..(1210): unsure at all n locations
gagagagcagcgtatggagattatatttgttaaataattttaagcctttaaggtttttgggtaaatattaaaaaaatgtttgtttattgttaagctggttttgttcacttaattcaaattattaattcacaagaaaatccgccgtaaaaaatatgctttttattttattcaaaattttttatatattttttttctaaataatttgtagatagatttattatatggacagttggaaatcataacaatgatggttcgttactaagaaaaaattatttacaatagaagcaaattcagcgtatccaattgagaaaaataaacggattttatgccagttattttgacaatggttcgataaaatataagaattaatcagtttttatgtcgtaaataattttcttgtttgaaaatttatccaatttttcttataatcatccatttaaatcctccaaaatctctcctccaaactgtttcttccattttgaaatggtccttctatcaatttgcaatattttagcagtttctttgtcactcatttttgggttttctctttttattttccaatattttttcataatgataatgcttgacaaaattataaattcacaaaaaaaaattactaatttaataatttaacgaaataaattttatagaattaatattttttcgattaataggaaatgttttccaacgctaataattacgtattaaaaaattaaaagccttggatttattaccaaatctgcaggacaaaaatatgtaaaataggacaatttatgattaaatattacaaagattttcatttccttaggacaaacatttagtttttgaattttactcaatttcaattaaatttcactttctactaatgattcaagtgaattaatccgttttttgttttatggcgcggcatctccctttgcgtgtttcccttttttttttctnttttggtgccgncgctgggcctctttncttgcttcgtgggtgcggggcggtgcgtgctccgttccgtgcgcgttcgtgctttcngtgnctgncccccntcnttcgtntcttgtnnnctcctggcncttttcttcccncncctcncctcntgcnttcgcngncatggttttccctttctcgtctaaagtccgtttccttcccctcccctgctaatgccgcctncaaagggaccaccaatttgttaactatttatttataattatttgca

SEQ ID NO: 29102 - DNA, 980 bp, Heterodera glycines
  unsure (1)..(980): unsure at all n locations
cagaaaaatggctatctcttttaggaccaatttctatctcgtaacnccgatgctaatccgttccgcagagcctcttcaaaattttttccatacccgcaagagttgcggaaattgtgaattaattctcagaaaaatggctatctctttttaggacaattttctatctcgtaaccccgatgctaatccgttccgcagagcctcttcaaaattttttccattaccgcaagagctgcggaaattgtgaattaattctcagaaaaatggctatctctttttaggacaattttctatctcgtaaccccgatgctaatccgttccgcagagcctcttcaaaattttttccattaccgcaagagttgcggaaattgtgaattaattctcagaaaaatggctatctctttttaggacaattttctatctcgtaaccccgatgctaatccgttccgcagagcctcttcaaaattttttccattaccgcaagagctgcggaaattgtgaattaattctcagaaaaatggctatctctttttaggacaattttctatctcgtaaccccgatgctaatccgttccgcagagcctcttcaaaattttttccattaccgcaagagttgcggaaattgtgaattaattctcagaaaaatggctatctctttttaggacaattttctatctcgtaaccccgatgctaatccgttccgcagagcctcttcaaaattttttccattaccgcaagagttgcggaaattgtgaattaattctcagaaaaatggctatctctttttaggacaattttctatctcgtaaccccgatgctaatccgttccgcagagcctcttcaaaattttttccattaccgcaagagctgcggaaattgtgaattaattctcagaaaaatggctatctctttttaggacaattttctatctcgtaaccccgatgctaaacggttccgcagagcctcttcaaaattttttccat

SEQ ID NO: 29103 - DNA, 989 bp, Heterodera glycines
  unsure (1)..(989): unsure at all n locations
ctgaagaaaaagtagtggccgctttttgctgctgcctccaaccagggacaggcgctgccggtgtcacagcccgaattttcgattggcgtttccctcccgttgatcaggaacagatcaccttaaaagattttgggttttattattctaccacttttagtccccataaaaaaaaatttttgataatttaaggcaaaaaatggaagtggagtacatgaaggaatctctttccacttaatgttagaaaaacaagtgggcatagcctcatcaccagtcaaaaaccatcaatccatggcacacatcaatagccctttggtccacacacaaatcccactcacccagcgtggtgtacgtcgtctcctccttgcgccgcacctgcaagttgtccgagaagtatccgctgctgaaccacgcctgcatttggtgcgtatcaaaaggaccgcgctgagttccactcgggtccaagtagcaccaaaattgggctgtttgggtggtggtagccggggcagaagcaacgccagcagcagtcacagccgaggaagacgaggagggcggcggcggtgttggtgtccctttgctcactggcgccaccgcggcggcagcgacggcggtcgctggtggcttcttcaacgcgtgggccggagggggttcctgaactggccgaatttgtggtccatggccaaacgcattcaacccaatggcaattacaaatgggcacacaatatgatgtatgtgtcaccgtgtcccgtaaaactttccgtcattgtccaaccacccatccaaaaccccgaaacccattgcttttccgctgactttagccgccgtgacagtgccggcaacagcggcacctccactgccttcgcttttcccggtggtattgttgctgtttttgtgcatcggncccgtgatcttcggtctcccaaaactttttggtcatcgcttcgtttactanagtatttttaaagagtggcaaaatttaaaaaaaagctttt

SEQ ID NO: 29104 - DNA, 846 bp, Heterodera glycines
caatagaagggttcgaggccgcgaagcggccgagccccccccctgttatcattcataagaatgttgtgccatagggaacttccacaagaaacaagaagagatgatgaaaatgccaagaatgttgtgccatagggaaatgccacaagaaacaagaagagatgatgaaaatgccaagaatgttgtgccatagggaaatgccacaagaaacaagaagatatgatgaaaatgacaagaatgttgtgccatagggaaatgccacaagaaacaagaagagatgatgaaaatgccaagaatgttgtgccatagggaaatgccacaagaaacaagaagagatgatgaaaatgacaagaatgttctgccataaagaaatgccaatagaagggtgcgaggccgcgaagcggccgagccatagtcaattttatcattcataattctacattacaaccttactgcctagcggttgcgatgcgccgaaggcgcattcaaccgctagttatatgaaaaagtaaaggggggacccttttgttttgcaaaatttttttatgataaaaccccatgaaaatttgttatccggggttttagaggtcgctccacccctccttttgtttttacaatggtaactttttaactagcgcaagacttattctttttgaatggattgacattttgtttattacgccagctatttttttccgcttttttgcttttttttaccgtccttggtatgtattagggatggtgcggaattccggcttccgacatttttggggtcggaattccgacttccgaaaatttttggtgcctcggaattccaacttccgaaaaatttttggccctcgaaattcc

SEQ ID NO: 29105 - DNA, 1348 bp, Heterodera glycines
cagtgattagtagaggtgcaacagtgattagaagaggtccaacagtgattaaaagaggtacacagggaaatagaagaggtacaacagtgattaaaagaggtacaacaggaaatagaagaggtacaacagcgtttagaagagacagtgattagaagtggtacaacagcgattagaagaggtacaacaggaaatagaagaggtacaacagcgtttagaagagtgattagaagaggttcaacagtgattagaagtggtacaacagcgattagaagaggtacaacaggaaatagaagaggtacaacagtgattaaaagaggtacaaaagtctaactttttatgagatgtacaaaaataatttcataattttaaatataattttatagaattaggtttatttaaaaatttaaaaaaaactaaataataaaaaatgtaaaagtttattttttaattaataaacggaataatttattttactttattttgaaatgaattattatgcatccaaatttttaaatctaattttgcttaaaaataaatctattcatcaaaagaaaaattaaatttaattattacatatttttggaagatttttgtgagaaaaaattttccactcaaaaatcctatgctcacccctttggtcccgaatcccaaaatcacttttatttttgtaacatctctcaaaaaagtgataaaaatgccaaataaaatttatataatagagcataaaattgcggatttttgtagtattttacttttacagaatgacttttcagaagcgagttctgaatttttttctgaaaaatcgaaaatttccagaatttctggaataactttttttgtttttgtggtataaatttcaaataaacctcataaaattctcccgattttttgctatttttaaagcttaattgcatgaaaatcgtcccacttcaaaatgagctacgaattttcaaaatttaccccaaaatcccgagggtcaaaaaaattgaaaaaaatttcgaatttttaaaaaattctaaaaattatgaaacgaaaaacaaaggtcatattcgtaatcagcatctcaaaataccccagaaaaaaatttttcaccctctttttcaacccaaaaaaaatttccgaaaatttctagggggcctagctcgaaaatttttgaaaatttccgaacatttagtacaccattcgatagaactttaaaagctctacaattttgccctaaggcaatttttggctagaaccaacccccgacgagttatgggcccgggactcaaatgtcccgcttaggccaaaaaatttttctatttcctagaaaaaatcgaaaattttctaaaaacatcactaatcgata

SEQ ID NO: 29106 - DNA, 1117 bp, Heterodera glycines
ccgaagtgttcgattgtttgagcctcgccgcggttctacacccctgcattttctgtgttcacggcggtctttctccgtacattcgaaaccattgaccaaatcagaacaatcgacagaaagcaggaggtccctcacgaaggtgggcaaagggtcccttttcaaaacaccacaaaaatttctcaatccaaaggtgcaatgtgcgatatgctttggtctgatcccgaagtacggcatttttgtaccaagattttatgttattcttatttaattttttgaattattgtttttttctgtaaggagtgcgtcggcttcgctatcagtcctcgtggtgccggctatctgttcggttctgatgttgtgaaattgttttgtgaaaagaatggcgtagaaatgattgcccgtgcccaccaattggtcatggaaggatacaaatggcactttgacaacaccgtaagtaaaacgcaatgtttaacagagaaacagcgaaagatatttcccatctttcataggttctcaccatttggtcggcacccaattattgttaccgttgtggcaatgtggcggccattctcgagatggacgatgtactgaaaaaggaatttttgattttcgaggcggcaccgcaagtggtcggaacaatatttaaaaaagaatattttgaatgttttggtttttcaagggacgaaacacaccaatgaaggggcctatgcctgaatatttcctttgattcagagttaaaatgatgaccatttcgatgtttgcaacattcatttctaatttgtttattttttgcatttatgtggggatttgttgccattgttttcttttatattttaaaataaaaagtgctggagacagagattttcaaatcattcgactcgagaagaaaaaattaaaccgactgacaatgaggcacaaaagccaaattttggttatagcgctaattcttggtatcaatcgaaggcaaaggtaaagaacattggtcccgaaaaaaaaacttaaattttttaaaatgatttttaggggtaatcataggcgctgagcacgaatctgaccttctttttgctcaatttcgaaccccggaaccggattcgaacattaaaaaaaaaatcaattt

SEQ ID NO: 29107 - DNA, 1055 bp, Heterodera glycines
gcataatttggaatatattaagaagacttcccaggcccatcctcgcttcaccggataacattccttacattttattaaaaattgtgctaacaaataagccaattacaaaaatattagctgacatatttcgacttgctttggattccggtcaaattccggaagcgaacatcattagtggtaccaattttcaaaaaaggcgaaaaaactgatccattaaattacaggccggtgtcattaaccagcactgtctgtagagtttttgaacgaattttaagtagcgaaattttagaatttctgaacggtataagattttttgataaagaacaatttgggtttttaaaaaataggtcgactacaacccaaatattaaaaatgatggacgatatatataattctatacaaatgaatcagcaaattgacattatctatattgattttgtcaaggcgtttgattcagttccaattgatttattacttcaaaaaatcaaaaagattggaattgaaggaaaaatttataaatttttaactaactttttaaaaaatcggagttttaaggttaaaatcggcgaagtattgtcagaaagtttcagcatattttcgggagtgccccagggaagtaagtgtcttagggccattactctttttaatttttataaatgatctgccgtcctttattgcaaatgaagcatcatcagttggcataaaaatgtatgccgatgatgttaaattatattatgcctatgaaaatgatgataaaacaaatcatttagataaagcaattgaagctttggaaaaatggtcaaaaataaatgggttagaaatttcaactgggaaatgttttgttctttatttagggaaaaataatatgaaaaaaagatattttattaactcacaaaggatttcagaatcggataatggtcgtggactaagcattataattgactcgaaactgcatttttccagacatattaacaaaattggacgaaaatgcttatctttaaagttttcccgattttaaaaagcttaaaaaaccaaggaaataaagaacctaacaa

SEQ ID NO: 29108 - DNA, 1332 bp, Heterodera glycines
aaaatctgctcgacacgtccgtctgacacgtccattcttcttcgccattcaacgttttgcatttgagttggagtggcgatcgcttccattttgcgatgcgaagtccacaaatccgggccttcatatttggccggtaaatactcctccaaattgttcgctacattccttttcccaaaaaacggcgcgtggatccgtcgtgaaggatgaaggatggccttttccttgcaatgagccaatttcggacttccaatttgtcggtggggttctcggcacaaaactgtgacttctgttcacatgtccatccctaactccacatcttttccacttacttcaatcggcgcctgaattggcattttgatgttgccttggttggagccactttgtctttcctttgggtcggtccgttgccttggccttgtgtgaatggcgttgttggcagttggcgggttgaccagtgatatggcgctttatttcacaagctgaattgccctaagttcgccctcaattttcttgaacaaaatgtatgtgccgttttctacgcatcctccaatagtttcaatgccttttgtcgcaaatttgattttcatcgttgagcacggtgaccaaaataatgcacttgagctgcagctgctcctttgtcgacccagttcggcattcttagcgatgggcgaacagtgagctggtttcagcaaaaagctttttgagatgtgaaacagtttcatccaattcacttggtccggctgtgttgggttgatcgtatcctgatgtttgttgtactcctcctctcctagtttgcccagaagaagtcgtaacttcgaagcctcagtcagaatgcttccgtcctcttcgatcaattttccataccgtttaagccaggtctcaaatgtgttgccaacgtcagggttgtaataaaataatgccgaaggcgagcattgaaaaaaatatataaatcatcaaaaaataaagcttaaaaaaaattataataaatttaaaaaaattgcttaccaaatttgcattgctcaaatttgctggcgcggcgttttgcggttcagccttgatgaccacttattggagagcatttagcaattctcgaagctgttgcgggtccagggttcacttgaagttaactgcacacggaaaattttatctcacacggagagaaaaattttaagaactgcgaaaattcgaaatcaacacggcatttcttaattagaagcaaaacctattcttacaagcattgttttttgggccatcattaaagcatctgacaatgaacagacaaaaagatataatggcaatacgacaggggtgaggaatttaataaaattctaa

SEQ ID NO: 29109 - DNA, 980 bp, Heterodera glycines
aagcattattgattgcgatatccaataaagaaaacgcgtataaaaaatatgtgaaatacataaaaataaattaaataatttcagctgacagtattttaaaacaccctttttaattatattgcatattatatcttacttacctattacggggtttgccaaaatattacatatgctactaatatttataatatattgcattttaattaccaaaaatagtcttttaaaaataaacagtaaatttacatcaaaacacaaacttaaaaaactttattatttgattttctagattgaatttttgcatttctaaaatttctgttaaattgtaagcaatttacgacaaacgacaaatatactgtgaaaggtccaaaaaggccgtaatttggcgtaatacgtaattttcaaaaaattaattttttatataaaaaatccaatctaaaaattggttaagagtaatttatgatctgaataaagatttgcttaaattgctaaattattttacaaattttaaataattagaatttcaaatatcattatataataagtttttaaaataaaattataaattattagaaaaacaattctaaagattaaatcaggtattaaaatgttaggaaaattaatttcaataattaaattgaataataattatatgaaaaagcatataaatttgtgaacaaaaatccgatcaacgcgagaaaaataaaatagaaaaaactagtaaaatttttaatgcttattattccataaaaataaaataaaatataaaacttatttctacaaaatattaatgaagaaaagctctagatttgttttaaaataatttattcattataaattatttattgtattttctattgaaagatttgatagaaacttgaaaagatataatagaatggtgtcaacctggtctttaattaatcattttagttactaataaaaaagactgataaataaaataaaaatttattaatagacattca

SEQ ID NO: 29110 - DNA, 1115 bp, Heterodera glycines
  unsure (1)..(1115): unsure at all n locations
ttgttttttaacttagctcatcaagagctttcaaatgataccaaatttgtgtgattttgacccttttaaaagcttaggtgcctcccttttcactcaaatttttaagttttaaaccggttcaaaaaccggtttaaacgctttgccgcgcagtttttttgatggtttaggcgttttcagcacctaagaaaacctataaaagtatttttatgcaattttgagtttgggacctatgatgaatattttaccttttaaattttttagtaaattaaatctcggttttttgtttaagtcagggttcgagtttcgaatttggccaaaatgcatgtcataatcgttttcagcgacctctaaaacccctacaaatatgttttccttgtaatttatgaatttagaatttttgttcgaattcgggttagggattcggaattttgaaaaataaatgtcatattcgtgatcagcgccccaaattaccctagaaatgactttttatttgaaaatttcagggggggtcacaaaaccgaaaagaaccgtcttttggatcaccatgatcagaacactccttttttggtgaaaatctattaaaaacggataaatccaaaattatatttccctaaaaacggcagctctggataaaataatgacgaaaaagctgaaagaattgatttgtttggattccagcaattcgacttttcccgaagtaattaatgtctcccccaaactcactttctttctttctttttcttatctcatcatcacacctaatcaacaacaaaatccaatcggcctcatttgcgacctctcacaatcggcggaatgacttttctttccctccccccccccttaactcagttcaaaatgcgtctctgggattctctcattcattgctacgagaagaagcaattcaaagtccaaagacataatcggaacccaaatttagcatttagaacaaattatgaaatgttgtcgtcgttttttcaccatttcatcagccgccgctttgcttctcccgcgccctttctcttattctatcatttgcattgcctncgccattcgcccgttcattcccttccctttccccccccccgtctctgctcactcgtttttctctaaatttc

SEQ ID NO: 29111 - DNA, 1328 bp, Heterodera glycines
tattttttgatgttcccggtttttctttggatttagcttgttttggtcaattttggaacaaaagcgataattttgaaatttttaatttttgactttttgttcgaattcgggtccgggattcgaaattagtcaaaatgaatgccagattcgtaatcagcgaccctgaaaaccccaaggaaaagtgttttacacggcttttttaaaaattttaattttttttgaaaaatgggggggataaacttcagtattaccaacgaatttctcgagtcgaaagtctcaaaaaagcacaataaatttatgcaattcaattcattcaccaaacgatcatgatgcattcaaatccaacgacaccattcggcagcggcgtttgtgggattggaaattggagcacaaacgtcgttgttccatttttcaatttgcggtgttgcgatcgtcgcctcgccacggacgggcaattctcagccggccaagtgaccattttcggctgttgaagtgcgtgtccaccaaacagtcgaatcagtcggagacgaacgccaaagccaagccgactttggcatgtgccagcagaaggaacacatcgaagcagatacacaaatgaaactgaaaaattaataaaaaggatatcaaaatggtaagtttgagagtcaaaatttgctgattgtgagacgcgagaattgatgaaaagagtcgagaaacaaaacccagaaaagtggaatttattgaatcgagaatttcgatttctaaaagcatccaaattaaacattcttggtatcattcgatagtcaatcctctattaggctaggctgcaaaattccaaagaatttcatcatgtttcaaaaaattgcttttctgaatttgggtgattctatcgtgtctctttttttatgtcgtgtaaataaagtgcaatagaacaaaaggtaatagtaccgatggtatcacaccttttgaaatttttttaaaaaatttcaaaagtcatattactatttattacaccgaatacgtgaaaaattttctacagaaattgatttatttattttcttgatacaattaaaagaattttcttttgagattcgggaccaagagccaaaaagccgagattttgttataatttttctgggcagcggaggcgattagacggactgaaagaattataagtttttgccaactcttttttgaccaggaacaattccgtaattacggaattatttttccaattacggaataatccgtaaatactttattgcctcacagccctcccataataaattgtataaaaatttaaaaaattggtaaaacacaaaaattctgggggggggggtgggaaattg

SEQ ID NO: 29112 - DNA, 433 bp, Heterodera glycines
caaaaagtgaggcaatttggaatttgtgatttaaaaagtacaccatgcgggattggagaatccgggaccgtttcaggttgtccagggtcgaatttaaagcattgcgaggcttgaaataaaaaagaaaataaatattccagaaaatttttaaaaatttctccatccaacccattttagcaaagatctcaaatagacagaagcaagcaaagcaaatttttaatgtcattgcattgtcattagactcatcattctcataaaatattatctttctcccccctttcaatttgacttttgcgatttccctttaataaatacaaaatgaatgcttctctgaatgagaaggctcattaaaaagctactttaactttgtcgttttgtgacgccagcaaaaggaagcggagtgtgggagaaaatgggataaataatatgggaa

SEQ ID NO: 29113 - DNA, 1891 bp, Heterodera glycines
catttgaaaaactctatcaacctgcaaattttcaaaaaattttattgatgtacaaaaaaatcagggcaaaaggtgttcgaaaaactaggtttttgagttccttctgaccataactttttgaaacttaacgaaactttttgaaattttgcaaaataaaaacgaaacacatagagctatcgaacatcatcaagagtgcttaatttgattgacaaagtctcccggcgacagtttcggccggtgatgggatgcacccggtgaagagacagtcgggatggatcgatggatgaaaaggaagggggggggagagacaaagcatccacgagagaaacgagaggaggaccgagagagaaagggagaggagagacaaagcatccacgagagaaacgagaggaggaccgagagagaaagggagaggagagacaaagcatccacgagagaaacgagaggaggaccgagagagaaagggagaggagagacaaagcatccacgagagaaacgagaggaggaccgagagagaaagggagaggagagacaaagcatccacgagagaaacgagaggaggaccgagagagaaagggagaggagagacaaagcatccacgagagaaacgagaggaggaccgagagagaaagggagaggagagacaaagcatccacgagagaaacgagaggaggaccgagagagaaagggagaggagagacaaagcatccacgagagaaacgagaggaggaccgagagagaaagggagaggagagacaaagcatccacgagagaaacgagaggaggaccgagagagaaagggagaggagagacaaagcatccacgagagaaacgagaggaggaccgagagagaaagggagaggagagacaaagcatccacgagagaaacgagaggaggaccgagagagaaagggagaggagagacaaagcatccacgagagaaacgagaggaggaccgagagagaaagggagaggagagagaaggaatggggtcaatatttgcttagtcatcggccataataaatttggcagcagaaattgcaaatggagggaacccataactcttgcccttttcttttttacaatttgtgatttggaaatgaacatttggtacattatagtgttgcttgagaccccgaaactttgcataaaattataaaaaaagggaaaacaaattttgaattaacgaaccgaaattgaaattcttcaggaagaatttcaacaaaaaaatgaaaaaatgtatgaaaattcaaaagaaaatgccaaggaagaaaagaagaaattggaaaaagcattgaccaaaagcaaaagaaaatcggcaaagaccaactctgtttaatgaagattatgccaaatttggcactttcaatgcgtcgccattttcatgaaattttttcgtgtccacgaaaaatttggcactttcattcgtcaccatttcataaaaaaatttcctttttttaattaaattttttgcttttcttttcaattttttcaattaattttccctttttttattcatcacaatgtttctgtcatttttccattttatgcatttttatactttttcttttttatcttttttacttgcgtaaatattggaataaatttttgcttttttggattataaaattattgggtttaataattggctagataatacaccttctgaattttcggcatcatgtggagagattccgcaaaaaaattttcactgcgcgagtttttttttgaaaattggaaaaattcaaaattgaatgggacctgtgagtgggagctcaaccacctcggcaacaaaatattttagagcaaaaatttttcacgttaatatattaaattaattacattttcatttattgtttttcccaattaaaatttaggatatttcttttct

SEQ ID NO: 29114 - DNA, 1009 bp, Heterodera glycines
gcagtcttgaagaaagcgcgcatgtctctcagccattttttgtatttgttttgtttctcctttttgtcactttcttcccttttgtgattctttttgccagcaaacgaatcgaaatgaatgcccattttcaaaaaggcattcagtgccgaaaagccgcgcattgcgagtcgccaattggacatgtctctgtaaggctggacttggtgccattcaatgcccaaatgatgtgccatccgattgaataattgttgcgagatgcatttcaaccctttgcccgacggaatgcccgtctttttgaattggcttaaattttccataatttggcgaaccgttcggtttgtctcttcaatggcagaaagctgctttttccttgcttcttctacatcattcccgcttttcaatgcttcatcattgtccaatttgtccatcatttcttgtacatttattcggttcaaaaatttttccaccaaattttttgctttcgcttttttttgcgtttcgttgccaaactttgcgcattcctccatcaattgttcatattctatggttgtgtccaaattggcctcaaccatcaaattggccaactcattttttaagctatgtcaatcaaattctgattcaaattttgcaatttttctttggcattttgtttcctttttattttcaaattttccttcaaatacaataaatttgcataattttccgctgaaaatttcgtttttccatttttaatacaaaatttatgcaacgttttgatggtcatttcggcattggcaatgtctttcaacggatttaaaactccatcttccactgtttcatctgcttcattagtcacctaattaatttgttaattagactaattaaaataactattaatgctaggattgattttatgtgctataccctctgaaaatgtacataattttgagatagtaattttctatattttaaattcaataacataaagaaagtaccaatattttgccttaaatgcttaattaaattttat

SEQ ID NO: 29115 - DNA, 540 bp, Heterodera glycines
actattttgggatttttactcactattttagttaactatttcgagatttttcgtcactaaaagttgcggccctagtgatcagcgacccagaaaaccccaaggaaatgtgttttacacgcttttttttaaatttttattttcgaaaaatgcggggaataaacttcagtattacccgtaaagtacctatttttgtatgttaatgatagaatagcctgaaagacggagaatgtcaattttatttcttgtttaattcagacttaaaaagtgcatttgcgccatttgattttaaatattttgctgccaacaatgtcaaagtaatgtcactaaataataagacgttctcgtcttttaaatatatcttatttgattttagcattcatactctcggcggtgacgacgataacaaatctcgacaaaggtccaactcaagtgacgatgaaaacagcgatgaggggaggcagggcttttttgttggcggaagtgatcacaggtaaaccaattaaagttgaaatttaaaatcttattcccttttaatagagt

SEQ ID NO: 29116 - DNA, 876 bp, Heterodera glycines
  unsure (1)..(876): unsure at all n locations
ttacntctttttcttaaaataaaatttcaaaccctaataattttgtcaaaccttggacattaagtctgaataaatattcgaatattatgtccaaatatttattatatttttggcattctgtctgttcatatccttcaaatttctcccctttttgtcacattgccaattctcatacaaagatcactttcatcttggtaaaatgctgccgcttggtactcttttagtcgcttaaggaatttgttaaacttcacatttcctttcacaaagaccgaaagtaaggcttcatctaactaaatttaattttaattaaaaataataatataatttttgcttacccatgtatatgagtcattgaattttgaacccaaaagtattttatttatgtcatcatttatctcattggctctccgtggattatctttttttgccttttcttctgcctttttaaacaaatccttcaaaatgttttcaaatttatctcgaattattccgtctaaagtttcctttttcggatattcattcgctgtgtcaattgccaattgagaagacgagtgagagaagagagagagggaacgagagagagagagaaaacggtacttgtgtgggtcacctgactaattgcaaaaaaatattccaaacgtctataaacggattccctccgaagtggccacaaggatagatggagctcggtaaaaggtatactcggtgaagagaacgattaaaggacttggggacgaactgtccttaacctattcacaaactctaaatgggaatgaagccagggttgcttgactcagaacccgggcgctgaatgtttgagctccaagtgggccagttttgggaagcagaactggcgatgggggatgaaccaaacgt

SEQ ID NO: 29117 - DNA, 833 bp, Heterodera glycines
gttgggtcagatttactaaaaaattaccgaatcggatggcctttgtttttgaaggtcctccgtttggtcggtgctcctctgctgttccccggccttttgttcgtggactgtgcccactttcagtacaatcactgctccctcggcctctttctgtgggcgatctcttttctcgagaagggccgtctccgcgccggtgcttttttctttgtgttggcccttaaccacaagcaaatggaactttaccacgctttgcccattgccgtttttctgttcgcccgttcattcgttcacacaaatcgaattcgttcattgttttcggcaattggacaaaggcaggacattcgatgaaattcccctcattttctattcatatttgacttttttcagtgtctttaatttgtttcaattggctctggtggtgctgctcacttttgtcattctttggtctccattcctttggcctgagccttcattggccctccaattgcttcgacggattttccctttccatcgtggccttttcgaggttttaattgtcttagtttctaataattattaaattgtccaaggataaggtggccaatttctggtgttgtgcttctgtgctggtcaaattcaaacaaatgttctccataaatgtcctcgtcaaggccaggcaaaatgctcattttctttttctttgcaatttcttatgattttacctttttccgttcttttcagtgcctttttggtgttttttcgcttgcgttccttcgctcttttgccttttttattcgcccaaactcttccaatttgcgcgccgtattaactggccaacgcattggccttttttc

SEQ ID NO: 29118 - DNA, 596 bp, Heterodera glycines
ttgaaaaattcactgcgaaaaaattcttgatttttgatcccgatgcagtttacgatgttctaatttccttaaaattgttaaaaatgataataggaggcgaaaatacagaaattgacattaattgattaaattgtaaaaaaaaatatttaaagctatgttgttaaatgttctagtttttgaccctacagtctgactttttgggcatgatattctaaattttgaaaaaatttttttataaaaacctaatataattaccatccctatttttcacaatcgaattgatcaattataaatattagataaaaatttgaacaaaacttagcacaaaactaaaaattaaaaagccaataaataaataaaaaattgggttttagcaaatcccgataatcccgcgggatcccgaaaaaaaatcttcgggattgatcgggatcgggattcggtcgggatcccgactcgggatccgtcccgatcgtttttccaaaatgttcgggattgatcgggatcgggattcagtcgggatcccgactcgggatccgtcccgatcgtttttccaaaatgttcgggattgatcgggatcgggattcggtcggtatccc

SEQ ID NO: 29119 - DNA, 951 bp, Heterodera glycines
gatgctttcactatcaaaaagggagatgaataaaaatctaaaaatttttaattgctttttaaacgagcgaaaaactttaggcttaactttttttttataaactgatcagaagcgaaccagattttgcgagggcatcaaaaagacaaggaaaagcactgctatgatgctaactccagtaattctgaatttaaaattttttattaatttttaaagcttcactattttatttttttagcaaaattaattcataaatattttttcacaaactgctctgaaacgcaccaaattttatttacaagttattttaggcactcagatgctttcactatcaaaaagggagatgaataaaaatctaaaaatttttaattgctttttaaatatgcgaaaaattttaggcttaactttttttttataaactgatcagaagcgaaccagattttgagagagctctcaaaacagtacaaggaaaagcactgctatgatgaaaaaatccagtaattctgtttttaaaatttttcaaaattctgactttttcattacttatttattttttgcaaaattaattcataagtattttttcagaaagtgctctgaaacgcaccaaatgttaattaaaagttaaataaggctctctgatgctttttctatcaaaagggagatgaataaatattttaaaaatttttaattcctttttaaacaggccaaaaagtttaggcttatattttaaaaagtttcatcgaacctagcgcactaaaatcgatataatctctccaaattttgcaggccttctccattgtaaaggactaacttaacctgaaaaaatgccaacgcttgttgtttttaaaatttttcgaaattctgactttttcattacttatttattattttgcaaaattaattcataaatattttttagagacgtgctctgaaacgcaccaaatgtaataaaag

SEQ ID NO: 29120 - DNA, 986 bp, Heterodera glycines
cccccccccccctctcccctaaattccctcctgccttaaattgtcccctccccttgtgtttcccccatttaccatccattatttgttcagcattctcttgaatttcggcttcatttgcggcacgagtttctgatgttgggcatcctccaggtggtggagcaacttcgctccgcttcgcctgagggcgacggctcttcgcttggggaccatttggatttgtttgagatgatgcgccaggaggacgaacaggaaatacgaaggtgagaagataaacaaactgttgagggattgacgaagatcagccgacgcggcgcaattgacagacaatccaaacaaaagtgaaagcaattggcacattgtcaaaaagacaaaaggatgccgtccatttccaaacgccgaagtttccctttgcttttttgtcgacctcaccctcgcccaacttatgtttttcaaatggcacagtttgtccgattcgggctcaacctcaccaattgacttcgaaagtccttctggcatggccgaagtgctcacccagcgattggacaacactttggcactgccccatctgatctcactgttccagcaccttctgatggttccttccgatgaaaagaatttgcccctttggcgactgttcgatttggtcctccaacaattgacacttcaaagtgccatgggcggattggtctgtttttggcgtcacaattaatacaccattccaatttggttcggttttgttttaggcatctgtctgtgccgacccccaatttggccaatttcccatccgattggacatggacgaactgttgacgaggtgggccgatcactttctctcgtgttcgtcgaacttttggatttggcagactgaagacgcaggaagactgtgaacaattggagggcaaactgagagagacggagcaggaattggagatggagcggagaagccagggcaggttggagaacgcgattgagcgacttgcaagacg

SEQ ID NO: 29121 - DNA, 1356 bp, Heterodera glycines
  unsure (1)..(1356): unsure at all n locations
tttttagtccatataaatccatatttntgggggttttcgccgtttaaatccatatttcgccatttttgggtttttagtccatattttggccattttttggaaattttcacaagaaaaatgaaaaaaaacgaaaaatacacccctaaagatcaactttttggaaatttttaaaaattacaccccacaaaacacgaaaaatttgagttttcgtcgtcattttggcattttcaataaatattttcgtcatttttttgcgaacatttctttttttttaatgagaattttttcgaaatttggcaaacttggaggtgtttttgatacaacgaacaacaataaaaaatatgcatttttaagttttaaaccccattttttggttgtttattgtactttttaggtttatttaagcaaatattaaatatgcacaccttttttgggatttttgggggtttacaacatatattttggcattttttatccatattttggtccatatttggccatttttggcctttttagtccatatttcgggcttttttagtccatatttaatgtccatatttcgcgttttttagtccatataatttacaaccctacatattacatatgcatatattttttcgtatatattttgcaatttttgagaatttttaaggaattttttattaaatgcccaaaaaaaatccaaaattacacaattttttcaaaaattttgagaatttatagaaatttcttgtgaaaatttaaaattttttcttgaaaatgttcaccaaaaattaatttttaaaataataaatgttgatttctacgcctatttaggtcatttttatggcattttgagcctattttacttatcattttcgcagaaaaaatttaatggaaattgttaaggatggcgctaaaaactgacaaaatagttagttttaggtctaaaaataacccaaaatgggtgctaaaaatgggaaaataggtgccaaaaaatttcaaatttaggggtgtaaaacagggatgtgcctaggtttcgcttttcgcatttcgcctttcgcattattcgcattttttggcgtttcgcatttcgcttttcgcatttcgcctttcgcattttttggcgtttcgcatttcgctttttggcgcgaaacgcgacttttacacccttaagaattggattaaattcccataaaatttttcaaaattttacctataaattggctaattttcagtgaaaacctgtttataaatgatcaaaatttccaattttttcccaggcggcgcctatcggcaccgccgcgcccccaaaactcctattttttcttataaaatggcccaaaatcgcaaaatttggtaatttgatgaaaaact

SEQ ID NO: 29122 - DNA, 966 bp, Heterodera glycines
ccgtggcactgtgcgcactgctggaacgtcgtcttccctttctggcgcttcgacacatccgaaacaccaacatcgtggacatggatctcaaacaaccggcacggcatctgcttctaagcgtatgtttgatgtaccaaatttctatttgatcattcaccattcgtttttaagaacgccgtggcactgtgcgcactgctggaacgtcgtcttccattgctggcgcttcgacacatccgaaacaccaacatcgtggacatggatctcaaacaaccggcacggcatctgcttctaagcgtatgtttgatgtaccaaatttctatttgatcattcaccattcgtttttaaggacgccgtggcactgtgcgcactgctggaacgtcgtcttccattgctggcgcttcgacacatccgaaacaccaacatcgtggacatggatctcaaacaaccggcacggcatctgcttctaagcgtatgtttgatgtaccaaatctctatttgatcattcaccattcgtttttaaggacgccgtggcactgtgcgcactgctggaacggcgtcttccattgctggcacttcgacacatccgaaacaccaacatcgtggacatggatctcaaacaaccggcacggcatctgcttctaagcgtatgtttgatgtaccaaatttctatttgatcattcaccattcgtttttaaggacgccgtggcactgtgcgcactgctggaacgtcgtcttccattgctggcacttcgacacatccgaaacaccaacatcgtggacatggatctcaaacaactggcacagcatctgcttctaagcgtatgtttgatgtaccaaatctctatttgatcattcaccattcgtttttaaaggacgcgtggcactgtgcgcactgctggaacgtcgtcttccattgcaagcacttcgacacatccgaaacaccaacatcgtggacatggatctcaa

SEQ ID NO: 29123 - DNA, 938 bp, Heterodera glycines
  unsure (1)..(938): unsure at all n locations
cgggccaggacgttttcgtaccgccgttttcgtacgagttgatttgcaaaaaaaaaaattgcattcaaataatttttttaatctttaagtaattacttttaatgttttgacaatttaagcttctattaactacaaaatgaaccagtagcaagtaattaaaacaaaccgaaataatgataagttggtgcattctactctatgtgttccacaaattcagtaacgatggacttaacaatattgtccctcaaaatgatcacaattatgccaatgccgatgtcaatcccgaaaaccttaacaattttctccgtgtatttcccgaaactttgagatgcgaccttattttgtcccggaattttgttagttttgttagatttatgaattttctacattatattttatgaatgggaaataaaaatgataaattttggttctattagtttccaatgtcaaacgctttgcttgggactgtgttttcaaattgacaaaggtgctgggaactcaagaatatttgaaaatttttaattacgacgaatttttttatatattttttaggttttattgtggtcggaaaaaacaaaaaactgaagtgtatactttgtcagtggactaagaaattaactaattgccaaattaattaattaatgacaaaattaagggttacaccgccaatgtgttttaataccccaacattttctccagttttttccctttgctggaggtctgacttttctacttttctgcttctccaatccaacttttacccatttgacctcatttcatcttttccaaatgtcaatcgtcttctatcaccttcatcaactttttaaatctaacgtgtaagtagacaccccttcgttagatattttatttcttaataaataaaataaaataaaattcactatatttgccanaattgaagtaatacacccaaaattgcc

SEQ ID NO: 29124 - DNA, 1008 bp, Heterodera glycines
attttgtggcaacatccgccatgccaccagagagtatccaccggaagatacaataagggcacacatatgtgatttacgacgaaaacgtaacgacgacaaatccgccgaatttcccccggccctcgaaattgatgacgaaatcggagggttttgattgagaagaatgaattgctggtcctcttctccggctttgcattccattatcgttcgctgatcattcattcacatatcactcactcactcatcaaatcatcgaaaattttcctcaattgtctctctcctcatttcattcattttttatgtacaattgtcgtcaaatacatatgtatgttcaaattctttctttgtacacatcatcatagggatggaattccgaggccccctaaaaaatttcagaagtcggtacagatttgcgttaaaaattattcaattatatcgatcaaaaatgtattctattattatatttttcataaatttcagtgcattcgggatcactaaatcagatttttaacattttttgcggcaaatttccaaaaacttggtgaatgtgcgaggggagaggtccgatggtgccgattctttatatgaattttgttagaaattagccaaattttttagaaatttcccttttttagatgaaaataaggtactaccccaaaatcagaacatttcttagaaataacaacatagaaaaaccctgtattatttggagaaaaaaataaaatcaaaagaaaacgtcaaccggtgtcgaactcataacaaaaagtattgttaatgttgaagcactaaccactaaaccacaaatatgttaaaaatttaagcaaatttactttatttcataaaaatttgtaaaagatggttaaaaaattcaaaattgtataaatttttgcctttaattcgacgaatatgccattcttaggggtgtgtttttcacccccgcgccccgcgggggtgaaggtcgcgggggcggggacgggggtgagccccaaaaacctgtcccgcccccgg

SEQ ID NO: 29125 - DNA, 1731 bp, Heterodera glycines
  unsure (1)..(1731): unsure at all n locations
acaattccagacccacnatgatcagatccatctcaggcttttttcaaaataccaaactcaattatgaataaataaaacttgctttattttcagagaaaaaaaactgttaacaaattgcactcaaattttgaaaaatttttcctgcggtgtctaccggcgccgtaagcctcctgttctcaaaagttttttggaaaaatcgcgccgcaattttattatttttattcattttgaataaaattttccaaaatgctgatttttgacatcaaatgaaatggttaattgttagataaacgaaatttctcgaggaattttgctaaaaaattaaaaggacaaatttaaagtgaaaaatccaaacttttgcataaataaaaggctccacaaatcgagcagcaattatttaaactgttttgtgccaaagacaatccattaccattcaccaaaaaaaaaagtcttaaaaatcagttcctttcgaaaaaatcagtttgcaaaacagtaaagagtttttaacgttaaattgagattcttgatatttatttttaattaaaattagatatttcattagaatctgacgcgaattgggtaaatcgatcagcagatagctttttattttctaaaaaaaaattttctttttaattttttaaattccgtttaaatttttgtagtggtgtaattatctgtcaaatgtcttctccttcgtccaaatcgagcaatttgaaggagcggatgaagtatttgttgagtacgggtgagaaagcggatatgtactttttagccaaaagttcattggttttccagccaaattatttgtccatttttgcccctctggcgagtgattaattagcgattgacaatttttgcttctcaatttcatccattttcctatcacttcatcccattttgtttatgtgtaatttgtctcacttttcccttttttcgtggccatttctttccctaaccgccgatttgccattccccccccccctcccctaaatttctcttcattctctttttgactccattttttaccctcgtcatgttcgcccctaatttggccaatttctgtccaaatgaacgctattcccgagtcccactcaaagcccataaaatttcactccaactttcaaagtccacaatttacaagtacggtatgaatttcaacaaaagtttgccaattgctgataatcatccccaaattatcgtgaattttttaaattattcatttataagcattacaatccgaaatttcgaaaaaagcctggaaattaaccttgtttccatgttggacctggacaaaagtccagtccaggaaaaacccaggctcgtcgaggcctggattcagcactctggacctgcatttttttgaaagtaaaaacaaacaaaaatttaaaaaatcattaattgacgaggaatatcaaaaatgtctaattgacaataataacaaaaatatattttaaaatctattttatcattatttaaatattggtaaagcctatcgagaagttcatttctcaaaaaaatcaccttgatttaaaagttccggtagttgaggtgtcttcaagggggtacacaattagtgatgctcgagagtatcgngtcgcgggtttttcaaaacgagactttttttacattccctaatgattggctattattanacttanaaatagtctttttttatatgttttgggcaacctaaaatttatanattttcattttcgaaaaaaatttatttgc

SEQ ID NO: 29126 - DNA, 1162 bp, Heterodera glycines
ttgattcattttcaacaaaatgttttcccaatttttgttcttcttttcaaaataattttgctgacttttgtccattttttgaagctcaaataaatttatgtacaaattgtcaattgctttgttaattttttctaaaaaaattgaataattatgaataaaaattaataaattaatttcatttccaatttaccaatttcacacgaaaaggaaacttgaaataattgagcagcaattaataaaatggagcaaacagcaaactcaaatgcattaattagcttcatttaattgagaagtaagctaaacataaatatttatattttcatatatttcttgaaaataaaaatatataatttataaaagaaataaataatgaaaattacttatttttatgaattcatggcgaattttattatgaataaacgtggcaaagcttcaatagtcaaaacaaaattttgatgcgattcaatgggatgagggagaccccaagaaaatcatatgaataaaaaattatttgcaattttattttaattgattttttaaaataatttataatagtttcaaattaagtttaaaagatttaagatttttttttaattaacaaatatgggcataaaaattgatgaaaaagccggaaaatgccaaatgcatatcaattgtttaggcacatttcaattttttattaaaaaataccaaaattaatacaaaatatttaaatttttgcaaattttataaaaaatgatgtcttcctcatcagctttcctttgttcactaatgaccaatttttttttgatagaaattttaggttggctgtttaattatctcatatgcttgcaaacccggcaaaaaaaccggcggagttgggaaaaaactagtgactaaaaaaaaggtaggaaatttttaatttatttaaatgttttgtaaagcattattatttcaaattataacaaataagtttgtgtctgttttgctttctatttcatttaataaaatataaagttcattttttaattaagcctattttaatactccttaataggtccatagataaaatgaatgtcatagggtaggaattttgatcagtctgatgagagtcaaatttttctttatttgaatcaggacgaatttttcaataaacttcttttttcatcgctcattatgcatt

SEQ ID NO: 29127 - DNA, 367 bp, Heterodera glycines
agcatactgtaaaaatgatacggtttttagctgtgacaatgagacacagaaaatgaccatgccaatcgacattttggaggtgaaccaagtgatttccatccgactgttgactgataaaatgctggataacacaatcacgctgaaactttggcactcaattcaaggaaaggaaggtaggtagaaaaaaatcgtaaatcttttaggaaattcaatttttttttaagaccctttattttgagatttcaaatttacaattttctggcttccgagtgttccggtttcagaatttatctgagcctcgctaacccaacctcagtaactgaaaattttttgaagccacaaaagctagcgcaagtacattgttgtg

SEQ ID NO: 29128 - DNA, 1280 bp, Heterodera glycines
aaggagtggcactaacgcctaaggcgcacatcagcagagggaccgaaggcagcagcgactgaattgggatgatcaggaatcagtgagctttccaagtaatcaatctgctgatccgaatgaccattcagcagatcatcagctgatcagtctgttgttcgaataatcaaactgatcagaatagttggtaaatccataccaacctgaatcagcaatgttttggtaatttggccgttcaattccgaccatttgctaagtttatattccacaaattgacgtctcaaataagcgtgaattttcaatgcgcaagtaataattgtcgcgtaaaggaaaatatcggagaataacagaaaaaggaaacttccggcgacgaaaaggtcactctaaagagaaggaaattcgaaatttacacctaaaaagcctaattaaggcgtttagtaacaaaaaatttacgggatcgcatcgtaatgccaatgccaatgccaatttgtgccgtcctcctccgtccctttgctcccccggcgtcaatgccaacacagaattttttgggtagccaaagcgttggagttgagcatcggttgacggatagcaacttattgaaagagcagctgcaacggaaaattcaaaaagaagcgccacggagagaaggccaaaatatttggggatgtccatcggaacctttctgaactgattaaatgagtcgggggggggggggggacaaagggggttcgtttaggccgaagccaaaaagattttctaaaaatatttagtattaattacttttttttaaatttttttaaaatttcgctacttatgtttgtgtgtttatgtgcttttcacctgcaaatggtcaaatagcggtagatgaattggacggcgattccttcgatggaaaagtaaaaaaggccaaaccaaagcataaacacaaagtgattggcgggatttggtaatgattggagaggccctgccatgacgtcgaatccgatgccattctccacgaagaacacctgccaaaggcaagggccaaatcattaggacaaatgattgggccaggaaggcgcaacattaggcggacaacccaccggaaggacgagggcggcgaggatcagcacaaacaaatcgacgacgcaagtctggacgagaagctgactgaagacacgcatttcgttggaagtgcggcggaggagaagccaaagcaaaagcgaattcaaagggacaccgaataaaaggcaaaacagcgaattgagctgatggagccacaaaacgaaagacatttggagggg

SEQ ID NO: 29129 - DNA, 2130 bp, Heterodera glycines
  unsure (1)..(2130): unsure at all n locations
catttattaggggttatttttggacatttgtgggctagccatatatttgattttggattaaattggttataaaaagctgatttggtagcgcaaatgtccggactgcaatgtccgatttgcttaagccgcaaatataaggaaagtttttttcttaaaagaacaaaaaaaacttccggttcctacttcccaaatgatactgagaaaagggttaattagaaaatctgtgcacctttttcgactgtgccctttgccagtcgattgctgcggttgtttgtccagcgatatttgattcggttggatgatgaatggttgtgcgaccaaagtgcgcaaattggccagccaatcatcaaaggtgtcaacggttgccctctcatcgttgccggagtccatggaaaagccccacacgtcgccaagcgaatgggccggcgggggaaagacgggcaaagcacctaacaatatggaaaaccataatactggtaaaaaacaaaacaaaaaaaacgaacaattgctcatgcgtttgcacaacggacacagatactcgttggcctccacgttgagcattcgcgcgtttaacatgtgcggacgtcggagacgttcacgcgtattgttcgcatcgatgaatctgcaaaataatcggagtaacaattgaattaatgataaaaaatgactgaaatagttacttttgattaaaattaaaaaaaaaacagaactgtttatagcatgaaaagtgcatcaaatgtgagcaggttgacacgtgaagctcttgcggaaggccaatgggcgcaaaaatgttcagcatttcatctccaacaacacttgctaattggccatgtggcaactgcgaagcgatcattggcacacattgacgggcaaagagtgtcgagctatatgaaagaaatggaaaattaatgaaagaggtattcgaaaaacggatattgataccagaaattgggtcggatagttcaaccgacatccgcgtgtcagcccaccccccccccacgggttcaaacttacatagaggtctaaacagcattaaatttacgaaaacttgttcttttggtttattaggaataataattacgatgaatgaaagattaattattttttgaaaaattttattgacgatcaaattatcgcaaacaatcattttttcgcttatttaaagcagtttagtccatctacgattgaaaactttaagttttaacccgattttggacatagggcgcaatgtctggnngcgcaatatccgaggaaacactggntgggttaacgacacaaattcttaaaaaaaaaattcaaactcattttttaaaatttttcagctatttttttcagnttcatttatttggaaactcactttttgaacaaagggcgagcaaaacatttccgttgccggcaaaaaaaatgatttcctccctcctggaccaaaaggccactccctggagggcaaaagggggcaatttcaaggcggagattttgcggggccccaaaaaaaaggggaaaacggggggaggtcggggcgccaaaaccctaaaaaaaaaggttaaatttttggaaaaaaaaaaaaaaaaaattttcccccaaaggttttcaaaatttttttttttaccccgggtttccccccttttaaaaggggccccccccctttttttgtgtccccccggggggggtttggtggcccccccttttttgggggggcccccccccccccccccgggggggggaaaaaaaaacccctcctcccccccacagggggggggggaaataaaaaacaaaaaccccccctttttttttttttttccttttaaaaaaaaaaaaaaaaaaaggggtggtaataatattttttttttttttttttttttttaccaaaaaaaaaaaaaaaaaaggggggggagaggggaggggagagagagagctctccccccccccccccccccccgcccacaaaaaaaaaaattatattttttttttttcttcctcttttttttttataaaaaaaaaggggagggtttttttttttttttttaaaaaaaaaaaaaaaagagagggggggggggggggggggggtggggggggggggggggggggggggggggggggggttttgttttttttttatttatttttttt

SEQ ID NO: 29130 - DNA, 1593 bp, Heterodera glycines
  unsure (1)..(1593): unsure at all n locations
agagaagcaaataaacgaagacggaagaaaggcaaaaaaaggcaaaaaaggcggagggaatgaagaaaaatttaaatttattaattgacaggggattttggaaatattattaacttaggaaaatctcagattcccaaaaaatgccaatttcctctttcaaacatttaattttcattccgtagaggggcaagcccttcctccttccccccccccccccccgggtaataatggccttttcggcgtttgatgaatcaccgattccaaaactcctcacgtccattatttctccttcatccattcattgtcagcttccatatttcagttttgcttgatcatttgtcagcacacataagtcaatgacaaacagtcgatttgccctttattatctcaaataaatgcattttattcctttccaaatttatgggaaacatttagcaaattgtcaaaaacggctggcgcaaaaagcgacccatggcaaagggacaattttgaagataaaattaaagaaatgaaattaattgaacagaggaattgaagtgggactaaaatgagcgacgtcgtagtaataaaaatcctttcgagtgggagagacggaccgacgaataaaaagcggactacgaaaggggggggggggggacatttggccgaatttaaaaagcgcaacaaaattagccacgcagaatggaaacacttatttgtagggattttttagctctgaaccaattgattgaaaattaaatgcgccaaaaagttcgcttttttgacaatgaatggtttactcttttctctattaacatttgtttttcaacaaaagtctccgtgggaacgaaaacgaaaaaaaagttattatgaggcggtaggggtcaactgcatcttattgttagataataatgggccaataagtcaaaattaacattctacagatcggaactaccgggaccgggccccgatcttagataattgaccgggcccgggcaatccggttcaaaaaagcccgtttaaccgggcccggcccaaaattttggacaagtcgccagacgggcccggtttattagggacaatctttttgtgatttaacattagagtttccatttttttaagaaagggaatttatgatttagatataattaaagttcgtaggtgtttttttcaaattcagggcaaacagagttaatgaattttgacccaaattttgggctatcgtttcatttcccgggttcttctcaacaatagcggattttaattgccttgcaccggtcgcagcgtttatgtttatttttcagcattttcttcgctgaaattcgatttttgccttaaaaatgataaaaaaaatcaaatattggggcgaactttggggcaaaagcgagttcgatcaaaagagttgatttttaccgggggcattaatggtgaaaatggcattaatagttgggtcggcttttgttatgttccgtaacaatggcttcttctgttcgacttggccttctcttttcccctttattgatttgtctcttaattgccaaatcttcccgtgtctgaacggaattgtcanattcgttgggtgaagcaattggtccgattatggtcatcaaaagt

SEQ ID NO: 29131 - DNA, 927 bp, Heterodera glycines
ccggcgctcagttggccctcggatcaaaatgcctatagttttcctggatgcgccgtcaaaagatgcccccaaggtcaaaatctcgaacccctcccgccagtggttcccgagatttttgttttagcaatgaaactcgatgttgctttagttatatataaactagcgtgtgggaattgacgggggcggcgtaggccgttgggttttggatgaagataaaatggacatgctcatttgttattttaaacagacaaacattaattgcattagtgtgaagttttaaagcgctatcgcgctatgggacgcggcttcgccgcgtcgctagaaagtgatgtaatttagcaattcatcgcagcctcaggacgggcgattcgcgcccgtcttttaaatttgttgagaacattcggccgcttcgcggcctcaggacgggcgcttcgcgcccgttttttaattttttggggggcatttggccgcttcgcggcctcaggaagggcgcttcgcgcccgtcttttaattttgttgagaacatttggccgcttcgtggcctcaggacgggcgcttcgcgccatttttaatttttttggggaaattcggccgcttcgcggcctcaggacgggcgcttcgcgcccgttttttaatttttttggggacattcggccgcttcgcggcctcaggacgggcgcttcgcgcccgtttattaattttgttgggaacattcggccgctacgcggcctcaggacgggcgcttcgcgcccgttttttaattttttgggggacattcggccgctttgcggcctcaggacgggcgcttcgcgcccgtcttttaattttttaggggacattcggccgcttcgcggcctcaggacgggcgctttgcgcccgttttttaataaattaaaaaataataaacacggcctgggtccgaacatg

SEQ ID NO: 29132 - DNA, 717 bp, Heterodera glycines
ttccccctccccttctccccccccggcgaataataaaaaagttccccaaaattgtccaaatggactcctcaccccccaaattagtccgccatctcaaaagcctccgatgtgcccataaaaaggaagagatagccatccctaagaaaagggtgcaattgcgcaacgctttggatttggattttgatcggcggcggcagaagtgcgcagaagaaaggggggggggggaagcaaagggagggacggtgggaagatgaagcgcaaaaggggacagcacggggagaggacgacgaccagttcctgccccaggggatggacacggacggagacgaaagggccacgacaagcaaatgggggggggagagggggagaggacggacacgggggggggggacacggaccagttgaggggggggggggctgaaaaaatccattttttttgttttcggggcagtccccccgaaccgatgcgcccagatttatggggagaccgaatccttcgggaataggttccctatagcctgtactttaattctgcgttgcatttttgctccccataaatgtttgagtacccccatacggacacttgaaaaaatcgattttttttgtttcataaatattattctcaaaaagtgctctaaagcgcaccaaatttgatttacaacttaattcagctctctgatgctttcgaatcaaaaaggaagatggagaataaatttt

SEQ ID NO: 29133 - DNA, 920 bp, Heterodera glycines
  unsure (1)..(920): unsure at all n locations
ggtaggcagattaaaattttcaaaagcctcatttggcaggcaaaaaagcctcatttttacaaaatttattcaaaacacgtttaaaatgctcaaatgttatatttttgattttccatgatcaatttgagcaatttttgttagaaataagcatttgggaaattctgagcacgaaaaatcgaagttgattttttgcggcacttttttcaaaaacaaaaatggctgattcgcgctaacaaattatttttttcacactataaatgcatctttattagttaatacataatcaaacgagagaaagtggatattattagtcattaataactttggccttttttatccggcactccggctgattgtgagccaattttcttgactgacaaatttattcaaaagctcctcatgtcttaagtaccaaaatttttattaattaataaaattcaggaattccgtgaaaagtttgcaaaaatggaaatggaattgaaattggccaaattggaactcgaaattgtgaggagttttgccataaaaattcgactaaaattaagaaatttttaaaattatttttagaaggtacttgaacaaaagttaaagcatcaggaaatgatggtcgaacagaaggcattgaaggaaaaagtgatcaaaattgaacagaaaaatgaaaaaaaatgaaagaaattgaaaaaattttatggaattcttattgaataattcgataaaattaatgacaacaaattcaaaagctgaaaaatgagtttatggttttaattggtattttattcaaaaatttaattaagctacttcggatcaactctcaaaaatagaaaatgatcagaagactctatttgaaaaagtcagtgaattggagaagcagncaaaacagcagcacgaaaacacgaccaaagggcggggaaatttaagcg

SEQ ID NO: 29134 - DNA, 898 bp, Heterodera glycines
ctctccttccctctttctcctctctctctctctctctacctcaatcaatgctatctctctcttttctctctatcttctctctctccccactctctttctctccgtatccctctctctttcctctctttcttctctctctctatatttccctctctctctctgtctctcccctcccttcctttctctctctctcttttctttctttctttttccttatccatatctctctcttctctcttcgtgtctctcttcccccctctctctcccttagtctttctctctttacctctctatctctccccctccctctctctctctccccactctctttctctgcttgtctctctctccctctctgtctctctccctcttctcgcctccctcttactctctctctttcttgtctctatctctcccctccctctctctcctctctcttccttatttctctcaatgtctcccccaccctctcactctctctctttctctctcttccctcccactcacttctttctctcttttctcttgtttctctttctctctccgctctctctctctccctctctgtctctctctccctctctctctctctctccactccccctctctctctctcctttctccctctctctccctttgtctctctctctctccactctccctctctatctttctccctctatatccttattctttctatatctttcttttctctctctctatcattattccttctattctctttcttctcttgactctcattctctctctctctccccccatcctctttctctccttgtcccctctctgtctcctctccctcccctccctctctttctttctttttttctttctctctttttacttttctcccctctctcactccccttttttccct

SEQ ID NO: 29135 - DNA, 969 bp, Heterodera glycines
  unsure (1)..(969): unsure at all n locations
caggggtattattttgtaaagtcttttttcccccaataaacttttcataccccatttttcgcaccatgaatgttatttttattgaattctgaaccggtttgagtagattagactacaaaaaattgaaaatttcgaaatcatgtttcccactcccttctcccaggggtcatgtttcccactcccttctcccaggggtcatgtttcccactcccttctcccaggggtattattttgtaaagtctttttttccccaataaacttttcataccccattttcgcaccgtgaatgttatttttattgaattctgaaccggtttgagtagattagactacaaaaaatttaaaatttcgaaatcatgtttcccactcccttctcccaggggtattattttgtaaagtcttttttcccccaataaacttttcataccccatttttcgcaccgtgaatgttatttttattgaattctgaaccggtttgagttgcttagagtacaaaaaattgaaaattttgaaatcatgtttcccactcccttctcccaggggtattattttgtaaaaagtcttttttcccccaataaacttttcataccccatttttcgcaccgtgaatgttatttttattgaattctgaaccggtttgagtagattagactacaaaaaattgaaaatttcgaaatcatgtttcccactcccttctcccaggggtattattttgtaaagtcttttttcccccaataaacttttcataccccatttttcgcaccgtgaatgttatttttattgaattctgaaccggtttgagtagattagagtacaaaaaatttaaaatttcgaaatcatgtttcccactcccttctcccaggggtattattttgtaaaaagtctttttttcccccaataaacttttcataccccatttttcgcaccatgaatgttatttttattgaattctgaaccgngtttgagtag

SEQ ID NO: 29136 - DNA, 703 bp, Heterodera glycines
tttgatgatcataaattacggatcaagacatctcttaaaactaataaaacacagtgatcttgctattattcgataactctttgtttcctctattaacctgcaaaattccaaaaaattccttaggtttctaaaaaattatgaccaaaactattcaaaaaatttggcctcttgtgtacttttgaccataactttgctcaaacttgaccaaattttttgaaacttaggtgagctaatagagaactcttagtgctatcggatgataccaagaatgtttaatttgattgacattgacaaaagttatggccaattctttgttgaaaatttccattgatggttttttatataacgcccctttttatagttatacttttacgacatagcaccagcccactccacccacataagaggtggcatattgctaacaaaggaaggtccccaggtgtttacgtaagagggattcgaacttgtgggggcaaaaagtgaaagcgagcgcacaacctttgcgccaccgaacagcataaagtgatgcaattgattattcaatttattgggataaaaaaaagtttggcacgtcataactcggcacccgtacttatttggcagaaattgaaaccatttttcttaagaacccatgggtgctctatgcacccaccaagtttcattcggaaatcccacggacacctggggaccttcctttgtaagt

SEQ ID NO: 29137 - DNA, 1036 bp, Heterodera glycines
catgttgaggtgacgaagcatccttccatcagccgctgtactcgatcgacaagttcttgcggctcaccatcccgtctccctggaacccctcgaccttgaccgcggtggcggctgggttcggcgcgttggtccactccacggtcactcggtcgcccttggtgtcctcgctgccggggtcgaaggcgtcgcaggagccgtccaccttgccggattcctttgggccgagccctccgttcggcgggttcatgttgatgcacttcggttagcgcgtcttgaagatgtagtccgatgtcatttctaatccctaacccgaactcgaataaaaatcgaaattttgaatttttcaaattatgattttttgttcaaatttagattaggaaatcggaattgatcaaaataattgaaggattcgtgatcggggaccccaaaagccccagagaataaatttttatgactatcacaaaaaaattttgcaaaacaaaagggtccccccttttgaaaaaattttcaaaaaggccaactttccatatagcgccgaaaaattcatataaaagttcatttgataaattctcttccttttcctgattttacttaggtaacattcattttcttcaaaatgactaatgctgagtaaacaaaatcaatttaatgaaaatggaagaacggcaaaaagaaatgaaagaatcgatcgatgaattgcattagaaagagagaaaaaattcatttggcggtagtggagggaagattggcaaagggtaaaacttggtaatttacaaaagaaagcaaaaacggcatgacatctcccattcgctgtgctcgttataaatattttaaaatcaaaaattcttgtcaaaaattacaaaaaataaattttaagatagattttttgagaaatttttcatttcttagggtgtatttttctgaaaaattgtggggtcaattcttaggggtgtatgtagagcccggaaatttcaaatttgcggatcctgcattgggggagggaattcaaaaatttttgcaggaccggatccggccg

SEQ ID NO: 29138 - DNA, 1251 bp, Heterodera glycines
aaaatttcaattttttgggcttttaaaaaaaatttttttattttttttcgcgcaggcccttcctttgacaattttttttttttattaaaaaaaaaaaatttttttttttttctttttgattttttaattttatcccccccagaaattttttaataaatattttcaacctcccccttattaatttaaggagaattttgcctttttaaataatttcttttgagaaaagacaaaaaaataggcttttaaaaaatatgcttatataaatcactttattttttctcacttaaaaatttatataaattttcaatttttttgccttttgccaaaaatttttgtttattttttggccagcccctccttctgccaatgttttttattttttaagaaaaataaattttttttttttcttttgaattattttaattgtatttcatcctgaaattttttaataaacattttcaaactttcaccttattaatttaaggcgaattttgccttttttaataaattctcttgtgaaaaggcaaaaaatagtctcttttaaatatgcctatttaaattactttaattgctgtcctttcgcttacgaccataccacgttgaaagcacgccatcccgtccgatctggcaagttaagcaacgttgggccttcttagtacttggaacggagacgtcctgggaatcgaaggtgttgtaagcttttttacttttttcacttataaatttatttaaattttcaattttttttggcttttttcaaaaaattttgtctattttttcggcaggcactgcctctgacaatgttttttatttatttagaaaaaaaaatttatttttttttctttttgattattttaattgtatttcatcctgaaattttttaataaacattttcaaactttcaccttattaatttaaggcgaattttgccttttttaataaattctcttgtgaaaaggcaaaaaaataggcttttttaaaatatgcctatttaaattactttaatttttttcacttttaaatttatttaaattttcaattttttttggctttttgaaaaaattttgtctattttttcggcaggcactgcctctgataatgttttttatttatttagaaaaattaattttttttttctttttgattattttaattgtatttcatcctgaaattttttaataaacattttcaaaactttcaccttattaatttaaggcgaattttgccttttttaataaattctcttgtgaa

SEQ ID NO: 29139 - DNA, 1235 bp, Heterodera glycines
tagagacgggaaattaagcacttaatcggattgagtttgatcaaaacacaggctacacgggttttagttaatcagggtcaagattttttgttttttgaggtttggtctctacttagctgggtttgatcagatcacaatcacacagaacttagctgataagagagattttttgagatttagatcaagactagaggtttgatcaaaagcccatccaattccatggtggcttacacgaatcattgtcgagacttgcagtaaagattggtcccattgaaggtcaattgtaatgaatgctttatgcccaccgggggcatgctgccataattacaatccaaaaaaaagagaataatttggctagaatggcttagactgagaccattttaaaataggcaacgaataaaaatgccagaaatggaagatgcactaagcattgtgatgcgatgcgggggaggggggacgtggcactccacgcacaaaacccagccaaaatgccaaaaaattttcagcccccgccaccgccccctccccgtaaagggcacgcgacgactaaaaatgtaaatgcaatgtaatgtaatacaatattaaagcacccagccaaaaatggccaagagccccgggggatgaagcaggtacggccaaaagggttgtggctgatggcattgggttttggcactgtttggccaaatcacgagtgccatcatcattgccccccggggaggcatcctttagcgccaggacggcactttcgggatccgagagctttgatcgttcgcaaattttcaccggaaatgtcctgattttcggatgttttgacaaattgaatattccatggcatgggaattgcataaaaaaaattgaggtgccataccaaaacttgtgccaaagttacacatggctctctctataccaggatttgttagaaactcggctttagtgtctgtcgagagtctcgaccggacccaaagatggaaaaatatttgtccaattttcacacccaaaattttgaggggaattgatgaacagacagaagagctaaagccgtatatatacaggattcatcatttatcattgtttgaaatttcaaaaaattttcccctccgccaattgagcgtttgtcgagagtctcgacacgctcaaaacaaacaaacaaaacaaattcaaataaaatagtcagtctaggcctttcgccccaaatgttttgttttgtttgtttgacgacctaccataatctattg

SEQ ID NO: 29140 - DNA, 1016 bp, Heterodera glycines
taatgaattttgttaagaaaatggccagctgatttttcataaaaatcggtcgattgtttcagttttttgattatttcggtcggtcggtttcggttaaaaaccgaaaaactcaaaaatgtctcggtcggttttttcggtcaaaaaccgaaagagctgaccggtccgatctctactcaaaatgttgtttgccaaattggcatagtgttggctcgaaagtcacaatttgacccttcgagacaagggcataggctttagcctcccccgtggctaagcctttgcttcaaaagtatcttgaatgatcatcacaattaatttttttggtattgcagatggagtctagctcgctggagtacgaagtgcagcagaattgtaatctgacacaaattggcggtgtgctcggctcaaagggttacggtattgcactgcaaaaaagtacggtgcaaaaattttcaaattttaatctttccttgctgtcttctctctactcacagattccgaatggactgatcgaatctctcgccaaattttgctttaccaaaaacgcggaattatcgcaatgaaaaaagtggagaataaatacgattttttaattaaaatttcagacaaaatggtggcgctcaaagtaatgcggcggcgaggagaatctcgcccaaaaattccaaaattttaggggtgcctcatgccatggcgttggttcgtcggttaagcagcagcgcatttcactgaatttgcacaacgtttccggcctgttcgtcattctctcaatgggcctacttttttcggtgaatttttaaaattaaattaatattttttaaatcttttattattaaggttttcattgtttgcgttgaattctatgcacgaaagcgtgagaatcagaacaacaaaaggaatggacaaaaatgatttttgggacatgaaattcaagacattttaagattaaagcttttaatccacgccaatttaatggtttgagaaagaaatccaatttatcgaaaaaatatgtaaaagtaaag

SEQ ID NO: 29141 - DNA, 802 bp, Heterodera glycines
tgaaatttttaaaataacaccggagataagttttttggcccgaagagcaaaaaaaggtcttaaggttcgcccctccgaaatttttttctggatacgggcttggaaccgtccatcaatggtctcaactttcagtccctcttgtgcctttcttgagactatcgagcggtcacacctaatcaggtcgctgtctccaaaagtgcagactccgcttgcgtcaaacgtttcgccaccactaagaagatgccgttgtgtctgttgccatttgccatcggtccgttcactgcagtcgaggtgcgcacttgtcatcacttcaataatgtggggatggggtaaggcgcggggggcacgctggcacaataattttatcaccaaaaaaagggaattaatccggaagaatctccgaaagaattatgcggccaccgtgtgttcattgtgctcacctcctcctccgttccattaacctttacccttattggcatattggcaagcggacatttcaaatcctgaccctcctctcccccccccccccccctcccttccgccgattggatattaaaaaggagcaaatggggggagggtgaggcggatgatcattttttttgttgttgtcggatgtctgccgaataactgaatcaacaaacacccccaacaggaaccaccgttcttttcctttgtctctcattaaatggggcgacaggggaaaacgcttgttaataaatggtggggcgtggggacggctttggatttttgaaatttaaataagaatttgtgcccagaatctgaattttaaaagtttgtgaag

SEQ ID NO: 29142 - DNA, 1611 bp, Heterodera glycines
  unsure (1)..(1611): unsure at all n locations
aatctccgatggtttgntcggcaatttcgacttccaaaagcggctcaaattcgcaatcagagtcattccgtacgggtttggaagaagaggaggaggaaagggcaaacggaatggaagaagttgttaacgaaacgcctcacttggacatgatggagacgagtgggacagggacggaagttgagaacgcgtcgaattccaaagggaagatcgaacagaggaagtcggccatcgcaccaatctgctcaatcactttgcgtcaacgatcgtccgcaatgaaatttgcaccctccgaaatgaagcggactcacagtgggcactatcacataaaagctgggaaaaaacaagagatcgacctgggaaacctgggtttcatggataatattttgacttgttatttcgagtgaccattccaggcctggattcagctcatgataaacctggattcccagaaatccaggcttttttcaaaatatcaagctctaaaaaattattgcacatcatctttttccttcattggaattttaacttttcctcccattttgtttagttgcaacgcccgctttttttgcccccgctttgccctccgtttcaatttgtgaagcggaagggactccttccttcgccaccgcttcctccatcccctcgacgccgctttctattgataatgtttccgtcactgcttctgggcgcctgaaacgcgcagcggctaagaaagttcggtcatatcaagagccgtcattaagcaagaaaatgcgccgatagaaatgaaaaattgcgaaggaagaaaatatatttatattgatcaattctcagttttgcaaggaaattatttggttttggattcctttttcagcagataaattattttctaatttgaaagtgtgacatttgggtcatttattcttatcaaatggatacgagaaagtattgttagaatcactttttgtttttaccgcatttgtgaatttgttagagcgccgtcatcgcttcgtctgtcgctcccttttcctcgtcgtctctctctcccagcgttttcctcagcaatgggcgcacgtaaatgtgaggcggcgatggtttgctgtcgccctttgcgccgttgttttcatagccattggcactggggatgattttcacttcggccaaataacagctggcgattgcggcactttggggaggggagggcggcgggcgcgcacttcggtcactctgtcaaaaggacacgaacactgaacgcactctcaaccatcgaccaacttttcctagcgaccgaaatctttgacgggacatcgctttgttccgttcggcgccttcctcacagccgctgtcttcgtcttcgccctcctccccaccgttggcgtacaaatgacgcgcacagcgaagcaccaacggacagttgcagggacagtggcacaaatggtggctgtgcatgtgctgctgctggggcgacagccaaacgggcgaatccgtcccgccggaagagtccaacgccctcgtgcagttccgcttctgctgttgtgttgctaaataacttttgtctcttccactcatcaatctgcttttggtttctccttatgcccgctccataaattgagcctttttgggggcagacct

SEQ ID NO: 29143 - DNA, 1262 bp, Heterodera glycines
ttgtttagacatttcgccgtgccaccacttctgtcagttacaatattcaactttttttttgggtggaaccaatgccaattgaaccatttgaattggagaacaaagtgacaaatgaaaagctgacactgaaactgagcgaagaatccatcgaattagaatataattggctgttaaaacgatgcccaattggggagacggcgccagttaggtgggaaaattgcgaaaattcggatgccaatttgaactaaattacagatttgatccgcggtatggcaataatgcgtgtgccaatttgaacattgtccgatttgatttgggtggaaatcattggattgggtgagccaacaaaagcaattttcaattgtcgaaaaatgaaaataattttaggccattgtcgccgccagcagtggtagaagaagaattggattaaagcaatgaaaatcttatttgagaaataatcgacgctctcaccaattggaaactgatttgatggtctacaatttttctccgaaattcttttgttgattctttcgttcgaataaaacatacgtttaataattagggctgtgaattttagtgacggaaaaacccaaaatagttacctaaaaaaatttttgccaagaaagtaaatttttgagaaaattttttttcatttcataggagtatattttgaaaaattttagctcgattattaggggtgtatttttttgaaaatttttaaggtcgatatacagggttggcaactgaaaattttcaaaatcagcatttggggtcaaaaaatcagcatattgtaaaaaaaaatttctaaatgaaatccatattggttgaaatgaatgtcgtattcgtgataagcgaccacgaaaagcccatgataaagcattttatacgcctttttaaaaagtttttcgtaatacaaacagtgtgtccattagaataaggacaccctattcagggacgtatccaggatttgggcttgggggggggggggggtaccgatccgaaaagtcaattcttaggggtgtatttttgaaaattcttcgcccgaacgaccttttttttttgctcataccagcgacgctgggaaaataggggtgtatttgaaacgataaattagcattttttccatcgtttacacaatggattttgaaatttagctattttgacggcttttgctccgccacgtggccgccagcaaaatgtttctttgtaatttggcgtgtgagataaaattaatatgttgctttcgttatgataatttggcg

SEQ ID NO: 29144 - DNA, 1499 bp, Heterodera glycines
ggcacgccgctttatgccagtgacgattttttgtgtgatgacatttgccgcactgtggttgcaattgtggtcgccaattgtcttcagaacgacatcattgagcgctgtgtgaaggcgtcccctgcacttgaattcatcacgctgatgttcacagcgccaaaattttacgtcacggtcggcattgaacatatggaagacatagaggcatccttcatgttcgagttttttgttgttttgtttcgttataatttgattgttttccatttttggggctaaattaaaagattaaaacaaataatatataaaactacgtttacaccagggctggagcgcgcacagaaaaaaccgcggccgcgcaccgcgcattcaaattaccgcgaccgcggatcgcgcaaaaaaaaacgccgcggatcgcgcatcgcggtcgcgctccagccctgatctgaagggctttcgaatgataaaaaattgttagatttggttgacaaagaaaaaaaaagttatagtccaaaacatggctggggccgaaccgtgcggggccgaactgacgtagaccgataatttctgcaaaaatttttataaaatgattagtgtgcaaattgctgagtttattgattgttcgacgagttataccttaaatggctttggcaatcgccaagatcatttggtcccacaaaaaagagggaaaccccaaaaataaagcaattttaagggtaatttgagacgctgactgagtacgaatttgatctttttgcgcagtttcgaacccctaacccgaattcgaacgttttttgaaaaattattttttatttcgtacaaattttaatgggaatgaatggagaaacaaaggaagaggaggaaaatagcattggggaaggaggagagacggaggagaaagagaggaaaaggaaaaattcggcgcaaaaaggaggaggagaaaagagagaggaacagcagcaaatcgacactttaatgttgccggtgctaatattgctaatggctgtcgtaaatcccccgtcaaaatcccgaaaaataattgtcacaacttttcaaggaaaaattcatacatcgatagatagcaaaaattttggcgctagcctacacgaagagacccacgtgctagattctttttgtgttgactacaactgcgtcataattactcgtactatgcacattgatctctttgacgacgatgatgagtcatgagaacaatactaacactattgagacccaagcattgtttattaatttggcattgttctctaccatggagaaatctaacgaagtcggaatgtccatcaacgaatttctgaaagatgggaatgggaagttttaacagaagacagactaaaccaactttacctgaaagggttggaatgtgtgctgaagtgggaaatggtaacggcgtgaatacgtccgatgttgtaaatttcgtgttcccaagccaacctaaagataacatcaaaacagaagttttttttacttaaaatacatctaat

SEQ ID NO: 29145 - DNA, 901 bp, Heterodera glycines
aaagctgtctgatctgttcatggctcataaaataatttatggccgaacagatcttaatccctttgaaatattcaaaccttctgaacgctttaacattcccttttatagacttaactcgaaatataaattaggcaaaaatttataccttttgcggggcgggtaacaaaaatttggaaccaactcgataaaaggctcattgaaataaacgcattaaatcaatttaaaaataaaattaaaactatctctattcccgtaaaatagaccggaaaaattaaagtcgaatttttaatccattcaaactaaaagtgatttggtcgctatttatttatttgtattgatttcatattatattttattttttggcggcgatctcgtttttaattgttttgcgctttcttgaggacattttttaaattaatgttttgtcctcaatgtaagcggatttttcccttttgtggactttttctttattgacattaaacaatacaactgttaaaaattggagtcaaagggaaaaataaaaaataataattaatatattctttaaaagtaacactgcccaagtgtgcaaatggcctaatggctagtctccttgactttcccttcttctttcccctggttcaatccctctacagaaattagattattttcaatttttttttttttatatactcgtgggtttcctataaagaaaatatgattcctcatagttttttttaaattgatacatattttatcattttttaaatgaaaatcctaccaattgagcttaataatcgcaaaaaccaacctttttttgttgaaaatctgttaacaaattgcacccaaatttttaaaatttccccccgggcggcgcctatcgggaaccgcccggaaccccttcttttcccaaaaatttttt

SEQ ID NO: 29146 - DNA, 1634 bp, Heterodera glycines
gaggagaaacggaatcagagacagaagaagcgcttttcagggagggaggtgctaaattgaaaaaacaaaataatgctttgatgtcggtatttgtcttttctttcacatttcgatggtgtttttgagagcgatgctttcgaataattttgtggcgaggagccgcgagaaggaggcgaaacggaggaccgcttctccgacaatgcgtcggtgccaattttctcacgggacaaattgtccatcgccgccgccctttcattgcctttatttctgtcgacaaaattatccgggaaatgcttttccttttccccttcctccctgttggtaatcagagagatgacaccttaatgtacaaatgcatatttattatccaaaaaccaaattttgataaaacattggcaccttttgatggcggagaatcgggtggcgaattgccggcacttcgactggtcaccgccagcggagagggccggaccggcaaattccgagagacggatgacaaaatgccatgctcgaaacgactcgtcacggaatcgtaaatcaaacgattggaggaagagaggggggaagagtaagtgttgaaatggatgttgcgatggtaagaggaggagggactgcgccggcaaacagaagacgacgggtcgtacacagaagacgaattcgacacgagggaaccgccacttaaaattgcaaaacaattcaaaaaccgttttgttggcaaaatgcctgccttggaatgccattggacgctccaccaattgaagttcgctttgttgcccacgtggagtaactgttgtaacgcctttcaccaccaccgccgccgccctctcccaaagacagtcctgcaattttttttcttcttcggcacaaaatgggctaccactttaccagaagtgtaactgacacttcgttttggagtgtatgtcgaagctgaggagggggcgggcgaaacacgcggagacgaactgaacggaacaaaacggggcgaactgctggacagggcagaaacagcagtggaagaaggggacggaaaacggtgcaaacggtcgctgctgccggggtaatggggagaagtggcggaaacgaagcggggggaggccctttcattgtgtagggaaaaagacatgggaccgaacccattgtgatcataacgcgaggccataaatggaaaaacgaagaaaaacaacgcaaacaaaagcctatcaaatctgaactgaattcatttggcaaaacaacaaaaagtcagcaaaaaggagggaagggaaggaatgcgaccacatttatttaaaatcggttgctccaccctcaccaagggaagaagcagcgaaaggatagagatttgagggggaaggaatggacttggggggcgggagacagctgttgcaaaattggagcaaattgttttaaggagcgatcgatccgaagacaacaacaacagcaatgagtctgatcatttagctgtatacaattagcaaagttctcaagaggtttcaagaaatttgaaattttgttcaattaaaaagccaagaaaaaaaatcaaagtttttgccaagcgcaaaggaaaagcagcacattcaatgcggattggatttgacaccacaaatagcagtgacaacgagaataaatttgggaacaaa

SEQ ID NO: 29147 - DNA, 952 bp, Heterodera glycines
cttgagaacgcgaagtttgctgcggagaatggcaattatatgcagaaagtcaagtgcatatatctcagcgcctagtgcatgaataggagcgtttttactgttttctgagagcgcctgaaagcagctttcgaatggtatagctgatttttttggatctggaattttcgcagagatatatgcaaattagtaaccagtgtttcgtttcaaattatttctcgtattctaacgaaataattttttactatgagtgtttggtttggaaactgtctaaaatgttccgggtcgcccacattgcacaattttcttgaaaataccatgaaaaatgctctaactccaagagacttagttgagcgcactgcaaggagaaccctaacacagttcagcacaaaaaaattaactattcacgcttgagaacgcgaagtttgctgcggagaatggcaattatatgcagaaagtcaagtgcatatatctcagcgcctagtgcatgaataggagcgtttttactgttttctgagagcgcctgaaagcagctttcgaatggtatagctgatttttttggatctggaattttcgcagagatatatgcaaattagtaaccagtgtttcgtttcaaattatttctcgtattctaacgaaataattttttactatgagtgtttggtttggaaactgtctaaaatgttccgggtcgcccacattgcacaattttcttgaaaataccatgaaaaatgctctaactccaagagacttagttgagcgcactgcaaggagaaccctaacacagttcagcacaaaaaaattaactattcacgcttgagaacgcgaagtttgctgcggagaatggcaattatatgcagaaagtcaagtgcatatatctcagcgcctagtgcatgaataggagcgtttttactggattctgagagcgcctgaaagcagctttcgaatggtatag

SEQ ID NO: 29148 - DNA, 859 bp, Heterodera glycines
tgaattgggcatttgcgtgatcactttcatttggcagtgttatagtgagttattgaattggcaattgcgtgatcactttcatttggcagtgttatagtgagttattgaattggcaattgcgtgatcactttcatttggcagtgttatagtgagttattgaattggcaattgcgtgatcactttcatttggcagtgttatagtgagttattgaattggcaattgcgtgatcactttcatttggcagtgttatagtgagttattgaattggcaattgcgtgatcactttcatttggcagtgttatagtgagttattgaattggcaattgcgtgatcactttcatttggcagtgttatagtgagttattgaattggcaattgcgtgatcactttcatttggcagtgttatagtgagttattgaattggcaattgcgtgatcactttcatttggcagtgttatagtgagttattgaattggcaattgcgtgatcactttcatttggcagtgttatagtgagttattgaattggcaattgcgtgatcactttcatttggcagtgttatagtgagttattgaattggcaattgcgtgatcactttcatttggcagtgttatagtgagttattgaattggcaattgcgtgatcactttcatttggcagtgttatagtgagttattgaattggcaattgcgtgatcactttcatttggcagtgttatagtgagttattgaattggcaattgcgtgatcactttcatttggcagtgttatagtgagctattgaattggcaattgcgtgatcactttcatttggctgtgttatagtgagttattgaattggcaattgggaggtcacttt

SEQ ID NO: 29149 - DNA, 1487 bp, Heterodera glycines
  unsure (1)..(1487): unsure at all n locations
aaagtgccgactgttatcatcagccggacacgccnggatgatcaacgccgggnattaattgactgatcaagaataaggaatggataattctaaatatttttttattagtttagatcagaaaaacacatttcaaattatcgacttctttttaataaaaaaataaaaaattgacactaattggctgaaaagcataaaaaacaattaagattgaaagtaaaagtaaaaaacaaatgttcagtttttgtgctttttagaagcgattattttagtattaaaaattccttcaccttcttcattaaaactaattaataatgaatcatttgacgacctgctggcacacatacatatgccctccccatatttttttacgatgccctccacttttgatgttggcatcgttggcacttcccatgcatgatccagtgggatgaatgccattctcatcttgataaatacaaatgccttactttgatttcgaaatttgtaaatgctagtgaaaaggaatgcttaagcattggggaaagcaagcaaatttaattgggcagcttctctagtgccttgccggtgccgggtgctgatatctgctcagaagcttattcaatcacactcacttggcattatgccaatcaacgcaatcgttaacaggggataaaaggcatttaatccagagatagaaaggcatttttgccatgaaaaatgccaatatgatacgatgtatatctttagagaatagaggcttttcctattgggtaagcaagcaaattttttttttgaggaggaagatgagcaaatccattcggccgcgcgcgtcaatgcattttgccaacgcttaacctgtggattaatgattatggcgtttaaatattggctgaaaagcccaattaaatcataataatagtaataaaatttaaaactgctgctaatggagctgctgcgaattgccatgaatcactcgatgctattatttctgtgctgtgtgctgctggcaaatgaatgccgtgggcccccagttggagatggtgaaaatgcattcaattctttttatccatttatgctttgggattttaataaatcctgatttataaattttatgcctcaaaattaggttccagattccctcatttttgggcataggaattataatttcagaaattttggagtgttagctgatctcagtttccaaaattttttgaagcttcgaaattccgctatcgaaagccacgtgataaaaaactaatccaattcgaaatatttatctaaattgcctagaaattttcaatttttttaaaaaataattaatatgcgacaaaataaaatttactgatgcttgacttaccttcaacagctggagaagaaggtcttggccacaaatgcgtaaaagcatgtgtgcgctgtcttgcgatgtcctcagtgttaggaggcttaaccaatgtcggaagtgttgaaggcatcagactgtggactatgaacggattgaacccttcttt

SEQ ID NO: 29150 - DNA, 1013 bp, Heterodera glycines
  unsure (1)..(1013): unsure at all n locations
tgctttttgaccctattttcatattttaaataataaattagacttnaatttacnntattcatcagacctaaagttctaaaataaacgaaattaatttcatattgtcgaaaggacactaatttcagcgaattatttcatagttgttgcacaagtctataacgaactattttgcatgctttctaaagaataaaatattactagtttttgctccaagtttctatagggctaattgtatcgcgagcgaatagcctaatggcgaaacctgcataattaaacgaagcaagtagtaacagaaaagcttcgttgattctgagaggcgaattttgccaaagattatcgtcctcttttttgcccttggatcatacggggttgtagtgcagaaagaaacaatttgcgatttaccacctgttaattgctttttgacccttattaataattttaataataaattagaacttaattttacctaattcatcagaacctaaggttctaaaataaacgaaattaatttcatattgtcgaaagaacactaatttcagcgaattatttcatagttgttgcacaagtctataacaaactattttgcatgctttctaaaggataaaatattactagtttttgctccaagattctatagggctaattgtatcgcgagcgaatagcctaatggcgaaacctgcataattaaacgaagcaagtagtaacagaaaagcttcgttgattctgagaggcgaattttgccaaagattatcgtcctcttttttgcccttggaccatacggggttgtagtgcagaaagaaacaatttgcgatttaccacctgttaattgctttttgacccttattcataattttaataataaattagaacttaattttacctaattcatcagaacctaaggttctaaaataaacgaaattaatttcatattgtcgaaaggacactaatttcagcgaattatttcatagttgttgcacaagtctataacaaactattttgcatgctttctaaag

SEQ ID NO: 29151 - DNA, 1295 bp, Heterodera glycines
ttcctcttccttaattcctcctctttcctcttcttttcttcctccactttcctcttcttttcttcctccactttcctcttcgtttcttcctccacttttctcttcctttcttcctcttcacgaatcttttgttcgtccggtgccaaaagggtcttctgttctgtcacgcttagcttctcttggcgcatcggttgtaccaccgctttcttagcaaaatctgtgcgcggtttgctctgtcctgtcagcggacgtgtcgcttcttccgttcggccatccctgagttcttgcacccgaacataagtctcctctcggcaaatctgtaaacattcgtaaatgcattgttaattaccctctaatagtagctaattagccacctctttgctcccatcaatgctttgctcctcttcgatctgttccaattcttccatgttcatctcttctccgtccaattcttcgaccgtcgcgtgtccttccaacatttgttctgactcttccgccatttggacaaacattggagaaggacttttctttgcaatgggagaagtctcttccgtcgcaacgggcttttcctcatcctccacgatggctttcagctccgtctcttccgccggcttctgctgctcttcttcgctacacatactttcggcactttctccggacgaagaagtcgatgaaacggaccgactccgatgagagggcgaaactgcgcgagaagagggtctgctgccgtgttcatcgcctgagacttcttcctcctccacctcctcatcttcctcctcctcttcttcgtcctcgtcgattgacgaggatgaagtataagtgcccgaagtgtaggaaccggacgaagtgctgctgctgctggtgaactcctcgtccgacccgcgcatcgcacactgttggaccaacgtgaagccaacttccacctcatccgcggagggctcagtgtacgaagtggagtttgttgtgcctaaacaggggaaagccaaatcagaatgccaacagcagagaggtgcagttgctgctgctcctccctcaccttcgtctgaataactgcgccctccccacgagtcgctcatcccatcgtaactaattgaggcggtgaaaatgggcggaggtgccaacacattggaaatgtctttgtccacagcggacggacccaaggcgaacggaaattcgaagtccgattcgtggcccgacaattgcagagtccgactgacggtggcctcgtcccactccccttcgtccgactcccattatgcggatggattgctcttttagcatataaataaggatgg

SEQ ID NO: 29152 - DNA, 1472 bp, Heterodera glycines
tgatgagagaacagacagtcagagaggcgaggagagagcggttggcatccatttagaaaatggacagagttttacaagttgaaaatttggtcgaattggggttcggtaaaaaaaaagagagtgcgagagagaaagagaaaataatttagaaaaattcctaaaaaatttacattttgggcgcaacaacacgcttgtggacaccaaagaacaggaagaggaccatcagaacagtcacacatgcagtgaacaacggatgttttgccaacgattcgcgaaatgaaatctgaaaaatttgggggaaagaaattaggggtaaaatttgatgaaaaatttttttacaaaaaaaaaaaaaaaaaaattccacggttggggcaaaaaattgttaaatttttgtgtcgccaagaggagacaatataagcgagccaaaaaaaacgggaacaaaaatcgtaatggaaaccccaaaaattttttggaatttcgaagctttagggaaaacggagatcggcaagcctaacccaacccgaaaaagaaaaccgaaaattgaaatcctgacaatgagcttaaaaaacggaagcgacatgccgagtcacacaccaaaaattttcagaaatttccctgtcattccaaaaaactaattaggtaaatcccatttttacgttgaaattttttttataaattttcattacataatcatttaaagtttaaaatgaactcacagactccaaatccggatcagaaatccaatgataagctgtgtaagcagtggacaacaacagcagaaataaaataactgaataaagtgtttaacattttctaattttttcccaatttaatcatacattacacaaggggtgtctcgacaccccccccccctcgttcgtcgtaagggggcggctgtaaaaaggggagggggtcgtcgtggaggggagtcgtaacgaaggggaaaaaatttttaaatttgcacaatttccttggtgaaatgaatacaaaattcaaaaaattttcccgacggtttttggaaaaacgcgtattgcgccaaaaccgagtgctttttgaacctttttgtttgttgcgctgcgtcggttgccaaagggtctgtcgtccaatgttaacacttcgtatccctccgacgttttaatttcgtcctcttcactgtcaagaacaatttcggaactcgatgagttcagagattctcgcctgttaaatcattttacaaaaagatcaaaacattgacaaaaccttttaagctgccttccggttgcttttttctcgccgtcactttccgacttaattgacttccgatcactttgtccattctcttcatcctcttcctcgtcgtcgtcctcaatcattgcacggtttgcttggcggaaaagctttttgatctccttaatttaaatacgccattagttgaacaataaaatgacatggaattaccaagtttttctggtgctgggcctcgtcattttcgg

SEQ ID NO: 29153 - DNA, 1096 bp, Heterodera glycines
ccccatgtgcttccaatattcgttgacagtctgttcaggattgagcatgaatggctggtgcaacagctgagtttcttctccgtccattctcgtcagcttaaatgggattggtgccttctctaagaaattgccatcccacctcggattggtcaacttgtgaagcgttcaaatcctcctcttctccggtgtcactttcatcaacgatttccatttgagttgctcgtttagctccctttttccttggttcacccaaactttccggcgccattccaatgatgtgctgacaaatcacttggccaagttgtgctgttggaaagtcagaaacactctcatccgatttgtgacccaaagacaccaacgaaataaaacgtcccaattgaacgccgttaaattcctctaaaaacaaagattatttcactcataaaaaccatacgacgaccttttggatgggtttgaccaaaaagtttgttcgctggtgaagaagaaatgacagatgctcgggcgagttgaatattctcgccaactttactcacagtggcaacgatcgcctcatcggcggttcgtccatccatcatgcggaatttatcatgttcttaacacaaattggaaatgttggtttttgcatcaaaccatagaatccacccaccaatattcttcagcgttagtttctgtgcttcatcaggcaaaggcagcaactccgaagcgcagttccgcaaggcattcaccaattctgtgacctgattattttgcctattgataaatagcagaattaaataaataccaaattcttgaattctgcactacggaatttcgatggcacattccttcagcgaatgccaatagggagcaggacaaagaagaaagatgcctttaaaatcaaacggaaaatcagccaaaaaagacaagaatggccgaccatttgtctcgggtcaaaagcttccaaccaatcgccatgcctctgtttgttgtcatatacatggagactaagaaagtcaatagaaatatttgaaaaaatctaattataaaaaggaagaaaatattcagagaccggttaaaatagttttggtacattcatattcaacttttttgttgtttg

SEQ ID NO: 29154 - DNA, 1229 bp, Heterodera glycines
caaccactaatgttttttcaaaaaccatgaccacataaattgtgtcgcactaaagtcatagaacaaacactaatgttttatcaaaaacatgacacacataattgtgtcgcactaaagtcatagaacaaacactaatgttttatcaaaaacatgacacacataattgtgtcgcactaaactcaaataacgaacactaatgtttatcaaaaacatgacacacataattgtgtcacactaaactcaaataacgaacactaatgttttatcaaagacatgacacacataattgtgtcacactaaactcaaataacgaacactaatgtttatcaaaaacatgacacacataattgtgtcacactaaactcaaataacgaacactaatgtttatcaaaaacatgacacacataattgtgtcacactaaattcatagaacaaacacaaatgttttatcagatatttggctatttggcaaatttaccacaactcttcccaacccacttacaaaaggggccgccaaagttgaagtagtgaatttctcgaaagtgagcaaaaagttgagtggccgaccgacatgttcaacacttcagagatgaaatcacaaccaattgtaagccaacagcatttcttcaatatgatggttctcatttctaaattttacataataattaacataacaaagcaaaatgtaattcgaaacaaattaatcccaataaactttgatgaggcacttaagctcaatctgggcaagctgttgaatgatggccacggcagatttcaaacttgtgaatgaattcacaacgaatacaaaaccatgagcgatcataaaactttagttcttcatgtcatatctaaattttataaacataattttgcataaaaaccaaacaaaacaaacttcaactaaaatcacacatcaaaagtattgggtaagacatggatggccgaccggccgttgatgaaaaaaaaaatgccgaagcggcagagagaaagtcaatatatcaaacctgtagaaaattcaaattaagtaaacaattcatttttggctaaatcataaaaaatagacaaagactaaagcacaataatagactaactataagcatagacataaaatactatgcaaatgcattaattaatcagaacaaattgaaaaagcaaaaccaaacatttccatttttcaaatcattttttaaaggaaaacaaaacaaaaacattttcattttcaaatcatt

SEQ ID NO: 29155 - DNA, 1117 bp, Heterodera glycines
  unsure (1)..(1117): unsure at all n locations
attaggcgttcgcccaggctggcatcatttggcagtgacagtgcaaatttggtcagtgtgccgcaaccatttgtgccacaatcggttgtcccgcttttgttgaatggattcgtttcgtctccatcggtgccaccatctgtttggcaaaatttaaaatcaaaaattccaatttccgacatttcgaaatgccatttttgagaatgtttgaagccaagcccgggaattccggttgcggattccaaaaattgaaaaacgaaaatttacggcgtttcatagatagagatatgccaattttcggattttttttggagtctcagaccagaaattttctgaggttcgagttttcggtcgtgatatttttcagggttatgctttctttaccttcaccggcggaggctggcacaatgacaatggactgacgattcatcaccagagatggagagacgccagaagaagacagacagacagtggaacggtgatgtgatcggagctgatcagagctataaaattatgtaatttttttaagggaaaattggaaattttaatggaatatgttaataaaaatttgcccattttctctttgaaaatttttaatttttcatttcgaggagggcataatcatcactgaactgcttggatttgtcctgctgcaacttgcgccgcattctgggcggtgatgtacacccagcagccgtcggcgggttggcaatcgatgaatgatgcgatttggcaaatgccagcaacgaatgccgatcagacacatcacttttggacatagaaattggccgatcacttttttgcaaaaaatttctccgttattttaattactgtataaaattacgatcccaaatctaccgtagggcaacccgttggacggcagcagtgggcccatggtttcggcatatttggtgccaccgccgctgccgnntgntggtggcggcaccgatttggcatanagcaccgacatggtctccagctcggncctccatttncagccccggagccattggcccaacttttgggtccaacaatgactcatcccgacgacgatgaatttgtggcatgcttttgcgcatgctgcttcatcttctcatcatcgctttgcccggaggagtag

SEQ ID NO: 29156 - DNA, 1505 bp, Heterodera glycines
  unsure (1)..(1505): unsure at all n locations
tataattattattattgcatttaacatttttgttttgaaaaaagcggtgatttgtcaatttaattcgtttatttcaatatttgtcttattttttggattaatggacgaaagaatcaaattgcaattttcatcagagacgacggagtcgagaatgggtgaacaataattatttttatttattttttgaagatttctcgacgattttttgtccgggaagagtggtgggatcaacaacagtaaaaaaatgaattaattgcttgattgatgcgattatgagatcaattgtcgggcgttgttatgtatttaaatgttgtatttgatctttgttcattcacaaattaattaattaattaattagggctttttaccgatattttcatacatgaaaaatagagggtgggtttcagcgttttttttttgaaatccctccttagggtgcccaaatttctgctggtggggttacttgtaggttttgtcaccccctctcccctgaaaaaaaatttttttaaattttttctagcctcattttttgcgttaataacgcgaatttaacatttattttttaaccataaagtttgtcagtgatttacgtgaaaacgtgaaaaaaatttgaaaatgaaaaaaaattcaaaatttaaaaaagattattctataattattaaaacgcgcaaacagtgctaattacaacaaaaaaatgaacagacggtaaggaattttaattaccgcatttactcgattagaacccccctctcgaatagaacccccccctctcgaataaggctccctttatgaggggggttgaacaatagaggccccgggggctctaatcgagtaaatacgtaaatatatatatatatttttcattttcccaattttttcccccacaatttcagttggatttgcaacgacgtgtggatggacattctgccatcttttgaccgtgttcaacttggcctcaaaattgcattgctttcgccacgttttgatgcgctggtggacaaacattttgatggcaaaatgacggaattgacaatttggagagcaatcgaatttgcaaggacaatggacaaaaaccaatgttattagtcgactgggagtctgtggcatttcaactgccggaccgtccgctgcccaacaaaattcgcttttgtttccttcacattgcgtaattttaacacatttgggtacttccgtgttttgctacgccctcccctctcgaaacattttaaaatacatattttggtgggttttcaaagtcactgatcatgcatatggtgtgcctgtttcgacatttgatcacaacatcatattcgtgatcagtgactttngaaacataaaaataaagatttttaaaatttttcgaggggggagaggtagcaataaaataaagcatttttttaaatatttcttttcagctacattgaccatgccgtgatcacatttctccatgccaacaagagaatctttgacagaattggcaccaatttgggattgggtatttgggg

SEQ ID NO: 29157 - DNA, 1659 bp, Heterodera glycines
  unsure (1)..(1659): unsure at all n locations
tgaaaagtgaaggattgagtcccagtgattggaatgctggtgggattgagtcccgggaataggaatgatggagaattgagtcccggtgattggaatatcgcagaattgagtctcgatgattgcgatgccgaaggaccaggtgaggttaggtcccagtgattggaatgcaggagaatgagtcacggtgattggaatgcataaaaactgagtccgggtgattgaaacgcaggagaatagagtcccagtgattgaagtcctggagatttgagtccctgtgattgaaatgcaggagaatgagtcacggtgattggaatgcataaaaactgagtccgggtgattgaaacgcaggagaatagagtcccagtgattgaagtcctggagatttgagtccctgtgattgaaatgcaagagaattgagtcccagtgattggaatgcaggggaattgagtctcggtggttgcgataccgaagaatcaggtgaggttcggtcccagcgattggaatgatggtgagttgagtcccggtgattggaatgctggagaattgagtcccagtgactggaatgttggagagctgagtcccggtgattggaatgcaggagaacagagtcccagtgactggaatgctggtgggattgagtcccgggaattggaatgatggagaattgagtcccagtgattggaatgtcgcagaattgagttccggtgattggaatttcgcagaattgagtctcgatgattgcgatgccgaaggaccaggtgaggttaggtcccagtgattggaatgcaagagaattgaccagtgattgaaatgcaggagaatgagtcccggtgattggaatgctggtgtcttgagtccctgtgattgaaatgcataaaaactgagtccgggtgattgaaacgcaggagaatagagtcccagtgattgaagtcctggagaattgagtcccggtgattgaaatgctggtgtcttgagtccctgtgattgaaatgcataaaaactgagtcccagtgattgaagtcctggagaattgagtcccggtgattgaaatgctggtgtgttgagtcccagtgattgaaatgcaagagaattgagtcccagtgattgaaatgctggagggttgagtcccagtgattgaaatgcaggagaattgagtcccagtgattggaatgccgaaggaccaggtgaggttaggtcccagtgattggaatgcaagagaattgagtcccagtgattgaaatgctggagggttgagtcccagtgattgaaatgcaggagaattgagtcccagtgattggaatgccgaaggaccaggtgaggttaggtcccagtgattggaatgcaagagaattgagtaccagtgattgaaatgctggtgtgttgagtcccagtgattgaaatgcaagagaattgagtcccagtgattgaaatgctggagggttgagtcccagtgattgaaatgcaggagaattgagtcccagtgattggaatgccgaaggaccaggtgaggttaggtcccagtgattggaatgcaagagaattgagtaccagtgattgaaatgctggagggttgagtcccagtgattggaatgcaagacaattgagtcccagtgattgaaatgctggagggttgagtcccggtgattgnaaatgctggag

SEQ ID NO: 29158 - DNA, 1645 bp, Heterodera glycines
atttttaatatttaatttttttcaaaatgtttttcagatcgaaaaaatcaattcagggacattgattcgatgtgattggatgttattatttgattaatgatgatgtcaatcattccatcgctaaagaaacacagaagcaatctttgccgctttagaaattatctcaaaaattatattttattttgtcaatggcttttcacttattctctaatttaataaaagttggccaacaattagagttgcccgcaattaattattttgaaattacgcgtagattatggcaccgagctgatcaaattgatttaactatatttttccctaacaaagaagaggtacccaagtgaccgtgggacttccacgaaaaaacatctgttcttttggcgaaaagataatctttctgatctgtatatttaaaagttatatctttcatcgttatctcagagatagctctacttgtatcttctaatctcggaagatctgtatttaactgcaactcctctagattaaaaaagttttcaattcttttttgtttcctttttgctatagaatatcatttacaaagaatgcaaagccgatgtgagcgtctctgggcctagtggtctttcctttccgttcattttttcttcaagttcaattcccccaccctgcaaataattgattttgtttttttttttgcacaatattttttaagctttttaacattaataattacagaagcagaaatatcatattcaaggtcaacacctcgaaaacaccccaagtactgttttgggcttcttaaaacatattttttattattgttaattttaattaaaaaagagaaccgaaaagccatatatattctgaccgagagataatgcttcctccaatttaattggttccactttcactgtagagagactgtcgtccatttccattgctcctttctctttatatagagtcagagcagagaccaaaaatatagaaaataataattgaaaaatgataatcgcaaggcgtgtccattaaagtccgttttgagaaagaggtcattcgggtaataaattggaataattggttgggttcgaattcacacatccttcttaatccccttaagaggactctgatgagactaatcaaacatcggaaacgcaaaaaaaagcgttcccaacacaaaagtaatggattatttaaatgatatggagagtcagaatgtttctgtcttcccctcagtggtaacttttgtgtccggcatttttatgaattcaaattaatccgcccaagttgtgccaaaaattgataatgggagtagcggttcagccattatggaatttgttggcagtggccagtcattttctttcccggaggcgttgtgttggtgtctgtcttcactgtatcgctttcctatcgctgtctgtctgtacagtctgctgacatgcaaaaacaaataaaagatatttcaattcaaaaaatgacttttgttgagactttaccgatacacaggactggatagtcaaagatccagcggtacacctcagtttggccgcaagtttgtgtctcagcatgctttcacactatatccaaatcaaatgtttttggtatcatttgaaagcttaacatatttataagatttttctaagcgttttctaagctatgcttcgcgatg

SEQ ID NO: 29159 - DNA, 1449 bp, Heterodera glycines
agcaatcgtttcatatatgccattgaaattgtgccgaaatgttccaacattttgcacattttgttcattgagcaatgcctttttctcaatttcatttatagcattgctcaaaacagctggtagaacatttgtgaaaatattcagaatatttgccaagaaaacttcaaaattttggccatcacttttcaattgtttacacaaatcattgcgcaattttccaaaatggtccatttttaattcaaatatggcatcattgcacataacgccaaccgatgcttttttcatcccatcaatggccaaatcgtcgctaattaccccttcatttgcctcattgaccaagtccgatgctgcgtccactaaatcctctcccgacttgaatgaatctaaatagtggtttgttacgaatttttatttatttatatgtaataactaattaattacataaatgggcagccgaattgaacccaaaaataatcaataataaaaaaaattacaccgaaaaaaagaaaggtggagttatactcaaatgtcagaattgtactcaaatacggtgttatattcaaatgtcggggtatccttaaatatcggaagtatatttcgaagcccaaaaaatttcttgtctctatatgaaaaagactaaaattatcggaatctttaagttttgcagcgatttttttggaaaatttttgaaaaacatacaaattctccataaaattcggaacgggccaactccgtctggccaactccgtctgagccaactttgagtcaatataactcttgaagttattgaccgaatcaaacaatcttgatatcattcgaaagctcttcacaggctctattggcctactaaaaattacagaaaatttcgaactataaaaaaagatagaaataaaagctttgaaaattctgccttttttgcggttttcaactgacaacttttttgagagctgattaatcactgagaaatagcttataaatatcttctaaacatctaggtctttcgaatgataccatgattgtgaagtttggccaacaaagaaaaaagttatagctttttgaacattgctgagacggagttggccagacggagttgacccctaccgataaaattcgaaaaattgctgaaaattttttcaaaaatttcatttattttttcttgaaattggataacacttcctttacctccaactccggttgatccatgcgacaattccggcgtttgatcgctttggcataacgaatgcgtaaatatgatggataacgatgagcatttggcgaattcgaataaaaggatttctattgcttatataggagggtctaatcacactttgtagatttttaccgagactcaaaaaaggtcaatacttttgttgaaatttgcgaagttctgatactcaagcttacattaggataaaaaaattcggcaatatgtacccctccccacccccc

SEQ ID NO: 29160 - DNA, 897 bp, Heterodera glycines
acaaaaataaatcgattttttcaagtgtccgtttcggggtactcaaacaattatgggggagcaaaaatccaacgcagaattaaagtacaggctatagggaagctattccggaaggattcggtctccccataaatctgggcgcatcggttcggggggactgccccgaaaacaaaaaaatcgattttttcaagtgtccgtttggggtactcaaacatttatggggagcaaaaatccaacgcagaattaaagtacagactatagggaagctattcccgaaggattcggtctccccataaatctgggcgcatcggttcagggggactgccccgaaaacccaaaaaaaaattttttggataaaaattatttaaatgaactgactagataatatttaaaataggttatttctcttcctttcagtatccctgcaaagtttggtgcgcttctgatcagtttctgaaaaaaaagttaagcctaaactttttggcctgtttaaaaaggaattaaaaatttttaaaaattttattcatctccctttttgatagaaaaagcatcagagtgcctaaactaacatgtaaataaaatttggtgcgtttcagaaccctttctgaaaaaatatttaagaattaattttgcaaaaaataaataaaaacgaaagactcagattttcgaaaatttttttgagccagctagctcggcgctcatttcagtgtaagttagtcctttaccggggagtatccctgcaaagtttggtacgcttctgctcaattagcaaaaaatatgagtgatcgaattttcactaaaaaagttaagcctacattttttggcatatttaaaaagcaattaaaaaaattttttaaaatttaaataattttccctgcaccgaaggtactcactcgg

SEQ ID NO: 29161 - DNA, 1371 bp, Heterodera glycines
agactgctcgttgaggcgctcaatcgccgccgccaatgctgcagcgttgttctgctccggtgggcggagtcggatgacgtacggtcgattaatcaataaaataagaaactaaaataaaaacttttttactgcaaaatgatttatacataaaatacagaaattatcatggtaaaaaattaaacaatggataaaattactccatttttacctcatatttaaattttgtggagaataaattcaattaggcaaaagaaaaggaaaataatcaaaaattaaattataaagttaaaaattctgccatttcagctgtaaaaggtggaatcagagtctcaggataccatcaggttttttatcaaggtcatttaattgaaaacattgtaacaagctttaagtttgtgagtcaagttgacctaatgaattccgaaaatttgcagaacaaattctttttatgaacccgaaatattttgtggtttaaattacaaaagaggaaaaggtttatcagcattagttttaggaccgggaaagtggtaattaccggtgccaaaaacggcggaaataaatgaaatgtttcatcatattctcctctatttgaaaatgtctaaaaagaagtacaatccgttccaaaattttgtgttcaatttttttttatcattaagaagttcacaaaaaaattggaaagtgtaaaataaaaaatttttttatgaatttttccccaaaattaccctaaatttgctgttccaaaattatgagttcaataattgaaggcatgtaactttttttatagagcaccaaaaatctgaaaaaattcatttcagtacaactttttatgctgatcataaaggtccattgcaccacagtgatcagatcactctcatgtctctatgagttctctacattgcgaaacataggtcgaaaagtaatccaagggaaagtggcgtaaaatttgtcattttttggatagtcgaattttaggcttacctccctcggtgaagacgaatcgtcgagccaggtattttcaaatcaaaatggttgtagaatgtctgttcatgatattcatgttaattggatgctgttttactattcaagaaaattgttagagaaggtcaaagtcccctgagggatagaaattctgatcactgtggtgcaatggacttttttatgagcataaaaagttatactgaaattaattttttcagattttttttgtgctcgataaaaaagttaaatgtcttcagtacaattaaataaaataatcaaaaaacttaaagatagtaaaacatgtcactgttcaaaaggatagaaataatttaaaaagcttatggaggtccgggttcgaacccaacataaaaaagagagaaataattaattgag

SEQ ID NO: 29162 - DNA, 1034 bp, Heterodera glycines
caggggtattatttgtaagtcttttttccccaataaacttttcgtaccccattttcgcaccgtgaatgttattttattgaattctgaaccggtttgagtagcttagactacaaaaaatttaaaatttcgaaatcatgtttcccactcccttctcccaggggtattattttgtaaagtctttttttccccaataaacttttcataccccatttttcgcaccgtgaatgttatttttattgaattgtgaaccggtttgagtagattagactacaaaaaattgaaaatttcgaaatcatgtttcccactcccttctcccaggggtattattttgtaaagtcttttttccccaataaacttttcataccccatttttcgcaccgtgaatgttatttttattgaattctgaaccggtttgagtagattagactacaaaaaatttaaaatttcgaaatcatgtttcccactcccttctcccaggggtattattttgtaaagtcttttttccccaataaacttttcataccccatttttcgcaccgtgaatgttatttttattgaattctgaaccggtttgagtagattagagtacaaaaaatttaaaatttcgaaatcatgtttcccactcccttctcccaggggtattattttgtaaagtctttttttccccaataaacttttcataccccatttttcgcaccgtgaatgttatttttattgaattctgaaccggtttgagtagcttagactacaaaaaatttaaaatttcgaaatcatgtttcccactcccttctcccaggggtattattttgtaaagtctttgtttccccaataaacttttcataccccatttttcgcaccgtgaatgttatttttattgaattctgaaccggtttgagtagattagagtacaaaaaatttaaaatttcgaaatcatgtttcccactcccttctcccagggtattattttgtaaagtcttttttcccccataaacttttcataccccatttttcgaccgggaatgttattttattga

SEQ ID NO: 29163 - DNA, 965 bp, Heterodera glycines
ccaaatttttcccaaccaaacgcaccgagaaacaaattccagcacattcagtatcggcgtaattttctgagaatgcggtgtaattcctattactgtgagcagaaaaagagatacccaattttccaaattttcccaatcaaacgcgccgagaaacaaattccagaacaattagtatcggcgtaattattctgagaatgcggttgattcctattactgttgagcagaaaaagagatagccaattttccaaatttttcccaaacaaacgcgccgagaaacaaattccagaacaattagtatcggcgtaattattctgagaatgcggttgtaattcctattactgttgagcagaaaaagagatagccaattttccaaatttttcccaaacaaacgcgccgagaaacaaattccagaacaattagtatcggcgtaattattctgagaatgcggttggaattcctattactgttgagcagaaaaagagatagccaattttccaaatttttcccaaacaaacgcgccgagaaacaaattccagaacaattagtatcggcgtaattattctgagaatgcggttggaattcctattactgttgagcagaaaaagagatagccaattttccaaatttttcccaaacaaacgcgccgagaaacaaattccagaacaattagtatcggcgtaattattctgagaatgcagttggaattcctattactgttgagcagaaaaagagatagccaattttccaaatttttcccaaacaaacgcgccgagaaacaaattccagaacaattagtatcggcgtaattattctgagaatgcggttggaattcctattactgttgagcagaaaaagagatagccaattttccaaatttttcccaaacaaacgcgccgagaagcaaattccagaacaattagtatcggcgtaattattctgagaatgcggttggaattcctattact

SEQ ID NO: 29164 - DNA, 1240 bp, Heterodera glycines
ccaaaaaaatatccaaatttttaaaaatctataaaaatctccccataaatctgggcgcatcgtttcggggggactgcccgaaaaacaaaaaaatcgattttttcaagtgtccgtttggggtactcaaacaattatggggagcaaaaatccaacgcagaattaaagtacaggctatagggaagctattcccgaaggattcgttctccccataaatctgggcgcatcgtttcggggggactgccccgaaaacaaaaaaatcgattttttcaagtgtccgtttggggtactcaaacaattatggggagcaaaaatccaacgcagaattaaagtacaggctatagggaagctattcccgaaggattcggtctccccataaatctgggcgcatcggttcggggggactgccccgaaaacaaaaaaatcgattttttcaagtgtccgtttggggtactcaaacaattatggggagcaaaaatccaacgcagaattaaagtacaggctatagggaagctattcccgaaggattcggtctccccataaatctgggcgcatcggtttggggggactgccccgaaaacaaaaaaatcgattttttcaagtgtccgtttggggtactcaaacaattatggggagcaaaaatccaacgcagaattaaagtacaggctatagggaagctactcccgaaggattcggtctccccataaatctgggcgcatcggttcggggggactgccccgaaaacaaaaaaaaattttttggataaaaattatttaaatgaactgactagataatatttaaaataggttatttctcttcctttcagtatccctgcaaagtttggtgcgcttctgatcagtttctgaaaaaaaagttaagcctaaactttttggcctgtttaaaaaggaattaaaaatttttaaaaattttattcatctccctttttgatagaaaaagcatcagagtgcctaaactaacatgtaaataaaatttggtgcgtttcagaaccctttctgaaaaaatatttaagaattaattttgcaaaaaataaataaaaacgaaagactcagattttcgaaaatttttttgagccagctagctcggcgctcatttcagtgtaagttagtcctttaccggggaggatccctgcaaagtttggtacgcttctgctcaatttctaaaggatatgagtgatcgaattttcactaaaaaagttaagccgactctagaggtgccccggtcc

SEQ ID NO: 29165 - DNA, 1633 bp, Heterodera glycines
ccaattttctgaaaggtcaactcacgttgagacagcgcggaagtgagtttatacttgtccactttcaagataaattttctgtctacctcaataggaccatccgaacgctcttcgtcagctcgtgaaagcgtgtcgccagcgcaatcggttcagtcggaagaaccactgcaagcgccgcaggaactggaagctgctggtgatccaactggcgacagcgagcttacaagtgctgctgtacgactgaaggaactggatgagggcttcggtaaaagtgtaacatattcacttatctttattcccattatagacattactcattcatcaacacgtactcgaagctcgagggggcaatttggcaagtcaaggaagtgcgttttctacacaatccctttgaacgatgctgatggctatgcaatgttgaattgcggacattcatgccactttgaccagccctttgccgaatggtatttaaactattacctttattaaatcacacgattcataggtatgccggagcgcctttcaagaactgcaaaattgcgcggtgcaaaaagtctttgaaatgtaaatgcattgtatgttgtcaatcaattggcatgggcatttacgaaaccggctgttattgcgcggaaacctccgcttcagtttatcatgcggatgaattggaagcgaggtgctctttcataatgcaaatttgttattttagttttattataggctcaaagaaagcggtggcaaatgcccagattgcggcacgcaacaccccggcttttgcatgttgtgtcagcggctgttcaagctgcaggcaaatgggcttcgtcagagcaaggtgttcctgccttgctgtgactcttacactcacttcgaatgctggtagtgtttaatcattttggatttttaccccttttccttttggcaaattaggtattcgcccgcaccgaagcagagctgcccagcaaagtgcacaaagccgtggcaaggccttcaggacatgcattacgagtaagcgacgactcatacatttctttcactagtatttgcatttgtattttagtcaaatttgtggtgtcgaaaatgctgctccgttgtgtgcagttccgaagccaagaggcatcattggtggacgcccgctgaagaatgccaaggctgcgtcgccaacagagtccattccatcgactgttgacacgacgacggccgcggcttcggatgttcccgccaatgaatcccaagcgctgacggattcgcatcttatgcctccaccgtcgttggctcctcgccgtagcacacagatcagccgacaagcgtccatcgcaagcaatcggcccagtcctgtggcgccaaagcccattgctccagtgacgcactgttgcggaaccattcggtccgctcactttggatatggctgcggttcgaaaaaggcaaaccatctgccttcatactacaactcgcttcgggatcaagtcagttccaaatatgaattcagtagtcatgttctttctttataggcacaacacaattgccctcactgcaatgctttgcttttgccttccgaagcgattggaccaaccgcctattcaaagtgctgcgcaaaagaacgtgtcaacttggcggaccgctacaaaagcgcttcgtg

SEQ ID NO: 29166 - DNA, 1028 bp, Heterodera glycines
ttttttcttactgcgcgactttttttactgcgcgactttatttaaattattttaaattaattttaaattaaattttaaacatcttaaagttaaagacgttgaatttaaattcatttaaaattcattaaaaattcaccgcaccaagcggattcgaaccccagggggggcggccagactgacgcactaaccactcggccacattggcaatggatgataaacattaatttgctctcataaagggaaaaaatgacgtcaccagcagggaaaggggggcgagagcaggcaacagcgagttgcagtgggggcgagagtaggcagcagcgattggcaggggggcgagagtgtggcgagagtacattgcaacgagaaaaatggcgagaaattgctcggcagcgagagtggcgaggaagggttgcagcgagggatacgggaaatggcgagttcgggtggcgggaagggaaggggggtcaaataaacaaatcaattaacggaatttcccaatttttgacttaaagcgaaaaagaaatgggggaccgtataattaaataatatttatttataaattttaaaaaatgttctaattaattaattagttaattattatttaaaataataacaaatatttttttaaatttcaaacaattaaaatttcaatgaaattttatactttgatgcaaatttattttttctaactctttggctttgaatgtttttttatctaaatttaatttatgagcccaatattttatttatttatttttttgcataattattttaactaaaccaaattaattacaggaccccttaagatgaacaaaataaacaaatcaatgaagaaggggaagagtgctgcaataaggcctaataaacaaatcaattaacggaattttcccaatttttgacttaaagcgaaaaagaaatggggggccgtataattaaataatatttatttattaaattttaaaaaatgttctaattaattaattattatttaaaaaaagaaaaataatttttaatttgcaaataat

SEQ ID NO: 29167 - DNA, 793 bp, Heterodera glycines
taaatgtcaaaaaaatggtaggacaattaaaaagtgacaaatgaaggaaaatggacagaagaaaagaatgaatttgatgaatccgaaccaaaaaatggacaaaaaaaaagttcaaatttctgtatgactgagaaaaaatggcatttttctccgtatttaagcggtgaattccccatcaaaatcatccattcattcaattgctgcactcacttccattcttttcccccatcggtcgaatcttcatcctgctgctgctgtacaataaagataattcccgtcagtttttttttgttttgtttatttcggttttcaaaatgtattaaattttgtgcccttttttcaggatggtcagagcaacaacggccaggacaagggcatcagcagcgcgagcacggaccatcaaaatcaatcgtcgaaatgccaagaaggcgcgtgccgcaattggacgagccggacatgtgagtgacgcgcgagggggagaaggggcaattaatacactaatcgattcaaggacggcaatttttaaatgtgccaatttttctttcagacacgcaatgcgatcgcacgagagaagtgcatgatgtgtctgggcaaagtgagctccatgacgcgtgtgaccatgggctgtgtgcacgaatttcaccgcaggtggaggaggggcttaatgaatgtcaatcaatttagaatcccctgagttcgacaagtctaaaagccgaggagttttcctggcccaaatttcggaagtttttctttttgctgatcaccgaattcaaaatccgttccgatcaatttt

SEQ ID NO: 29168 - DNA, 896 bp, Heterodera glycines
tgcaaattagagaccggacgggatcgggatcccgcgaggtttcttcgggatcccgcgggattaaattcgggatcccgacctcgggatccgtcccgaacgattttttaaattcatcgggattgattgggatcgggatttcatcgggatcccgaaccgggatccctcccgaccattttgggattggaatcacgataattttaggaaaaatctccatttttaattaaggtattgaattttaaattaaaaataatgtcatttgctaattttctttaaaaaatcccttaaaaaatcccaaaaaattttcacgggtctccagaattttcaaaatttgacgcaaaaattggccatttttgactttcatttcttccaaaaaagaatatcataaattatcttttaaattcctaaaacattattctaaatcttattaggtagctttaaggcacaacgaatgtaagaattacagtttttgtttaaattctgttaacaaattaaattgaaattttcaaaattttcccgtcggcgcctatcggcaccgccggcctcccccttgttcccctaaagtttttgaaaaaattcgctgcgaaaaaaattcttaaaaatctgatttttgatttcgatgcagtttacgattttttaatttccttaaaattattagaaatgataataggagccgaaaatacaaaaattgacattaattgattaaattgtaaataagatatttaagactatgttgttaaatgttctaatttttgaccctaaagtctgactctttaagcatgatattctaattttgcaaaaaaaattctataaaaacctgatataattaccattccctatatttcacatagaattgatcaattataaatattagataagcattgaacaaaacttagcac

SEQ ID NO: 29169 - DNA, 855 bp, Heterodera glycines
gttcctcttacactttctctttccacgttctgtttctcttccacgttctgttcctcttccactttctcttccactttctgttcatcttccactttctcttcgcctttctgttcctcttccactttctgtttctcttccactttctcttccgcttactgttcctcttccactttctcttccgctttctgttcctcttccacgttctgttcctcttccactttctcttccgctttctgttcctcttccacgttctgttcctcttccactttctcttccactttctgttcctcttccactttctcttccgctttctgttcctcttacactttctcttccactttctgttcctcttccactttctcttccgctttctgttcctcttccactttctcttccgctttctgttcctcttccacgttctgttcctcttccactttctcttccgctttctgttcctcttccacgttctgttcctcttccactttctcttccactttctgttcctcttccactttctcttccactttctgttcctctcacactttcggttcctcttacactttctcttccacgttctgtttctcttccacgttctgttcctcttccactttctcttccactttctgttcctcttccactttctcttccgctttctgttcctcttccacgttctgtttctcttccactttctcttccactttctgttcctctcacactttcggttcctcttacagtttctcttccacgttctgtttctcttccacgttctgttcctcttccactttctcttccactttctgttcctctcacactttcggttcctcttccactttctcttctactttcttgatcctc

SEQ ID NO: 29170 - DNA, 2093 bp, Heterodera glycines
  unsure (1)..(2093): unsure at all n locations
tagtttaaatattttttggactgagcgcgcaagcaatgaatgtgggtagaattttcgcgaatgaatgggagaaatgcacttttaggtggaaatggacggctatttatactctntaaagtgggcggggctaaggtaaaaatggtctttggcaggttgccaactaaattgttcatgctatgccacactacactaaaatgagtcgccttctgatcaacattttatgccatccacggtcagtcattagcggttaaatgaccaccagcgggcgctcagatagcctctgcggcgcttaggtgacacgtgcgagcgctcaaaaaaataacgaaaaattaaagtttccgcgccaaattcaaaattttgaccccggttattatttggtaagacttggactcagcccacccgaaaaaatgacatgaatttgttataaaactgtttaatattgaatattattcacaaaaatgtatgaaaaagtggcgatatatagtgaaaatttttttatcaacatttgaaatttttcaaaaaacgtcatttttgagtgaatttatcaagaaatatgctgttacacatctatttaatactgtatttttagcaataatggatgataatattcaaattaatgcaatttggaatagacgcaagctcttacattttttttggagatgagcaaaaagttataaattggagccttgaaaacggcttgttaacaaatgtgcgttactgctatggaaaacggccgacacggcactacaaaaaggaaatgcgttttgacaaaaacagaggcagggccggctcattcatatgcagtacttgtagagcagaaaaagctctttttgttgattccggtttggtcaaaaattttaaggtctttttttgttgtttttaactatattttttatattttatgaataattattatttagtattatgtactcatttgcgcatcaagagaaatacaaaaaatgtatttcccttttgcgaagttcaaatttttttaagggatgattgagaatgacagtgaagactttcgtgtcgttgtgtgtccggacaatgtcagaagtcccgatgctctacttccgatcatccaaaacacgttgcagttggtactgaaatacacattgacatgtggagggcttattctcgattaaatgagcatgggtttctccataaaattgtcaaccactcggaccccgaacaccgtttcattggttttttaaagtcaagtaaaatttgctaaattttaaagtttagccgaggatgggacgcacacacaacgtgttgaggctcagtggcgtcctgcaaaggattggttccgcaacggcgcgtcccaggtttccggtttgctgacacgttggtagagtatcaatggcgcagagaggtcaaaaagaatggttttgatgcgtttgaccaattattgtctgctgttaagagatattacactcaaaaatgacgtttttttgaaaaatttcaaatgttgataaaaaaattttcactatatatcgccactttttcatacattttgtgaataatattcaatattaagcagttttataacaaattcatgtcattttttcgggtgggctgagtccaagtctagcctattaattttttttataatttatcaatttcttaaatttttcatttatttttaaatttttatctattattttaaatttatttattattattattatttatatttttgtgtggtattagagagagagagaaagagaaaagagagagagtgagagaagagagaatgagagagagagaaagaaaaaagagagagagtgagagagagagataagagagagaaagaaaaaagagagagtgagagagagaaagaaaagaaagagagtgagagagagagagagaagagagaatgagatagagagaaagaaaaaagagagagtgagagagagagagaaaagagagagataagagagagaaagaaaaaagagagagagtgagagagagataagagagagagtgagagagagaaagaaaaaaaagatagtgagagagagagaagagagagagagaatgaatgttagcttttttattcaattatttttttaaattataaaaaatttttt

SEQ ID NO: 29171 - DNA, 777 bp, Heterodera glycines
tgataataaattaaggttttcaaatcattatactaacattactaaagctgtttatttaaggattcgcaatattgccaaaattttaaaatcccgctctatacgtttggaccaaagtttataagacatatattcgtcctcttttagaatatgcgcctgaaatttggaatccaacatacaaaaaagatataaataaattagaaagatgccaaaaatatttcactaaaatagtgcttttcaagtgtaaccttccaccaattccatacctgaagcgattagaatacctacaactaccaacacttgagaataggcgaaagctatttgatctgttcatggcgcataaaattgttggcgctactttgaaagtggccctttttgaaacaaaaggggggacccttttgttttgcaaaatttttttaagataaaaaacgatgataattttttatccggggttttaaaggtcgctaatcacgaatctgacatgtattttgactaatttctaatccctaacccgaactcgaataaaaatcgaaattttgaatttttcaaattatgatttcttgttcaaatttagattaggaaatcggaattgatcaaaataattgaaggatggccactttcaaagtagcgccaaattgtttatggccgaacagatctagatttatttaaaattttcaaaccttctaaacgctttaatgtccccttttataggtttaacacaaaatataaattaggcaaaaaatttattccctttgcggggagggctacaaaattgtggaa

SEQ ID NO: 29172 - DNA, 1609 bp, Heterodera glycines
  unsure (1)..(1609): unsure at all n locations
cgtgggttttttactcttttggacatttcgtggcttggacactttgtgggggcgccatttttggacccggacctatgtaccgggtcggtacgggaaccgcccacttcggcgccggccttttcggcgccgttgctaacaacttttttactgatcaaccaaattaaaaatttttgttatcattcgatagctcttgagattctctattagcctgtaaaatttcaaaaaatttcgtcagtttacaaaaaagttatggccaaaaaacctcaaaaattaactttttcttggctttttcggcgccgcgtggcataacttttttatttttgaatcattcatttctatttttacatgcaaatatagagcacacatagagctttcaaattttaatctggttcgacccgaaattcgaaaaattaaaattttcgttcgagttctgatcaggggttcgaaattggaaaaaatggatgctgtattcgtgaaaaaattgccgaatacggtataaactcaaaatagcctaaaaacacgcttggggatggcgcgacggcggtggagaatgacgagtgctgcgctgatgctctgttgtgttgctgctctgctcgaacttcttcaccatcataacccaaccaaataatgccatcaatttgcagcactaacaacacagaggcgagtgccggccgaaaagaaagttgatgaacgcaaccaataaccaccgtttccaatttttaccacacattttgaacaatctcacacattcgcatatactcgctgtgcttcccttccctcacacatttcattcattcccatgcccaaaccaacaaatggatctgaaccgtatgagacgaacgaacgaacttaatccccctccgtttcactctttgctcgcaaatgttttttttttgttttttaatttaggatttgtgtacaaatgacgatgatgatgcgattttcattttttctgatcagatgtgcaaataaaatatgccaatcatcatgtgctaagaaagtggacattctcccgtagccctttgaaaaaacttttttgaatctgttgagaattctctcggagtttcaaacgtatcaatttatgataaaacaaaataaatatgtcgtaacatcgcaaaaaagaatagaaggaaagaaaaaacaatcaacaatccgagagctaatttaatgagtgttttgtgtgtattccaatttaagggaaaagtgcaaaaaatctgcattccagagacttgtgctccacaaacatttttgaaaatttttagatcagcaaaatatcagccatcctaacacgacggttctgccgactgcgcggaatcggtgcccgtggccgaccgcgtcgcctttttgaaatcaatgataatgacctgaaatcaaaagatttttggaaatatttaaattaaaattgtccaatgtgaagttccgcaccgtttcgttgtcgcctaaaaacaaaagtattaattagtgcggtgatttattagtaattgccaaagggcacgtacatccggagccatcgcctgaaaagatgtgaagtgattaatttatttgtcggtaattattagggctaattttacccgtntgtgtcctttgcacagcagtgatcgcaaatctg

SEQ ID NO: 29173 - DNA, 1272 bp, Heterodera glycines
tcacaccattcgatagcattttaaaagctctacaatttagctctaaggcattttttcgattaaatcaacccctaacgagttatgggcccgggactcaaatgtcccgctcaggccaaaaaatttttctatttccgggaaaaaactgaaatttttccgaaaaaaataccattcgatagagctcgaaaaactatgtgttggaagtggcctccgttttcccgggaaaaatcgttaaaaaatcctaaaattcaaaaaccccaaaacatacttttaggcctaactcgaaaaattttgaaaattttcgaaattttgaaatttcaaaaaatcgagctttccaagctctacaataagtctgctgggcacatttccctcagataaaagcccggcgtgttattcacctggtactgaagtgtactttttgagcacgcttcagttgctcacaactgcagaccaaggggtggctctaataaaaaaataaaaaatacaagcatgtagaggaccctttgggggggtgccctcaaagcgggtactttttgattagggttttagaaaaaaagttacgggtcctaaactgcaagcaaaagtgacaaatcgctccctgggactcagttggccgtcggatcaaaaaacctatagttttcccggatgcacctcaaaaagttgtaagacccttccactactttcagggcgctcccggccttcggccgggagattttgtttttggcaacgaaacccctagtcaatataacatatatagtaactagcgggtgtgtgcatgcgagggtggcgcttgggaaagcgctgcgcgcttcttgagcttcgctacctaggcgcgttttagtctgttagggtctttgcgtcagccgacatgcacttggtttcctccaataattggagttgacacatcgcataatgcaatggaaaccggaagtgccctaacgttgcacatcatggccctcctccctcccttagtccaggcgttggcacgttattgggttgagcgctaaatggcaattcacctgtaggccctaaagagggctgaccggtccatgtcccggatccaagcttctcaccattttcgcacccaacatagtgcagatgggaatgggattggcatctctccaaaaaccatgtgcccaactgctctagactaagccatttattgtaacttgagcatattagtagctacaatattcagcactttggctcggccttgggcatcaatttcccggttgggagcatgaacacggacattgtttccgtctgttgcccgag

SEQ ID NO: 29174 - DNA, 1349 bp, Heterodera glycines
atgcccattcggcaagcccttggggttccaactgctcacgggcgccatgcatgcccattcgccaagccctcgggttccaactgagcacgggtgccacgcatgcccattcgccaagcctcgggttccaactgttcacgggtgccacgcatgcccattcgccaagccctcgggttccaactgagcacgggtgccacgcatgcccattccaactgagcacgggtgccacgcatgcccattccaactgctcacgagtgccacgcatgctcattccaactgctcacgggtgccacgcatgcccattcgccaagcccttgggttccaactgctcacgggcgccatgcatgcccattcgccaagccctcgggttccaactgagcacgggtgccacgcatgcccattccaactgagcacgggtgccacgcatgcccattccaactgctcacgggtgccacgcatgcccattccaactgctcacgggtgccacgcatgcccattcgccaagccctcgggttccaactgctcacgggcgccacgcatgcccattcgccaagccctcgggttccaactgagcacgggtgccacgcatgcccattccaactgagcacgggtgccacgcatgcctattccaactgctcacgggtgccacgcatgcccataagccaagccctcgggttccaactgctcacgggtgccacgcatgcccattccaactgctcacgggtgccacgcatgcccattcgccaagccctcgggttccaactgagcacgggtgccacgcatgcccattccaactgagcacgggtgccacgcatgcccattcgccaagccctcgctttccgactgctcacgggtgccacgcatacccattccaactgctcacgggtgccacgcatgcccattcgccaagccctcgggttccaactgttcacgggtgccacgcatgcccattcgccaagccctcgggttccaactgttcacgggtgcacgcatgcccattccaactgctcacgggtgccacgcatgcccattcgccaagcctcgggttccaactgttcacgggtgccacgcatgcccattcgccaagccctcgggttccaactgttcacgggtgcacgcatgcccattccaactgagcacgggtgccacgcatgcccattccaactgctcacgggtgccacgcatgcccattccaactgctcacgggtgccacgcatgcccattcaccaagcccttggattccaactgctcacgggcgccatgcatgcccattcgccaagccctcgggttccaactgagcacggctgcccacgcatgccccattcaaactgagcaccgaagccacgcatgcc

SEQ ID NO: 29175 - DNA, 916 bp, Heterodera glycines
  unsure (1)..(916): unsure at all n locations
ttcataagtatttttacagaaactgctctgaaacgcaccaaattttatttacatgctagtttaggcactctgatgccttttctatcaaaaagggagatgaataaaatttttaaaaatttttaattcctttttaaacaggccaaaaagtttaggcttaacttttttttcagaaacttatcagaagcgcaccaaactttgcagggatactgaaaggaagagaaataacttttaaagttttttagaaattctgagtttttcactgtttattattttttgcaaaattaattcataaatattttttcagaaagtgctctgaaacgcatcaaatttatgtacaagttaaataaggctctctgatgcttttactatcaaaaagggagatgaataaaatttttaattgctttttaaacatgccaaaaagtttaggcttaaattaaaaagattttcttcggttctagctctttcaataatcaataaaatcgtaccaaattttataggcatactccccggtacaggactaacttaacctgaaaaaatgacaattgtaattggttttaaatttttttagaaattctgagtttttaactgtttatttattttttgcaaaattaattcataaatattttttcagaaagtgctctgaaacgcatcaaattttatgtacaagttaaataaggctctctgatgcttttactatcaaaaagggagatgaataaaatttttaattgctttttaaacatgctcaaaagtttagtttttaagtgcaaaagtggtggtgtctgcaaaaaatttcacccggtttaaaaatctaggaaattagtagcattgtagtgtgcgatacgtatcctgcaaattnggtgagccctgatcaatacaaatattatggacgatcaatttttagaattttatttatttt

SEQ ID NO: 29176 - DNA, 1448 bp, Heterodera glycines
  unsure (1)..(1448): unsure at all n locations
gcatttgaataagctgaaagctcatgcacaggtgcttcgccgtctcgcccgcacacgctgctctcgctcagccaaaaagtttttgctacagcacgagatgnncctcccagctattgtgggnctcatgncgtcaattgctcttccgcttattgcggatgtcattgaaaattataaataaggtgcacncaagtaaaaaaaaaaaagaagtaaaatgcagcaatacaaagcgctatttgctagtccccgaagagatttatcagagtttggcatcaccgccaccgtctgacggaacaccaattgggctggtacgtaacagaattaaacaaatcaaaaacgatgatggcataaatgaggcggaacgggcaatcaaatatgagcaggaacttaagcgtctcaacaagctcacaagggacgaggatgagtgtcccgtcggtgttaaattagaaaatttgagtgacgtggttgacgccatgcccaaatcagtcaacgtcagaagaccaattgttgtcgctacgcgtcgccatctcaaggttgggcgtgcgcgaaaagaaaatgttgaacaactagaagatgatgatgatgctgatgatcatgctgatcatgaccatgaaactccaaagccatcgagttcaaataaacgacaacccacacaaacggaaatcttaaaattaatttataaaaacgcccaatctcttggagtgtctgaggaaggacaggtcttgagagcgggtgggcggccgtttataaccagcagtgtttatgacattgttagtcacctgctgaacaaggacaaacgtgctcaaaacaaagagccaactgcattcaaagaatttgttgaaagggcaagacagatcccgctcttgagtaggcatttatttcccgaaggccaatcgggcaaaggcatttataaaaacaccacactgaaatttaagccatcattatggatttgaaaaagcttcgcttgctcgagtttttgtacaaggacctaagttcgcctgtcgcattcacgagcgttgaatcgctgctgagagaggcgcagaaaagtcaacgaaaaattagtcgaaaagatgtccaaaattatttagccagccagcgtacatacacactgcatcgtcaggccaagcggcgctaccgtcgattgccaacattggcacctggcttacacactgaatggcaggccgatttggctatatttgaccgaatcgctaaacaaaatcatggcttcaagtacttgttagtctgtattgatacccttagtcgacaggtgtttgccgagcccgtaaagaccaagacgagcgctaacatgatcattgcctttgatcgtatattcaaaagatcaaaatatatcccgtggaaggtgttaacagatcagggaaaggaattcactgctcgcgcagtacagcatttcttccgagctaaagacgttgaacacttttgtatgctcactt

SEQ ID NO: 29177 - DNA, 540 bp, Heterodera glycines
tcagaagcaaattcaataagttatttattaataaatgcattatttaccacatgaattatgattaaactttggcatttagaatacattgtggcattaagaaaaatggaagttgataatcattcgatcatttttagggcaatgatagcaccatcgttagggagctcagttccacaaattaattccagcccagcaaatattatgggcaggacacgagcaaatagggggggggcacaagggacgcagggggaaacaagttttcttcccttttgcgccgcgaaagtccgtgccggagggcaagggcctctaaggctaacgacgacacagcgacaaagaccaaaagggagcatttggctgcttctccccccgcctctccacctgtgtgcttttcgtcgtggtaaggacccttcttccttcgcgcgaggcgcggacccccgtgggcagggacagcagaactcctttttcgcccttttgtccgtccgtcgctccccgtcgttgtgtctgctgatcgcccccccccccctccctctctctctctctctc

SEQ ID NO: 29178 - DNA, 986 bp, Heterodera glycines
ggggaatttgcaaatcaattagacgcctcggatgaagtaagagggaagggggtcaaagaacggcagcaaaagaagtgtgaaggaggggggggggggtgtcgggggaaccaatgacgaatccattaaaaggggaacggaaatttagtcgggggtcaaatggtgaagcgaatgagtgggcagggggtcagagaaagaaaaagcgggaaatggcggaggggggagggggttagcactggataaatatggggctaaaaatggattaaaattaagttcgctaaataaaattaataacaaaggttttaagaaagcctttaaatttaagtacattattcgttcatggaaatctctttgcgcaatcattgcgcagcagcgtggggaagggggggggggtggaaaattggcaaatcgattaaacacaaatgaaagggaagggagggatcaaataaaggcagctaaagagcggggatattatcaacaatcacatttcggagctgtaaatttaggaaaatgcattagaattgtgatcaatatttgataaatttaagtgaatagccaacaaaaaaataaataagaaacagtaaatttatttgaaagagaaacccctaccctcaaaaataattaatatttatttaaaaatttttcagattaaataaaaatatatagtaatactcatataaaataaaaggaacattttgtaaatgctttttttagtcatcattttttggtattttcatgcagcaaaaaaaaggctaagagaaaggagtcaaaattagtgaaacaattaactcccgagtggtcaaaaaagaaaacaaaggaacgggatggcaagggatattcataaaatggagttcgaattggacgggagggggggattaaaatttatctttataaaaatgtaaaagacacataattatcgtatcaaatgttttcgcgcagtttccaccttcttcaatgaatgtacaaatgaaggcttttcagtgagacta

SEQ ID NO: 29179 - DNA, 1395 bp, Heterodera glycines
taaataaataattagcttatttcctctgggagttcataattgaatcgccgtgttaaatgaaataatatcaagcagtcttttttcttttactattcatgaaattttttacactagacaattcccattaattattagttaaaacaaaaaacggaagtaaaattttaaaaaatattcaaatagaaataatttctgtctaaaaaacaaaatgatgaaaaattttatgagcaaaatgtcatcatgcaattgttcagcataaagattatcattgggaaacgactattaaaatatgaaaagaatatattttgttacatttttagcattggcattggcattgaaagcggagagtggagaatggcattgtgttgtacttccgtgacattagtgtatttccgcactccatttgcggcacgaaaatgctcatattacggcgagggaattacacgaattgcatttttatgaattcattgggcaggaattgacacaaatcggaataataaataagaaattcattgaattaataaatatgtaaattgacaaatcgctgaatttggaaaggaataaacagagaaccctaattgaaaagcttcataaattataaatgaatgcaaacgtaacaatttttgagatttttaaggtccgaaagtcaaatttggggatcggtcacgggattggaagtcaaattcactgcaaaagtcatcaatttgaaaaagttggattggtaccataatagaaaaacagactgaccccggaataaattatttttatttggaattccgcggacactgaattccgttgcttccttggaacaaagccttttcgtttgtaaaaaaaattccttaaaaaagtttctaaaatttttggataattttaattgaaaaaaaccatttctcttattttatttggtctcacaaaattcaggaattttcaaaattcttaacatttttaatgcaaaattttatttttacaaaatacgcatttgtttggatgcaaatttcaattcatttgatttgtttgaaatatttatataattaactcataaaaacacatccatgttttacaatactttatagagaaaaaatgaatgtaatttaaagatggcaaaaaaaaaagattattgttttcaaaaaaaaaacccatttgttcataaaataaaagatataaatataatgacaaaacttagtttataataaatgcacatttttaaaacgaattattatggggtgtttttattattgtggaaagtgtgccgaacaaattcaaatttgctccaaatgtggcactttcactgcttaataaatgtccggatgcgattccggttccttttccataagatatgttttgtaattatcgtagtccatcggcctcattttgcacaaattcttcggctcacattca

SEQ ID NO: 29180 - DNA, 919 bp, Heterodera glycines
  unsure (1)..(919): unsure at all n locations
aaagtcaaggagactagnccgtagnccanttgcacaattgtcagtgttactttanaagaatattaattattattttttaaattttttcttgnactccaattttcatcactaatttttcacccagacacnccattattaccagtgcttgtttttcccggttcccggttgccctaccgggaccgggacctgagcctttcaaaacccgggaccgggacctcggatgaccgggaattcccggcccggtcccggtcccgctgcactctactgatgagcaacggaaattgacttcaaatcaaattggtaaactgagaaatagagaagtgggaagatgggtagacagagaaagtaagatgtgcaaattgatatgggcttcgaaatcaaagataccaaggatatttggattattattaccttcatatacccaaaaacggaaattcctttttaattcgattttccctaaattaataaattttgtaaattgatcacagaaaatgccattgcttcctcctcaaatgccgcccatttcctcactgataatttggacaaaagttggcattggcttgcgaatgtgcgggaggaggacgagctgaaacagttgtgcacacagaagaaattgggcggcgattattgcgcatcaaagcattctgatcagcagcacgtcgactttgatcggatgctgaattggtggttgcccgacggttggttggtgctcgcccatttgcacaatttgttggattttgttggtctgtgcctccgtcacacacttcggcacgtacggcccaatgatcaccaccatctccgcttttggcgtgcgcttcaatcgttgtcttcaacgccaatggacaacaatttcgactctgattacattgcccacttggaatgcattttcaacaatgtcgaaaaaagctcggcattgcag

SEQ ID NO: 29181 - DNA, 1006 bp, Heterodera glycines
  unsure (1)..(1006): unsure at all n locations
cgcgcnggagaactaaaaaagggaattgggagggggggggggagtcggcgagaaagcgaaaggaaacttacgccgtcaaattggcaccgatgacgagacgacaatcggcacacgccattttggcgatggaacgaagaaagtgcggcatatggcgatgggaataactgacagtcacatggcccagctgagcgttgaaaatgtgccagaagaaagtgttggggacgtactcgctcagaatcaggccgagcatctgcaagtgcagcatcgtctccttcaccccttctgttccctccgattctgacctggtccctgacttcgatgtcctcaaactttggccgttccattgactccaatggctgttttccgttgtacaaaaggcctccgtcaatgccaaaaatgaggtcgcgttttgaaaaggtcggtggatagcgaagcgtcaggtcgggcatccaagtgccgttgagcacttccaagtcgacttccggcgcatcctccgcttgcattgcttcttcgccttgcctccgtatggccgagggcgaacaaagatgctcaaacacggagggatcatcatcatcattagcggaagtggatgatgatgaatcatcggcggaaaaaggggccgaatcggatggaggaggtcgcgaaactaattgaatctgttgttcgcaatcattggatggaagtcggaatgattcaagctgactttttcatggacgaattcgcggataagcggtggcaaaatgcaaattttgtcccgaattgccgcgtcaatgcccgatctgatcaggtcactgatcgcataaaattggctcgcctcgggcccaaagaaattgatgacgaagttgcctgggtcgacagcgcattcagtgaccttttaaagcaatgcgagagacaatggggaaaatactttatgaaagaaaacaaatctaccgtaaccgaggtggaggaagcggtcagattacggtggatatcacacgcatattaaccgtaaaattcccaataatgg

SEQ ID NO: 29182 - DNA, 731 bp, Heterodera glycines
atttttgacttttgttggtgttcaatttcttttctcctcccctaatttttcttttttttcgattaacaattttctcttataatcaacagataaataaaaattctttgcgctttccgtccgtgtctttttgatcactttaattgattgttaaaatgtccgtttttgtttttcttccgtcgatcaaagcttcggtctgtccgtgtcggcaattcgtcgatccaaccgaaatgagcttacgtcaatgtgtggcggagtgtcctctccattgacccattgcgccagaacattgccaatagtcagcgcaaatttgaaaccggtgcccgagaagccgccggcgatgaacacattttggtgtcgggggtggcgatcgacgatgaattgaaggtcgtcagtcatctgaaaccgagtttgttgatcatattggcattaagagagtgaaagtcttaagagacagggacatttcgccaaaataaaaacgaaaagctcatgaaatttaagtgtaaaaaactattaccgtgtaaatgcacgtgtcctttatcaatggtgccgtgcagtccacgtccgggaaatgcttggccaagtgttgtgccaccagtgagtggtccattccggcgcttccattcggcccttcgctttaatcggcaatttcattccatgtggacggcaaactgaaagtcaggctattgtacatccgtcaatcgctcggcagaatatccactcattcattgtgc

SEQ ID NO: 29183 - DNA, 1155 bp, Heterodera glycines
  unsure (1)..(1155): unsure at all n locations
cctcaggacgggcgcttcgcgtccgtcttttaatttttttggggatattcggccgcttcgcggcctcaggacgggcgcttcgcgtccgttctttaattttttgggagacgttcggccgcttcgcggcctcgggacgggcgcttcgcacccgttttttaattttttggggggaattcggccgcttcgcgggctcaggacggaagatatatggcattattccaaagctttgcatatttatttaatttttaagattgaacagcattaaacaacacaaaaaaagtgaattgaaaacatttttaataaattttcaaacactcccaaaaattaaaaaatatttattagtgttcaagttatgacggttatccggtgctaacatccaatcgtttgtatggctctttattgtcggattataatgcgcgaaatatgtgaataattaaatgaattaataaataattaatttgtattttgatcgctccaacgtccgactatcatctcctccgactcgactgactgattggtgggggaaaaaattgaacggaaaaggggcggagatttgcggggatttgtgagagttagagaaaagagaaatagtgaatgaaatgatgaacgggggaatatcgaaaagatgaataacatcgattggccaaaaagggaaatgtgtgaagggttcggttcgtcttcgctcatgggtaataatttgaatatgttacaatttctaataaattttcaaacactcccaaaaattaaaaaatatttatattttcttttgttcttttgttcttttaatttaattttatttgaaatttattttttgtacgtaaatttttcattgaaattttttgtcttcaatagattttgacacggattttataaaggcacaaaattataaataattaaatgaatataaatacttatttacaattggaaaaattaaacaaaaagacttctccccacgcattaattaaatttttaattgtttatatacattttaatcaaaatttgtcttttttttgtgtctttcgtgcctggtctctcgcccgccggtgggtctcgtctcctngcctccagcgttaaaagccgtgctcttctcgnctgagctccgggcgctccctttaagggatatccacatgtcctttatcccactttctcccacac

SEQ ID NO: 29184 - DNA, 1108 bp, Heterodera glycines
  unsure (1)..(1108): unsure at all n locations
ggagaagcaaggggctgtgctggggggcntaaaatttgggcacatnnggaggattaattctgatttctgaaaaagtcccagaaatacntatttttctttccataccttcttgtagagctcgagctgctctttccaatggtcttatcccggtctcgatccgtgccgaactcacaaagttatggagtgaaatgtgaaatattgttttcaccacaaggcattttttctgaaaaccggattcaaaaatctggggtttggtataaccgttttagaaatagcgtagaaaacagcttcgatatcaagaaaccaagttaagtccagaaaggaatattttataacgatttcgttttgttttggcattatgataccgaataactttcggaaattatggaaacaaaattggagaaattcgaataattttttgactgcaaatttttttccttttttgaattgggttcataaaaattttaagagaatttttgattattaatttgaagtcttgaatttatttgacaaatccaagacttaaaactgggagaagcaaggggctgtggctgggggcctaaaatttgggccacattggagaattaattctgatttctgaaaaagtcccagaaataactattttttctttccataccttcttgtagagctcgagctgctctttccaatggtcttatcccggtctcgatccgtgccgaactcacaaagttatggagtgaaatgtgaaatattgttttcaccacaaggcattttttctgaaaaccggattcaaaaatctggggtttggtataaccgttttagaaatagcgtagaaaacagcttcgatatcaagaaaccaagtcaagtccagaaaggaatattttataacgatttcgttttgttttggcattatgataccgaataactttcggaaattatggaaacaaaattggagaaattcgaataattttttgactgcaaatttttttccttttttgaattgggttcaaaaaaattttaagagaatttttgattattaatttgaagtctagaatttatttgacaaatccaagacttaaaactgggagaagaaaggggctgtggctgggggcctaaaattgggccacat

SEQ ID NO: 29185 - DNA, 1256 bp, Heterodera glycines
ttttattaaaaatagaaagaattaagttcaaaattaatttctttttaaaaatttgatcatccactactcatttttaattgatcagaagctcaccaaattttgcagagatacgtaatggaacagtacaaatgtttacaaattttcctaggaatttttcatccgaggaaaattttttgcattcacaaaatttgcatttttttttaatttgtccacctggaaatattttcaggaaatgggatgaattagtttaaaataggttaattctcttccttttagaatccctgcaaagtttggtgcgcttctgaacacttttcgaaaaaaatatgagggactaaatgctcattaaaaaataataggcagttaaaaatttaaatttttattcactgagttttgattctcgagacttgagaccaatttccaagcctcgagactgaatttaattcacgagacctgatgccgagactgatgtaaagacctgcgcgactctcgaatggcactcatttgttgctggcttggcttaccacttggccaggcccacaggtgggccttagcgttttgcagccggccccatcagtgccttgtgtctcggtgggccgtgttgtgccgattgcttgtgccatcccggcagcaatcgcttcttgggtggtcagcgttcttaagctggtcggcgaacatgcggtgccacacccgggcccatcaacagcacgcggatcaacgattgttgccggagcatgagctgaaaccggcaaaatttatccataaaagagatctctgatggcttatgctggactagtcaatgagctgaggacaacttttttgggaaaaaaatttaataatttaattttttaaataaaattgacaaataggctccgtacttcctcaaatagagccccaggggttatattgttaacctccaccccttcaaaatgaggctatattcgaaggtggggtctattcgagggggggggggggggaagttgtcgtaatttgcgcgagagagagtgaacatcatccgttacagcaaatgcatttacataaaaggattgccgtggaaaatttgggcacaaataaatacgaataaagacagcacggagaaattcataatttaattaatataaaataaaaaatgatgttcatttttcgatgccatggtttctcttaataaaaatgttaatgtgattattggcatttatttaaataaataatgcgtttttgtacatattaatatttgcgtaaatatttaaaagatatttgcg

SEQ ID NO: 29186 - DNA, 871 bp, Heterodera glycines
ccgtcccaccaccacccaacagccctcgcccagcagccccacaaaattgttggtcggataggacggggtcggactgtgcaaatagtctcgacaaatcgtcgtcctcgtcttttcagttgggcggtggcggcgagaggctgtgatgactgactgacgcggacacactgacaaacaaccagccgccccgcccgaagccgtcggagtcgcccagtgtgtggcggggccggccggggctgggacggatcggcggatcaacaaccagcagcagcagaatgaatggaatgaatgaatgtttcgaagcgaaaaaaatttatttttgggcgcaagagtgtggtggtgctggtggacacaaagatgttgcgatcagcagcagcagcagagtccaaaattcagagcaaaatttgatttttggccggccgatttcgcctttttttatttgctgcgacgaagttatttggtgttaatgcgtcgtttttgatctggtgaattcgggttttttgtgtatgtttctgatcagtcaagcctaaatgatgcctgatcagtagattctccacttttaggcaaatgccatttttttgcacatttttttcgtagagaccagcacgaaaaatatgtttgtcttcgtttgaagtttcaagggttagttttaaaatgcctatattgcctatttggcatttttgatgattattaaagattttgagttaatttcaacaaaaatgcaataaaaaaaataactcttaagtaaggatgtaaaagttttcaaaagataaaaccaaaaagttgaagcttttttcaaaaattaagctaaaatatattttatttttagcttttatatttatgcatttttgtacatttgactctagagatcccc

SEQ ID NO: 29187 - DNA, 1094 bp, Heterodera glycines
agactttcatgggactaggtatgtttgtacatttacaaacttcctgggagtgaggtttgttcctttcgcggggcgcatgtttctccgaaacatttctttatatttaaataaaaaaacaacggcactagaagtatgccaaaaataattgacgggccgattcagtccgcccatttaaagccggttcggttggtttttctcgtgttatttaagctagggttaagtaagccgtgtaagacacagtttgatgaaatttacaaattgcacttagttatcaaatttctcaagccggcaaccctttttcccgaattttaaggttgtcgatttacatggcttgacccccttcgtaaatttgcggccccgacatttgggcctttgtccaaaatcgggttcaaaattggttttttttcaatccctgatcgcctaaacaagctttaaataagcgattgaaagtgattgtatcagatcatttgatcgtcaattaatttttgaaaaataataaaattttcaaacagaattaatgctcctaataaactagaagactaccggtatgttttcttaatttaatgctgtttagtctatcagagcttgaaaaaattcaacttagaatccgatttttgacataggcgcaaatgtcggggacaaaagtgggccgcaaattttggagctccgtcataagcgaaaaaaatattttgttccaatgagttcgagcgaggatgttttgctcagaatttagagtccgaaaaaagtagaggattttcagaatcgggtttttgtcagttccagaaaaatgcattaagattaatttagttaatgcataaaacagggcaatcatggagtttactggtcccgttttttttttgttttttaaaatgtttaaaaaatattcttaaagttgtttcataggttttcagggtaggagaacacgattatgacacctatttcgagaaatttcgaacctcttacccggattcgaacaaaaattctaaaattcaattttcaaaaaattcaaaaaatgaaaaaaaccagttcaaatacacggaatactatatcttgcctgatgagtcgattttccatttaatttcttgcattgtttt

SEQ ID NO: 29188 - DNA, 1162 bp, Heterodera glycines
ggggaaaaaatcggcgataagagtaaataggtcaacagaaggcaaaattggggatcaacaaaaaatggacgcagaaaaagagaaggagaagaaggaaaaaggagggggcgccgtgattaaatagcccccgagcagaatatgcaaaaacacgtgaataaggagaaaagtgggcatttttgagagacaaagggaaaaaggcatcgctgaatatgttggggggaatcagagtacagaaaatggatgaaaagaggggatggagggcaaaaagataatggtaaacattttgagaaaaggatgtccaatcgggccggacaaaaggaatttgaaaatgagaatgaatgtgaaaatgaaaatggagcgacgaaagatggagaaaatgcagatgtgaaatggtggacaaattggataatgagaaatgaaattgaaaatgatgatttaaataaaaaggagaaaaatgggaagaaaaggagaaaaggccagattggcggggatttcgtcatctctccgatcttctgctccgtccgaccgaccaacgggaatgttcccgatcatcaatggtaccacggcttcttcttcttcgggcccgagactcgtggaggtgcagtaaaccatgcgcctggggtggcccatcggttctcctcctcctcatcgattttacgggcattgtagtgcccgcccgagccccgggtaaaggacaattggcccgatccttcaccccaactctcgtcgcggtttcgcgacaattattgttatggcttttgcgaatggaaatgaaaaaagttctggaatattgcgattctgccttttttcccaatgtcaaaaaactcatattggttttagcaagcattctaataacttctggtaaaagtaaaataaataaattaaaaactaaaattatttattaactgcgaaagatcattttcttcacttcgtcttctaaaaaattatctccggaatcgaacaaaaacagaacgattaacctctttagcactcgcgtatattaaccgtgaaatcgattattcggtggatgaagtcataactgaatttgcgaaaaggtgaggtagttcttggagggggtaccagtaaggaaaatcgaaatttttcaccaaaaaatataattttttccttaaaaatttcgggtgtggagtggctgggggggggg

SEQ ID NO: 29189 - DNA, 1708 bp, Heterodera glycines
  unsure (1)..(1708): unsure at all n locations
ggttccaagttcgtacgctgtgcatttaaatattttttgtaattaatatttatttaaatataaaatattnnaagttgatattcttcattattattgctttgttttgttgctaacactaaaatctttctgttaatttatttttaatctttttaatgtttaaagtaagccttgggttaatttcaattatttaaaattatttcttttatttctggtaaatttattgttttgcttgccctttccatctcatttcgtaatgttcttatttgttagggggtttttcaggttggttttttattaattcttcaataaaaaggtcaataagagtattatatattttttaaatgaattgccttttgttttctattaatttttatgttggtattttatctcatgtttcgttttacactcttttgttttcaggcttgggtctttgttccgtacattaattacataatatatttctgcgtaataaatatttttataaaataaaagtttataaattaaataaaattcgaaatttcattaaaacaattgtcatttcccttttaaataattttttaatatttttaaattcatataattttagaaacacaataaatatctttttgttaatttatttttcaagaactttttaaaataattttttcttaacaaattaaacaaataataataatataatcagttttttattgcttatttttttgcatttattatttttttttaatttttaaatttattattgttcgataattgagtacaaatatttattttttacattattgtataataaaataattgcacacaatctttggaagaaattgtcactggcatatgctatttaaatgattgtaggtaatataatcatttaatttttaatttgttcataatctttaaaatttttattcttatttatttttatctgcttgatttatctcgaagacgtcaataaaaaattttattattttttacttgataattttatgtaataattttttattaattttttttgataaatttaaattttaattttgcatctaacgttaataattttgttgtaattttattcaatcaaatttcataaaaataaatttatgggcttctttttaatattattctttttttcggttgttgttaagctagttttcatgttactagcaactattttctttttttagtgcctaaaaccctaaaaaagtttaaaaaaaaattattttcacctattctggcatttagcctaaaattattaacaaaactgcaacaaaaaaaagcgaaaaatacatctataaaaatggacccgaaatttttcaaaaattcaccactaagaaatgaaaaacttctcaaaatgcatcttcaaaatttattttaattttctttatttccccctaaatttgaaagtttttagaactattttcccatttttagcaaatattttggggtttaaacctacaaaactgactattttgtagtttttagaacctaaaaattggagccctaatgttaaatataaatctaattatttaatattattaaataataattctagtttcatgcctttttttaaatttttgaatttttagccattagcttaactgaaatataactgcgttttttaattatataaatcaaaataatcaggtaacgaatggttttcagcgaaaagaaattttgtcagcgagatagaaaaaaaacaaggcgcggtgagttgggc

SEQ ID NO: 29190 - DNA, 902 bp, Heterodera glycines
aaatgaaatagaaaaagcagggaatcattcaaaattttatccattgaacaaaaaataaatacgtatatgtaggtatattctgctgggttagctagttgacaaaaaaaggacaagttgacctgcttaggtactttgtacagcaaaattttcgtaaaaataaaataaacccgtttaggtaataccttttagaatgttaaaataataaataaatctaaattttttttaaacaatcagcctttctaaagctacaattatttgtccttgtcttcgctcggatgaccaaccccaatgaaataatataattttgtacatctaacaaattatatgacattccaaccatcacaatcagaatatcgtttttgtttgtttaatgctttcaattgagtcatttcttcctcactaagattaacgttgaggaaatcaatatttgaagaaatccgtctcgggtcctaaatttgttcttcaaactttctaatcagacttataatcaaattggattcagttgcttgaacgaagtatacatttttttgatatcagaaagtgcgaaatattgatttttggctctattgcagttcacacgaccataaatttttttacaactttagtgcatcataacttttcaatattttgggtttttgttttcagagattcgttgtctgcggccactaaacctggtaggcattagaagcaagccccatctctcattaaaaccactcacttttgattttggaataattccaattccttgctgataagaaaaagccaacagaatttgctaaaatatttgttaattttcaactgcactcgaatttttttctctgtacttgaattgttgcattgtgctttttggccgatagaaactaaagagagcgtcttggtagagagatgatgaattagcgcca

SEQ ID NO: 29191 - DNA, 888 bp, Heterodera glycines
  unsure (1)..(888): unsure at all n locations
aattttgaatttcgtttcataacccaccccatcttcctccttgttcatgatcggcttgatcatatttgccaccaaatttggaatcaaaaagtcatttccattgcgttatgctctccggtgaggagaattgaacagcagatgtttgcatggtgatgacagagaaagatgctcctcggcacttatccggcggacggattatttccataaatccttggtgggatgtgccatttccttcccctgccctcctcggaaaggtcccccaatttgtgccaaaatcgccaaaatcattccccgcttcattgctttccccacccgcccaaattccgactataaaaagcacctgccactgcgcagaacagtgtggggattggaagccaacccatcctcctcctcttttgtacatctttgcataatttgcccacccatcccagttggcatttttatttgtgcctttggcctgggtggacagatgagtcccagcgtcaaaatgccaaaatcgtttttttttgtgccacaaatttgaatgtatttggctcccttttgtacaatgcattggtatttacaactataagcaaattgccagacaatctctggcattcaaatttgttttttttaatgaatttttgacacttatgcagtaataattttaaaaaaccatagggagggacccttttattttcacaaaatttcaagccataataagtaaatcgcctataaaactgcaaaagtgccgaattttcggcatcattccttttgccattattatctcattacgaaaataggagtggggggggacgagaatgggaaagggtgtggcctctgttgttttgttgnngntgggcgccctctaaggctgggggggggggggttgaagatggcacccctccc

SEQ ID NO: 29192 - DNA, 1142 bp, Heterodera glycines
  unsure (1)..(1142): unsure at all n locations
catgatttcaatattttcattttttctagtctaatctactcaaaacggtttcagaattcaataaaaataacattcacggtgcgaaaaatggggtttgaaaagtttattgggaaaaaaagactttacaaaataataccctggngagaagggagtgggaaacatgatttcaaaattttcaattttttctagtctaatctactcaaaacggttcagaattcaataaaaataacattcacggtgcgaaaaatggggtatgaaaagtttattggggaaaaaaagactttacaaaataatacccctgggagaagggagtgggaaacatgatttcaaaattttcaattttttctagtctaatctactcaaaacggctcagaattcaataaaaataacattcacggtgcgaaaaatggggtttgaaaagtttattggggaaaaaaagactttacaaaataatacccctgggagaagggagtgggaaacatgatttcaaaattttcaattttttctagtctaatctactcaaaacggttcagaattcaataaaaataacattcacggtgcgaaaaatggggtatgaaaagtttattggggaaaaaaagactttacaaaataatacccctgggagaagggagtgggaaacatgatttcaaaattttcaattttttctagtctaatctactcaaaacggctcagaattcaataaaaataacattcacggtgcgaaaaatggggtttgacaagtttattggggaaaaaagactttacaaaataatacccctgggagaagggagtgggaaacatgatttcaaaattttcaattttttctagtctaatctactcaaaccggttcagaattcaataaaaataacattcacggtgcgaaaaatggggtttgacaagtttattggggaaaaaaagactttacaaaataatacccctgggagaagggagtgggaaaatggattcaaaaattttcaatttttttaaggttaatctactcaaaacggttcaaaattcaataaaaaaaaatttcccggggcaaaaaagggggttgaaaaagtttagtggggaaaaaaaaactttacaaaaaaaaaccccggggaaaagggggggggaaaaatgatttaaaaatttcaaatttt

SEQ ID NO: 29193 - DNA, 1026 bp, Heterodera glycines
gggaatagcttccctatagccttactttattctgcgtggattttgctccccataatttttgagtacccaaacgggacacttgaaaaaatcgatttttttgttttcggggcagtccccccgaaccgatgcgcccagatttatggggagaccgaatccttcgggaatagcttccctatagcctgtactttaattctgcgttggatttttgctccccataattgtttgagtaccccaaacggacacttgaaaaaatcgatttttttgttttcggggcagtccccctgaaccgatgcgcccagatttatggggagaccgaatccttccggaatagcttccctatagcctgtactttaattctgcgttggatttttgctccccataattgtttgagtaccccaaacggacacttgaaaaaatcgatttttttgttttcggggcagtccccccgaaccgatgcgcccagatttatggggagaccgaatccttccggaatagcttccctatagcctgtactttaattctgcgttggatttttgctccccataattgtttgagtaccccaaacggacacttgaaaaaatcgatttttttgttttcggggcagtccccccgaaccgatgcgcccagatttatggggagaccgaatccttcgggaatagcttccctatagcctgtactttaattctgcgttggatttttgctccccataattgtttgagtaccccaaacggacacttgaaaaaatcgatttttttgttttcggggcagtccccccgaaccgatgcgcccagatttatggggagaccgaatccttcgggaatagcttccctatagcctgtactttaattctgcgttggatttttgctccccataattgtttgagtaccccaaacggacacttgaaaaaatcgagttttttggtttccggggcagtccccccggaccgatgcgcccagatttatggggagaccgatccttcgggagtagctccctatagcctgtactttaatctgcagtggatttttg

SEQ ID NO: 29194 - DNA, 1017 bp, Heterodera glycines
  unsure (1)..(1017): unsure at all n locations
cctaaattaatgccatctttcannctttgatcggtacaaaattgggccgaaaaagagatagccattttctgaggcccgaaggaaaatttgagagggctaatttatatgtaatattcgaaagtgccaagctaattagcgattcaggcgcacattggggcctgaattaagccattttccctttgatcggtacaaaattggccgaaaaagagatagccattttctgaggcccgaaggaaaatttgagagggctaatttatatgtaatattcgaaagtgccaagctaattagcgattcaggcgcacattggggcctgaattaagccattttccctttgatcggtacaaaattggccgaaaaagagatagccattttctgaggcccgaaggaaaatttgagagggctaatttatatgtaatattcgaaagtgccaagctaattagcgattcaggcgcacattggggcctgaattaagccattttccctttgatcggtactaaattggccgaaaaagagatagccattttctgaggcccgaaggaaaatttgagagggctaatttatatgtaatattcgaaagtgccaagctaattagcgattcaggcgcacattggggcctgaattaagccattttccctttgatcggtactaaattggccgaaaaagagatagccattttctgaggcccgaaggaaaatttgagagggctaatttatatgtaatatttgaaagtgccaagctaattagcgattcaggcgcacattggggcctgaattaagccattttccctttgatcggtactaaattggccgaaaaagagatagccattttctgaggcccgaaggaaaatttgagagggctaatttatatgtaatattcgaaagtgccaagctaattagcgattcaggcgcacattggggcctgaattaagccattttccctttgatcggtacaaaattggccgaaaagagatagccattttctgaggcccgaagaaaatttgagagggctaattatatg

SEQ ID NO: 29195 - DNA, 849 bp, Heterodera glycines
atcattcaaaaatttatgcaaaaatgacaaataaaaaagctttcagtcattgaaaatggtaaacaaaaagcagtgagcaaaaaagggaaaaagcagtaaataaacaccctcggggagaagaatggaagggaaaagaaatcgcgtcgaaaaattctttgttttgaacggtgggcggggttaactgccgattaatataatagattatttggttttttatttaataaattaaattaatgaaaattttcaaacaaattttcttcaattatttcaaacaattaatcatttttggactaaatcatcgaatattaatagaaattcagatttgattttcacatcactttttttcggagcgctttttcaaaaaacttttgggaaagaaggggtccggcggtgccgataggcgccgccgggggaaattttgaaaatttgattgtaatttgttaacagattttcaacaaaaaaggttggtttttgggattattaagctcaattggtaggattttcatttaaaaaaatgataaaaatgtatcaattttaaaaaaaactatgaggaatcatattttctttataggaaacccacgagtatacaaaacaaaaaattgaaaataatctaatttctgtagagggattgaaccaggggaaagaagaagggaaagtcaaggagactagccattaggccatttgcacccttgggcagtgttacttttaaagaatatattaattattattttttatttttccctttgactccaattttcttcactaatttttcactcagaccccattcttaccagtgcttgtttttcccggttcccggttgccctaccgggaccgggacctgagcttttc

SEQ ID NO: 29196 - DNA, 1721 bp, Heterodera glycines
  unsure (1)..(1721): unsure at all n locations
aaaaatatgatccttaaattataacaaacacataaaaatttttgcgcattaaattgagtcaacaaaatgttcagcaaataaatccatctctgcattagcccataaaaatgcgcgacaataaaagtttgaaaaagatgattgattcgattcattggattaaaagtgataatagcactatttttatattatatattccatttaattattttttttataagtttgatgaaaaaactaaaataaaaagaattaaaaaattatatgtaaattgtggaaaaaaaatttcatgagcaaaattcgtttaaataattttttgctaaaattactaattctgcattttctaaatccatgttttgcaataaatagtaaataaggggtctcaactataaaatttttatattcatgtattacaatgatttttttctactaatttttatttgtttacaataaatttccgaaattttttgtccatattttggcattttttgctctcacattttagtgtttttgtccatattttgttcatattgtgattttttcgtccatataattccagtctctaatgataacatataaactgcgatttgcatagttattgtattaactttaacgttaatccattttaacaaagacattaatcccctcacattcacacacttttcgaaaaaaaaaagtttttttttagtgtttttaaagcgaagaacaaatattgtcattttcgcaaatcagtgagcacaaaatgaatcaatgaaaatactttttaattaatcttctttttttcaattttcaatttgttattttatttatttttatattattgtgtgtctttaaacaataaaaccatttaaatgtttaattgcattttgaaaaagcagtttttagtttcgttcgattttttctcatctttttttttgctaaaatgtcaacagacatcagaaattatcactattttaagtaattttttccgttataagcttaaaataaacaaaccttaaatttgtaatattcaaaaatttgtttgtttattcttttttgaaccaatcaaaaaatgctcaaactttaaaaatgacaaaaatttatttttaaatgatattttttagaatttcaaatttttctacgaaatggaaaatcgtcagcagcagagacgaaagagtgaaatgatcaggagaacattgtctgaagattatcccggccttgactatcttggctttcataatgtgctgaatgccaaatatttttggtaccgtgttctttggttttccgtggttaccgtatgcctgctgattggcctttttactatattcaggcattaaaacaaaaataataataataataatatttttaattcaataaaattttaagaatcattgctgaatacgtgcataatccgagcgcaactcttatcaatgttaagtcggtaaaaaactattaaaaattattatcaaaattaaaaaaaataaacaaatcgccactaaattaaacaattttttttaatattattattaaaatcttttaaaatttttttttttaataaaataaggtggaaaaattgctgcttcctcaattgactgtttgtccaacgcatgccgcgacattaaatattggaaaaatggaacaaaatttgttcaaaaataattcttattttggtgacaattatgcactcggaggnatgtgcttgattttgcatattttatgcttgctgnctcaggatttcaagtattttt

SEQ ID NO: 29197 - DNA, 1557 bp, Heterodera glycines
  unsure (1)..(1557): unsure at all n locations
atcttcagccttggcttctcacttcccactttgttttttgattttgtaatgatgtgtaaatgcttcgttaattttatttcccaatcccccggcggttttaaaattcatgtccggtaaataaacttgaatggggacactgctgtcattttcccatacttttataaactcttgaccatttataccgagagcggtgaatgagtaggggtaaataattgatgagagagctactgactaattcctggttataaaatatgccttttattaaatttccttccaaatcttcgatcctgtatgaatcgggtgtcgttgaattaacaataacgattttaaataattcttcggtaaagtttgggagatacccctttgcaaattttcctttttccttggtaattcgaacgatatcgccaattttaaatttgttctttttcgaaattttaaattccttcgccttatataatttttcccagagcgcccgtgcattttcaaaagtaacggatactggcttggcccccaatttcctattcacactgttgttaatgtttattattattctgtctattacatcgacccatcgtagagtgtccatctttgtaaaatatctatacaagcgctcctttattgtccgatttgccctttcaacgactccggcgtgaaggtcaggactatacatcacatttttgatgataaatttttcctcaaaatattttttcatttttccagcctggaactcgagtccgctgtcgctatattttcatcgggataattttcgacttttcgaatacccgatcaaaagcctcaatcatgtcctcattcttctttgacttggccggtgcactgaagatcattcgactcagcatgtggatatgcatagcaacagatatttgtaaccgtcgttatgctttttcaactggtcaaatatgcacaaatcgcactcaggagttcgctctttaagtcttttcctaggaataattattttccgtggttcttcagtctcctgtggtttggattggttattgaggcccagatatggtgcaacatttggaccgggtacatgattctcaatcacgaccttctgtggtctattttcaagtatcccctttaccgtacgcctttctttatagagccaatcgtgtctcttcgccttaaggtcctcgcttatgccggggtcttgtaaattctgaaaaatttttgcgtctaaaatcgctttttcattttggagataatcaccactattcatcgcactccgtagagccaaatattgcgcctcgggaatcattaacattttctttgcaaattcatgatgttattttttctaataaatgttgagctaaaacactcagtaccgggaccaagacagctcccagggctataccactcccctgttgtatcctttttcttgccgttttctctgaacgagatttggcaatttctctataaaaatcggcgtattgtgccaaccttcttttttgtttgntcgttagtttaaaactaaaactcaatatatttgcacaattttcacgattgccaaaatttggtcagctgtagcgttttcgatta

SEQ ID NO: 29198 - DNA, 1218 bp, Heterodera glycines
atttggcgctactgtaaaagtttttgtgatagtcataaaaatttattctctggggtttttggggtctccgatcacgaatctttcaattattttgatcaattccgatttcctaatctaaatttgaacaaaaaatcataatatgaaaaattcaaaatttcgatgtttattcgagttcgggttagggattagaaattagtcaaaatacatgtcagattcgtgattagcgacctttaaaaccccggataacaaattatcatggttttttatcttaaaaaaattttgcaaaacaaaagggtccccccttttatttcaaaatcggtaacttttacagcagcgcccttgattttttccaaaatttttaaaattttcttaacaagaatttgtcgtgaaaaaatgttctaatcacgaatatgaactcagattttgcaaaagccatcattttgtctatgatttttcttcaattctcacaaaaaaataaactgctgccaagcgggctcgaaccccagaccccgtctcacgtgacccgtaagggccagtaattaaatttcaaaaaaacgaaaaacttaacttctccaaacattcaatagcatattcaaagctatttttgaactctacaaattctgtgtatgagttttttacgcccgattaattttcttaaagttttcggaaaaataaagtacttgatgaaaaatcaaagacaaaatcagtgattttacaaaatctgaactcaggttcgtaatcagcacattttttcaccccaggaaaaacaaagttaaaatttttaagtttatttcccgtcgggaccgcaattctacacctttgccggattttttgaaacaatgaatttaaaattttgtatgttagtaaatgatactgagaaagccaacctaaaagccagcaatcaactcgctctctccaaatttcttcatactgtatgtaccaaagattatcaaaaaatcaaatacggactacgcatgcaaaatcggaacagcaaaaccggaatttagaaaaatcccaatgttaacaccacaagtgtgataaactaaacaacaaaagtttggaatccaattctttcaaagaaacaaagcgaagtataaatataacatccgcaaaagatcatcgtcagagaaagaaacacggagaaatgttcacaatcttcattattcctccacaatgataggctccgagctgttcttggtacacctaaacaattaatga

SEQ ID NO: 29199 - DNA, 1159 bp, Heterodera glycines
gggaagctatcccgaaggattcggtctccccattaactgggcgcatcggttcggggggactcccccgaaaacaaaaaaatcgagtttttcgagtgtccgtttggggtactcgaacaactatggggagcaaaaatccaacgcagaattaaagtacaggctatagggaagctattcccgaaggattcggtctccccataaatctgggcgcatcggttcggggggactgccccgaaaacaaaaaaatcgattttttcaagtgtccgtttggggtactcaaacaattatggggagcaaaaatccaacgcagaattaaagtacaggctatagggaagctattcccgaaggattcggtctccccataaatctgggcgcatcggttcggggggactgccccgaaaacaaaaaaatcgattttttcaagtgtccgtttggggtactcaaacaattatggggagcaaaaatccaacgcagaattaaagtacaggctatagggaagctattcccgaaggattcggtctccccataaatctgggcgcatcggttcggggggactgccccgaaaacaaaaaaatcgattttttcaagtgtccgtttggggtactcaaacaattatggggagcaaaaatccaacgcagaattaaagtacaggctatagggaagctattcccgaaggattcggtctccccataaatctgggcgcatcggttcggggggactgccccgaaaacaaaaaaatcgattttttcaagtgtccgtttggggtactcaaacaattatggggagcaaaaatccaacgcagaattaaagtacaggctatagggaagctattcccgaaggattcggtctccccataaatctgggcgcatcggttcggggggactgccccgaaaacaaaaaaatcgattttttcaagtgtccgtttggggtactcaaacaattatggggagcaaaaatccaacgcagaattaaagtacaggctatagggaagctattcccgaaggattcggtctccccataaatctgggcgcatcggttcggggggactgccccgaaaacaaaaaaaaaaattttttcaagtgtccgtttggggtactcaaacaattatggggagcaaaaatccaacgcagactagataatatttaaaataggttatttctct

SEQ ID NO: 29200 - DNA, 1539 bp, Heterodera glycines
actcactgatctggttcatttttcgtcttgatcaaaattcttttccttcattatacactttttcgttccatgacgcctgatcaggttcactctcctcactgatcaatttgtccatttcctccctaaacacagcatccatttcccctgatcagaatgtccttatactcaatgatcagattcattatttcgccctgatcaatatgtcctttgtcttcatgataaacaaacgtcccgccgttccctgatcaggtttactttcctcactgatccctaatcactttgtgcatttacttttgatcagaatgtcattatactcattcatttacctcactgatcactccttttccttttctgttgttttcctctgatcagtgcatacttttgtattttctttattattttgtttcatttttttcttgattatttcgcccgttttcctgtgattaattatcattttctttgttcagaagttctttttttcagaacatttgacgatttattttcttacaaccaatacatatttcgaagatgtcgacgcgtcaagacttggtccgtttatttgtttaaaataaaaataagaattcttataaatttcacaaatttttatgtattttgcctgaggcatatcttttttattcccttttatttttgccgctaatactctcctcccatgagattagataagagccgcatggaattttcttaaatagtacctaaatatttttccaacaattttcccttccaaaaatgtttttggcccccaaaaaactgcccactgaattggtctttgagctgagccgtttcatcaaatttgatttaaaatgggcgaggaaaaaccgagtgtcattttcatttgaccattttttgttggcaaaaaacagctattggctgaaactgatcaaaaaattggttttcctttctttttgcctgatcagcaaccatttatattatcaattttcagataagcgagtgcattttgtcattcgaaaagctgcgcgactatgtcgtgaacgaactgcaccatttgccggcactgcaaaagtcagctgctcgagccacttacggatgtaaatttgaagaatttatttaaatatcacaatttaaataacattcaaaaattcattctaacggtcacggtcacaattcacggggctattcacgggttttcttcgtaattgtcgcatttttataaaataaataattaaattaattattaaaagcttggaattattgccgtcccacttaagcattggtcgatttcaccagggacttccagtcgttgccgactttccgcgaattggctttgctcaacatcaatgaacacaataaccaggaatacgtaagcaaaatttaattacattttatttattaattactgattatttcttgactacaggtgagtcaggtgatgatcaaggctaatgaattggtgcgcacttgtgcttttcgtgaggaggcttccatggatatgcttggacactttgatactggtaattaatgattaatgttattagtgatgctactcgagtcgagaccagg

SEQ ID NO: 29201 - DNA, 1556 bp, Heterodera glycines
aagtcatgttaaaagtatcatgtaaaggaaataagtaccaaatttattattgtacgcgttgccattgaccccccccccccccatgtgcctcttcgtcctcccttccattcgctgccattgtgcgcttgtccaaaatgataaatgtgagtttgtccccgtcctccctccacgccctttgcatttgctgctcttcctccaatgtcaatgcctctgaaaaggtttctcgtcggagttcctcgctggccatccatccgtggtacttttccacatgtttggggcaatagggcacgagaacgcaatggtggccaataacggaatcattggcatttattcgcatcagaaattggcagagaaaggaaaagcacgaaaacggacaacaaccaacaacagaaagatattcaaatgacaattatgcaatgattggaaaaaatgcgataatttaagcgatgtttaacaatcaaagaaagaaagttgatttttatgcctttaaattaacaaaaaggagaaacaatcacatgttggaaaggtaccacaagcagaagcaaaggaaaagataatgcaaaaggaaatgaatgaattatgactgaataatggaagaaattttaaaaataaaaaagtaattaaaacgaaaaaggaacaaattggaaaaatgactatggacggaggtaatgaatgcactgacaacggacacacagctctgctgggttttgcttattgtttgttagccaattcaaacacggcgaaacattccatggctttggcaacgttcggacacacttaaacattgccaactgtgagttgtttgtaagttctggggtaaacgatgaacagagacaactgcatggtcgagatgaacgtcccgattccgttgggaaccgtaaaaaggaagaagggataaacattttactttttaaaattcaacgaactttcatgtagaaatcgtcgaccaaaactccgtacaacaaccattggacacagacctggaaaagaactggagtactaaggcacttaaaaacggaggggaaatcgacaaccgccaaatttgccaagcaaagcaaaaagggcaaagattcggtgcttttggtccgcaaaacttggccaacatccaaaagaggggaggcaatagttgctggaaaaggtcatgaaaaattaaattatattacgattatacaatataattgggccgggtctggcgctcgacagactttcatgggccacccgagcccgcgccagctaaattttgaaactaccgggttcaggtcgtccggttaaacgggcttctttgagccaagcggacagggtcttgttaaattgttaaagcccgagccttgcccagacattttgaccggctttagcaggattagcgcgccgcaaaaagtgtttcaaaaatcaaagcaaaaaataaatttcctttaaattttgactaattgtaaaaatatgaatttttgagtcaaaactaaaatttgcattgtttgtcctgaatttacaaataaaaagacttgtactataatttttaaaaatggagtcgcaattaaaatcactcgctatttaattga

SEQ ID NO: 29202 - DNA, 559 bp, Heterodera glycines
  unsure (1)..(559): unsure at all n locations
gagtcattatcaatgtttttaatggaaataaattgttgaaatatttttggggtcgttgaattttgcgccgccgcaaatgtccttttgactgggcgccgcaagtgtccttttgactgggcgccgcaagtgtcggcgccgcaagtgtcgcgccgcaagtgtcggcgccgcaaatgtcctcgccgcaagtgtccttttgactgggcgccgcaagtgtcggcgccgcaagtgtcgcgccgcaagtgtcggcgccgcaaatgtcctcgccgcaagtgtctgcgccgcaagtgtcgctttgactgggcgccgcaaatgtctgcgccgaaagtgtcagcgccgcaaatgtcagcgccgcaagtgtcagcgccgcaaatgtcagcgccgcaagtgtcagcgccgcaaatgtcggccaatcgtcttcttgactttcccttcttctttcccatggttcaattcctctaagtaatannatattttgtttatttttgtataatcatgagttncctatcgancaaatatgattactcatagttttttaattaacacatttttatattttttt

SEQ ID NO: 29203 - DNA, 1478 bp, Heterodera glycines
agtttttgattttaagccctttaaaataataacaataaacttgaaaaataaagtgaaaaataattcttaataagataactcagtgaatatgccaattttattcttaagcgatcttgctacagttcttgcaaatgaaattacacatattccacatctctatcacaattttaagctaaagaaagtcaaaattgattgggtttaaccatagtttattttgattaaaaataacataataaataaatatttgcgaagcctcccatactggtgatgcctcgaaacccatcataaaaaactccttaaaaattaatttttaaatttatatgtatttcaaataaatagctatctgttttttgggaaattttctataaaacaaatattctcgagcatgagagggagggcggtgcgcaatggcccttttattttttaatgaatttttaaatttcatatctattccaaaaatggctatctcttttttgggaaattttctattaaaagagcattataagtagcgaccttgtttattagaaaaaattaaatccacttactctgacgactgttcaggtaaaagtgtcgtagagtaagtgacaaaaaaaatatgtgaataaaatgaggtatcaaatgggtagttagtagtgatagaaaacaattgacatttggattggagaagcaaaaaagtcagacctccagcaaagggaaatttttttaggagttagagaaaaaaaaatatgtttttttgggaaagttttggtaagtaagaaatgtttgaagtaatagaatttttttttctctctttttttgaataaattgtgggagatcctgtagttctatttgttgaaaagatggagggattggatttgctttccgaatgtttttttgaaggatttcactgaatttaaaatttcattttggaggctttctttgttaacctccgatttggacgatggtcggatgttcagttgttgccacttcacgttttgcttcaaattggcccactttttgctccattccgccaacagctagctgcctttggaattttaggatgtgagaataactttcattaatcgcggcgggaggcgacctgaaccggcttggtatggaggccccattctataattagaaatcgggcactcgacgccaagctcgttgagtgcatgtgatagttcagtccggtcggtggcgattggagttgaaattttgaaggattgaatcggaaaaatctacgaaaatttggacaaaatttgttaaaaaaattatcagtgcttgaaaaaaagatttgttattttaaatgttacaaatgtggctgatcattataaatgatattaatttattattcttgacagatgatttgaaatttacaaatagtgatgaatggaaatttgtatttttttttgtttcacataaatttttttagtatttattttttaacaatgtcctgatttttgcttaaaacctttttaaacaaatttcttgtaaatata

SEQ ID NO: 29204 - DNA, 1099 bp, Heterodera glycines
tttatttctcctgagcttaaacttccctcaaaagtgttccgctggtgcgcgacgacccccgcaaaagtggtgggcagcgattgccaatcaaaagtgtcgaggacatggacgcgcacctcaaatcgtatcgacggcatgccatcatcattctgaacaacattttgccgggcattgatgtcaacgacattgtgaagtcttcgttggtatttcaggtataaattgtattttttgtcactgattttcaattattcccctcaccacagatttgtgtcattttgctgatgctaattccggtcgacgactgttctcaggagagactgacccgagaagatctgacggaagaggagaaggaattgtgcagcgaaacagcctcatttgactgttttattaaccaattaatggaaaagtaagcgaccactttccccaccaaaattgcttttattttttgcaatttttaatgggaattaatcgtattttccatgtgatttgcttctgtcaaagggtcttcggaatgatcgaaatgttgggcagttcggcgccgaatgatcgccattcactcaccaaaaacgaccttcgctcggccggttcaatggaggaaaaagtgatccaacagggcacagtgtctgtcttctgcactttgcttagcaattgcagtgcaccgttttttcaagtgggttttcgcaccggcgcgagccgaggaaaactcatagttaattatgaattattattgtttttaaatttaacagttgtctttcactacaagaaagtttctcataaatcttattatattcatttagaaaacaataaactgtatttttatttaataaatataattctgactgttatactataaatatatttgtaaattaaaatattgttttaaaaataataatttttaaaaatttaaaatgagccgagttgtcccatcagcagctgagttgtacgtcagctgattagtccagaaacctgcactgaatttttaaataaaataattttaaattcagcaaatttccgaccgattttttgcctttgtaaatgaacacacattcaactccaggcctggtaaatttattttatattttgttttatgttttacata

SEQ ID NO: 29205 - DNA, 1086 bp, Heterodera glycines
  unsure (1)..(1086): unsure at all n locations
gaaacaaaattcttccatctctttcgtcgcccgggagacattttacgggaatttagagcatcaattaaaaaagggagtcgttcacttattcagaaaaataaaataaaaccaagcggagtcattaagagtaattaaaacttaggtttttttttctggtttttgcctgttgcaatctttttatagaggcgctgtgacgaagttacaaaactatcaataatagaaatatttaaatttaattattataataataaagcataacttagcttaaacttacgtaaattaatgaaacattgtatgaaaaggtagtagtcctacgtatcctctattatattataatttttttaaaatttcgaaaaaatgaaaattaaacttggttgtttcttaaaaaaaaggaattaaatgttttatacgtttatggatatacaaaaatgatagggttttattgagttttaagaaaattatggacaaaattaatgagtctatggattttttttctgttataactttttataaatttttgctagattttttaaaattaaataagattgaggggatatttagagctatcgcttaacaatgagtttcattagtttgactaagtttaagctaagtaatgctttattattattaagtaaaattaaaacaataattaaatttaaatatttctattattgatacttttgtaacttcggcgcactaaattattcaaaatgtttttatggttattaagcttgtatatacggcatttatcttttttattctcaataataatgcaattattggggccttttcacgaaaattcgaaaattggactctataaaaattgaaaatttgaaaaattccgaaaaattttcattggtcaaaatttcaaaaggattagtcttgaaatttgatttttttttgttttaagagaatttaagtgcatttaagtttttttagatttanaaactcgaaatattaacctttatttggataaactcaatgtnaaaaattagtattatgtataatcacctaaattttanaattttatcatttccttttttccacgttttaccnatactttttgctaattgattttcaaaaact

SEQ ID NO: 29206 - DNA, 1138 bp, Heterodera glycines
ggcaccagagcagagtagaatagaatccatgccatgcgaaatggcacggcatgagaggagagtagaattggatacatgccaaacggaatggcacgggaggagaggagagttaaattgaatacaagccaaggggaatggcacgggagcagaggagagttgaatgaaatccaagcaaaggggaatggcatgagagcagaggagaattaaatgagggccaagcgaaatggcatgggaggagagcagagttgaattaaatgcaagccaaggggaatggcacgggaacagaggagggttaaatgggggacaaccaatggggaatggcacgggaacagaggagggttaaatgggggacaaggggaatggcacgggagcagaggagggttaaatgggggacaaccaatggggaatggcacgggagcagaggagggttaaatgggggacaaccaatggggaatggcacgggaacagaggagggttaaatgggggacaaccaatggggaatggcacgggagcagaggagggttaaatgggggacaaggggaatggcacgggagcagaggagggttaaatgggggacaaccaatggggaatggcacgggaacagaggagggttaaatgggggacaaccaatggggaatggcacgggaacagaggagggttaaatgggggacaaggggaatggcacgggagcagaggagggttaaatgggggacaaggggaatggcacgggagcagaggagggttaaatgggggacaaccatggggaatggcacgggaacagaggagggttaaatgggggacaaccaatggggaatggcacgggaacagaggagggttaaatgggggacaaggggaatggcacgggagcagaggagggttaaatgggggacaaggggaatggcacgggaacagaggagggttaaatgggggacaaccaatggggaatggcacgggaacagaggagggttaaatgggggacaaccaatgaggaatggcacgggagcagaggagggttaaatgggggacaaccaatggggaatggcacgggaacagaggagggttaaatgggggacaaccaatgcggaatggcacgggaacagaggagggttaaatgggggacaccaatggggaatggcac

SEQ ID NO: 29207 - DNA, 742 bp, Heterodera glycines
atagagtccggcgggatcgggactcacgcggggttttactggagtcccgttccgactcccgcttttttcggtgaacgggatttttaacgggagcgggatttttacgggattcccgttcgggactcccgtcccggaaaattttgaactcccgatcccgctcccggaaatttttacccaaaaagggagtaaaaatgcactggtaagaattgagtttttttggtaaaaataatgatttttcattgaaaatttgttaaatatatagccaaaatttcaaaatattcccagcggcgcctatcggcaccgccggatccttaaacctgctcaaatttgcaaaaattggtcatttttgaacaaaatctaacaatgtattgtatttaaatttaattaataaagggagtcaaaaatatttatttaataaattttttgttcgagtaaattataaaaaataatttatttaagccatttgaaaaaaatttatgattttcgactcaaaaataagatttttttatttcaaatttctcctcactaaatttttctatatatttttaatttaataaattgattggcctttaaatttgtgcattataaatattttgtgagtttttaattaaattttgaattactcccgctcccgcccgggactcccgttaaaaataggcgggattttaacgggagcgggatttccacgggattcccgatcccgctcccggaaaattttgaactcccgaacacggacggtccc

SEQ ID NO: 29208 - DNA, 1293 bp, Heterodera glycines
gggtgaacgcaatgatggaactgctgaggacagtgaaggaggaaaagcggcagagggacaaagcgcagacgaaggaacgctgggaaaagcaccaaaaggtggggaggagagaatggggaggaaaattacacacacaccttttaaatgtgcaggaactgtcggagattgaggcgagaagaaaacgcaaaatgatggcaaccaaaaagacggtttgcagaaatatatcgagaagagaagccaaacggaagcgaggggacaacacgaccgaaatggaaacaatcggggcgtgatcaaactctgttttccacctttttcatcatgttatttgatatttatcggcaaaaaatttatactttttaagagatcacaccaaaaaataataattaaatatgcgtaattaaaagagaattgggcggagatggcggtttcttaaaatggtaagaacaatgagaaaatggaaaatgaaatcgccatttacaaaaacaaataaatatcacaaattgtacaaaataataatataatttgaggaagggatttgagttttgtgtagaagtgaaaaggaattttgttgattattaggagttatggctttgcaaaggatgggaaactcagtgtttaaaaatggacaattataataattaaataacaaaatatctgtggagtgacggaaaggaaagtgaggggtaaattacccgtagggggggggacaattgcaattatcgggggagggggtacaattaagaggcagacgatggatgaacaatcggcggtcacatcaaacgatgatttcgcgcatcactcgaactcctccgccggcgttgccgtttctgaaggaggacgagtcgctggcggagctgtcgctgctccccgcgctgatcaactgctcgttgctgctgttccctgtgcccctttcgtttgtgcctttttccccctccgccgtcggccgatccgtcgccaatcgccgcccattggccgccgccgttctctccccgtttccgatcagtgacgaagggaaatggttgaagaaccttgtaaatgtgttagctaatctgatcactgaaatgactgtttctcccttttcccatccccggactgatctgtccttttcacttcctaatgagttttctcaattattcctttccgactgatctgtccctactccttggcctttctttcggattgatctgtccatcccccatccaattgttcactttgtgtacggatttggcggcttccctgctgtcctgctggctatgcttgactgctctcgtcgagtgctctgatggagcgcgt

SEQ ID NO: 29209 - DNA, 1980 bp, Heterodera glycines
attatgtttcttttaggattttggcaaattcgcaatagaaattcccataatgaatcccggtcaattaatcaaaccaaaatagttcccgaaaacgctaatggctaaaatattttttttcaaattttttagaaattgcaacaagcctatcccctttttcaaaagactatcattatgtatgagaaaaacggaactttttttggttcatttgagtaggagaaagggtttgaatgggcccggagggggacgaatggatgcccggcccatacattgtgccaaataaagtttttgaggggtgtgccgtctccgcagcagcggccggaagggagagggagggcacaaattcgtcgccgcttccgccgtttggattgcaaaatgccgtggatgagggcaatttgtatggtgccgtcgctgcaaatagcggtggggtttctgtcccctcccccgggggggggggggggagggggccaaaatttggggatgtagcagagagtgggtgaatagtgaatgatgatgagtagcaatggcaaaatgggtgggaaatgagcgatgagtgaattttttgcatcatcccttccacaagccccccggggcataggaagatgttttttgtttttgttttttgagtgtttgaaatggccatttaaaatttaaatgttagcgaactccgcacaaaacgccgatttttttttgacaaagtgtctcctctgagaaaagtgaggcaaatgatcaaaccatcatttctcccgggcagatatatggacgttctttttgacaaagtgccagcttttggacaaactggccaatttaaaaaaatccactaattagttcttggacaaaatgacgacactgggacatggacaaagtgtcaaataggaattgtgcctaagcggaacaaaaaaatttgccaaaaagggacaaaatgccgaaattgaaacagtgcccaaaataattactagggccgcaacttttagtgaaaaaactttttttgctcaattgttttgaagaaaggagctcaaaaaacgtatttctgcattaaaattttttcatttggacgtcacttttcgtcactagaaatcactattttggcgttttgtcactatttttcactatttcgacattttttggaaaaattccttaacaaaaatgcaataaaaccaaaaaatacacccctaagaattgagctaaaatttttcaaaatatactactatgaaatgaaaaaaaaaatttctcacaaatttactttcttggcaaaaatttttaatttaaaaaaatttttttaagtaactattttgtgttttttggtcttaaaaatcccagtcctactcatttgcaactgcaacttaaatattgaaaattaatttgattcaaataaaaaataaaaaatattaataattaaatggaaatgtaaaaattttttcatttgtgttaaatatatttattgatagcaaaatttccgaaaataaattagaacatgttgtgaaaatataaataattacaaataaatcattgtaagcaaaaaatcaaaacaaaaaattgtccccaaaaaatttaaaaaataaaaataatcaaaaataaaaatattgtataaaattcaaacatacgcgaaccaaaaacaaattgataaataaaatgttatatatatagcaaaaataaataataaaatatataaatatgttttcatacaagaattttgcctatttgagaagaagaacaatttgaaaatgtgggctttgaccacgaactagaaaatgaagattgataaaatagttagaaaataaaaaatgaaacatttagtaaccaaatactaattgtttaaagactgccattaaaaaataaaaaatgcaagaaacctattcaaaaaattatgaggaattaaattttcaataataatcgaagcccacaaataataggaatttttaaaattcctaaaaaatggccctttgggaaaaaaacaatataggcatttaaaaatgaaaaaaa

SEQ ID NO: 29210 - DNA, 1040 bp, Heterodera glycines
gcgcgattctcacgtaaacgagcgcgcctatggtcgggcatttgactgagccgcacgcgtgcgagcccgaaatgcatttcagcttcggagaagcgcccgactccaggcgcccgactaccgcccactgtaccgcgtcaaattccaccactcatcgacagcagacgacccggctgccgcacgccgcaagcagcagcgccgctcgcggcgacggcgtcgcgaacggcagcagcgtcgccggctgcgtacagaacacctgccgttttggcgactgctggccgtcactgccaacaacaatgccggagagccggcagaagacgacgcggactggacggcgttcggtgccgatcagatggctaccgcccgggacctgctccaggctgaggggcgtacgctcaacgactgggtgcagttcgacgaggcgtccgccgactgggtgcctctcaccctagcggagctgaagcagctgtcggacggagtgcatcgtggaagcgactcgacagcagcgggcgaccgcacgtgccccgtctgcctggaagatttggaaggcaaagtgttgctgcgtacgggctgttgccaacaacagttttgcgccgcatgcctgtggatgcacgcgggtgcttcccgctgctgtccgctgtgccgacggcatctgctgagcggtgccccgctgacgccggaggaggacgctttggacagcgactccgtggccagtgatgaggcccataacgacgacgacgatatggtcgtacagtcaacttcagctggacgacgacgacgacagaggcgcagcggggggcggacgggtcccagctgcttgggcttcggctcctttggcccgccgtcgtcggacagcacggacggctcctttgtggagttggctgcgtggagtgattgatgatgggatggggggggggcgacgacgatgatgatgatgatgataatgaataatttataacataatcttgctatataaaataataataatttcgatatctgttgaccgcgcgtgagcatgcgcaaagcgaatggggggggggggg

SEQ ID NO: 29211 - DNA, 1081 bp, Heterodera glycines
cccccccgcccttcagaattttgaaaaaaaaataaaataataggagactcagaattttgaaaattttttataaaaactgatgacaagctaatgtgataaaacaggttaattcttttcctttcagtatccctgcaaagtttggggcgcttctgataagtttctgaaaaaaaagttaagcctaaactttttggcctgtttaaaaaggaattaaaaatttttaaaaatttattcatctccctttttgatagaaaaagcatcagagtgcctaaactagcatgtaaataaaatttggtgcgtttcagagcattttctgaaaaaaatatttatgaattaattatgcaaaaataaaataaaaatttctaaaaatttgatcgtccataaataatttgtaattgatcaggggctcaccaaattttgcagggatacgtatcggaacactacaaatgcttactaattttcctagattttttaaacccggtgaaaattttttgcagacaccaccacttttgcacttaaaaaaatttcaaaaaactttaaaaattcatagaaaatttaaattcataggtactactgctaaatcaacgcagagacgcctttccttgacctttttaggcccctgcaaaatctggtgcgcttctgatcactactcgaaaaatgagtgattgaattttcactaaaaagttaagcctaaactttttggcctgtttaaaaaggaattaaaaatttttaaaaatttattcatctccctttttgatagaaaaagcatcagagtgcctaaactaacatgtaaataaaatttggtgcgtttcagaaccctttctgaaaaaatatttaagaattaattttgcaaaaaataaataaaaacgaaagactcagattttcgaaaatttttttgagccagctagctcggcgctcatttcagtgtaagttagtcctttaccggggagtatccctgcaaagtttggtacgcttctgctcaattagcaaaaaatatgagtgatcgaattttcactaaaaaagttaagcctacattttttggcatatttaaaaagcaactaaaaaatttttaaaatttaataat

SEQ ID NO: 29212 - DNA, 1641 bp, Heterodera glycines
ccgaaatgccctttttgacctgaagtggcatttgtcatcttaattttttaaatcataattaccccactgaatccaatgcgcgcatggcgacactcttgcaggccaagctcatcaatgatctaattgttgtagcaattaaaaaatttataaactttaaaatttccttggccagaatttttttttaaattttttacccattctggaaaggttgtaaagcattgcatccattagaaattggacagaaaatctataaaaagctcagttttggatgaataaagcaagaaagtgtagccaaaggaaataagaatttataaaattagcctaaaaatggaaattccggaggacaagcctttgtccattgtacttttctttttgaaggcgtagcccatttttaacgaaaagatgaacaaaacgcaattggatgggccttcaaaacggaaaagtaccgatccatcctccaaatcccacctcattgacgcgtctgcgcatcgtccgtttggagtgtccgaccatgcgaagctgtgcctgcgccatcagatgctccttcaccgtcagcgtgcccatgaacaagtcgtcctgttgcacgtactgaaattgtgtggaaatttatatagtataaggatgataaaaaagggttcgaaataccagaacccaaaaaatccgggaaatttccgagtccaggaaccgaaccgaaacccccgaacttcatatcataacaacttaccccgctgacgtaagtgatggaccggcccagggaatgtccgttgaccagcacttggccctccacgctcagactcttcagatttcggttgagtaacgtgttcagcagcgttgttttacccgccccgctggcgcccatcagtgccacgagttggcccgcgtcggccataccggacacattgtctgtaaaaggtcgaaatttatatacacaatgagtgcaaccccgacaggttttaccaagaattttccgtcccgatttggcatggacagcggtgagaccgtgccaagacaatgccacgggttgcacttcctggacactcttggtcggtgacatcgctccataattggaccgtcttcggcgtatgcgtcccaagccgtagtccatggtcaatgcgtcactggcgctgtgtttcaactacaaaaacaaaaatttgtttacaagattaacgggcctttatggcaatgattgtgagacggattttttgctcgaattttattggaaaaaaatcttacaatgtgattgaaattggttatgcctgtagtggcaaattgtcagctatttttgaccaaagtttaggaaaggaaaagccagtttaaaaagagtggaaatgggacaaaacagatttttggcatactgttccgccggcaattaaattcaaattcaaattattatatatggcaaaagtttatacgtttagcttttttttaaatccaattaggtacattttatcagtcgaaatctcttattgaaatctaacaaagatttcttgacatataaaaggttaataaataaaaaattgcaaaaattttgccattttttgcagttttcgaatttttgcgccggttaatcactaattttttattttgtatttctaaattatgtaatgcattgtcatattccaatattccccccggttatta

SEQ ID NO: 29213 - DNA, 478 bp, Heterodera glycines
ttccgttataaaccataggtaacaacggtcggtttcgttatcaaccataggtaacaacgtttccggtttttaaataaaacatcgcttccgttatcaaccataggtaacaacggttccggtttttaaataaaacatcggttccgttatcacccagaggtaacaacggtcggttccgttatcaaccataggtaacaacggttccggtttttaaaaaaacatcgcttccgttatcacccaccagaggtaacaacggtcggttccgttatcaaccataggtaacaacggttccggtttttaaaaaaacatcgcttccgttatcacccaccagaggtaacaacggtcggtttcgttatcaaccataggaaacaacggttccggcttttaaataaaacatcggttccgttatcacccaaatgtaacaacggtcggtttcgttatcaaccatatgtaacaacgggttccgggtttttaaataaaa

SEQ ID NO: 29214 - DNA, 1067 bp, Heterodera glycines
tcctatagccattatttagtttatgggttatgcacaaaatttatagctctctatttaaactctctatctctctgttctctctctctctctgtattcctcgctctatccaattttccctttctctgagttataaagcgcaataacaactctttctccctctctttctctgcgtgtgtgctgctgatccactcttattccatttctctcactctttcgtccctctctctctctctccctgctctctctcttattctttgtctctctctgtatgtacttatccactttacttctatttctctctgctctcttgctccctccctctctctcccccgtactgttaatttatctattattgacacgcacgcacacattaccccacaatttcgcatttaattagtcgttgctctaatgatgatgatgatggtctgatggcaacgctgtctgccttgctgtctttcattcaaattccagagaaaacgagaacagcggggaaatagtggttatttagagaaaggtgggaaagagagtgtgtatgtgagcgcaagacgcagagaaaaaagcaagcgagagaataggacaaagtggagacaaacaacgaatgagaaatagcggtttttaactgtggcgggcgacggcgctaatttggctgccgcgcgcgcttcgcgttccaccgcttgcgcacgcgcccgtcacaatcaatggcgtacgcttcagggggcacaaggctatgtaccagcacagaaagcccgaagcgaggcctctgccgctgattggctattttctgtgtgcctgtgtttagttagagttagtctcccccccccgcgccctataaaaccccggcgggggttcgtttgcctgcctctctatctgccccagctgctgcttctctatccgctctctgcgaataaataataaatgcttcaagcatctctctccctctctgacacatttttcaattctctgtttctctagcttttcgccattttcagggaagaatttttcatttttgcacttctctgccatcttcagaagatgaagaagaggaggaggaggaggagggaagagag

SEQ ID NO: 29215 - DNA, 1289 bp, Heterodera glycines
  unsure (1)..(1289): unsure at all n locations
aattaaatgcattttcattctaaatacantttgaaaaggataaaatgaatgacttatctttttaatatctctaaactttaagcatcatctggccttccaatgcgttcaaataatttggacgaaaataaaagaattgagcagagaaaaattgttggaataaaaattggtgatcatcgggaggaacaattgcagaagagatcagcagaaatatggacaaattatatggaagagactttggaaaagattaaagcgcacatggaaatggttaaattaaaatattatttgtcaaatggaatcactttttgggactaaaataatgatttcgcatggattttattatttttattcttgattttggttttttaagagaaatttcttaacaaaaaggtttgttttattaaaaaacaacaaagtgtttttaaaataattttttagtgaaataaaatttttttgatcatttaaaagtttgttaagctaaatttagtttgggcacattaaatcaaattttgaagatttttctcgggtttctctgatcagttttcgaaccgggccaaagatccgaaatttaaattggaaattcttcccacgaaaaaacggcataagccgacttgaacatttacaatttgggctttgtcttttgagggaggcttaaaaaagaaatgttttaatttattttaaacccaaaatgaatgaattcacatcataaattgaaagagaatttataaatttaatttttcaggatccaatttaccaacaattggcagagcaaaaatatgcaattgacaatttcccgggattggatgacattttcaggaagacgcgcttttttcttgtaaattcacaacccgaagtggactttgacaattacagaagtgtcaaaggcatggaaaaggtcaaattcatcggaggatttaatttaatgccgaaagcgcgggaattggacgaagttagcaaaaaaatagttaaataaataacagttaaatttattaaaagcaaaattaaattatcattaaaaaaaaatttgttaatatttgaccctaggcttataataaataataaattttgttaaatcaatttaaaaaatgcttccgttcacacaatgtaaaatgaaattgatcattttttgataaactttttaaggaaatttccaaaaaatctggcggcaaaaatggcattgttttggtcagttttggcacagttgttgacacaaccaatccggcattttcggatgtcatcgaagccgtagaagggacaattaagaattttccaganatttttattcatatgga

SEQ ID NO: 29216 - DNA, 2104 bp, Heterodera glycines
gtctttttttgataaatcatttctataaattgaaagttccagcagagaacttcgaaatccaaatgacgaattaatgaattcgagatttcattagtttctacaatcgaagaaaaaattttttaatttgaaaattatgttaataattaggaaaaaagtcgatttttagggggtgtatttttcaattttcttgtatttttattgcaatttttctcaaaaatgccaaaatatgtgcaaaatatgtgccaaactccaaaatatgtgctaacatattttatgtgacaaaacgccaaaatatgtgtttttatgtttttataagtcgctctaaatcaaaaattgttcggagataatgctatttttgggcttctctcgccataactaagccgcaaaaaaaatatgtaaaaacataaaaatccgggccctattgatcaccattatcaatgtgttatgtctctgtgttatcatttcaaatgacttgtgatcaattgtttcgcctaatatgtattaactgtgatgaaacgtgaattttattaaagacctatagacctttttgattgcgaaaaaatgtttccgataataaatcgatgaaaattcattcatggattttcggggttgctcgcatcagcaactggcaattgtctaaatttgttgtcccgataaaaaatagccagaattttggttttcctttgcagcgattttagggaaaaagttctgattaagaatatttcgttaaatgatttatcgaatccaaatttttcacattcattttttcaatggcggcgagaaagccataaaacaaaggtgcggcgagttgggcggtgccctccacaaaatttagaaaaccacagccaatttaaaaatgcacattacagttttattgtccgaataacctatttatgtacaatacaaaattagatatcgcttttttccgatcacaattggagatgagtgccgatcacttatccactgttgctttgttcaccatcaggtatgagcacaacgtgtccatcgttgtacgcgccctcaaacacggcgtttcccgaatgatacaattccgtaaattgacgaaagtgaaatttaacagagaatggggccaaaaacaaatatcgggatatgctttaaaatagggacaacagagaagcggaagattcgaaaaatggctaaaacatcattcggaatttcagtccgtgagacgggtgctaaattctgaataccaactccgtgtaaaggatttaaaggcaaaaacaggggtacacttatacagtttacagggtactttttacatacattttcagatgcctataaatgtgtttcagaaattaatgaaaataagtgttaaggggttctcgaggtcgctgattacgaatatagcatccatttttctaattccgaacccctgacccgaaatcgaacaataataaaattaaaaaatctgtatgaatgatatcctgattggcatcttacccatgagggcagccttgcaacatgaagaataatattccaatctagtatggacggaacgctgacgagtagcttgacattgaggatattaatgatcatgggaatgtatccatactctgacgtcgcaccgttgacgtcatcaatgacaatctgccaaatatcagaacattttttaaatttgacacaaaaagcgccaaagttggtgaaaatatgttaaatagtcagacaaaaatttcttagttttccctgcgggctaatgagcctcttattagtctacgaaggttgaaaaaaaattaaaacctattttagaactgttgataacaatttcttttatatcaaatgaaattttttgaaattttataggctcacagagaatcttagagctattaaattatactaagaatatttaatttggatgaatttttgacaaaataatgaaacgcttaatttgtcattttattttatttttttgtgaagaaattttttggcaaatttttgttaatctataaaatgccaccctaatgaaattttttttaatacattaaaaattaatttgaaatcttctgatattttcaatcctttcctttttataatttatattaaagccattataattaattatgttttatacttcgccgaccgcccc

SEQ ID NO: 29217 - DNA, 1180 bp, Heterodera glycines
  unsure (1)..(1180): unsure at all n locations
attccggaagggattcggtctccccataaatctgggcgcctttgttcggggggactgccccgaaaacaaaaaaatcgattttttcaagtgtccgtttggggtactcaaacaattatggggagcaaaactccaacgcagaattaaagtacagactatagggaagctattcccgaaggattcggtctccccataaatctgggcgcatcggttcagggggactgccccgaaaacccaaaaaaaaattttttggataaaaattatttaaatgaactgactagataatatttaaaataggttatttctcttcctttcagtatccctgcaaagtttggtgcgcttctgatcagtttctgaaaaaaaagttaagcctaaactttttggcatgtttaaaaagcaattaaaaattttattcatctccctttttgatagtaaaagcatcagagagcctattttaacttgtacataaaatttgatgcgtttcagagcactttctgaaaaaatatttatgaattaattttgcaaaaaataaataaacagttaaaaactcagaatttctaaaaaaatttaaaaccaattacaattgtcattttttcaggttaagttagtcctgtaccggggagtatgcctataaaatttggtacgattttattgcttattgaaagagctagaaccgaagaaaatctttttaatttaagcctaaactttttggcatgtttaaaaagcaattaaaaattttattcatctccctttttgatagtaaaagcatcagagagccttatttaacttgtacataaaatttgatgcgtttcagagcactttctgaaaaaatatttatgaattaattttgcaaaaaataataaacagtgaaaaactcagaatttctaaaaaaatttaaaaccaattacaattgtcattttttcaggttaagttagtcctgtaccggggagtatgcctataaaatttggtacgattttattgattattgaaagagctagaaccgaagaaaatctttttaatttaagcctaaactttttggcatgtttaaagcaattaaaaatttattcatctccctttttgatagtaaaagcatcagagagccttatttaactcgtacatnaatttgatgcgtttcagagcactatctgaaaaaatatttatgaattaatttttgcaaaaataa

SEQ ID NO: 29218 - DNA, 734 bp, Heterodera glycines
  unsure (1)..(734): unsure at all n locations
gatagcgtgcgagtgtgagagtgtgtgagtgtgaatcgcgagagagagagtgaagaagaagagaggagagagtgaagaagaagaaagcgagagagagaagaagagagagatagagtgagagagtgaggggagagagagagagtgaagaagagagagcgagagagtgtgaggagagcagagaaaaggaggaaaagagagagagtgagagtgtggcagagagagagtaagcacaaatgttagaaataaacacacttggaagcctttgaaaatgagtgaaagaaaaaaagcaaaaatcgaagaaatgagactgagagaagttataaatttaatttttaaaaaaatttttttatatcattaaaaattaccgctagttaaaggactaatgtgaaaagaagcttgctggggcactttttaaatctgccgaattggatacttttcggcacagtgctccaagatctgaggatttatcctcattttgtggttttttgttaagtaaatgaggatttttttgaaatgaggatttgaggatttttgtacttttttgagaaattttgaggatttttgagtcttttggcgaaaatcgtcaggatctgttaaattttatgataaatttgacatcattaaatttggctttttatatctcatcaaaacaaatctacccatatttttttaaaaattttctaaaccagaaattaccattttttccgaaatcacanaatttangtattttttag

SEQ ID NO: 29219 - DNA, 878 bp, Heterodera glycines
tttaatgtagagtagagcgggaccgggaattttgggcaaaaccgggaccgggacttgccgggacctgagaagccgggaccaggacctcgatttttcttcgggaccgggaaccgggaccaaccgggaatttttaaaaattcaaaaaaatttaaaaaattaaaaaaaaaatcaaattttaatttatttcaagtgaaaatattaaataattaaatttttatttagttttttatttaataaaacccaaaagttaaagctaataaattaatgaaaattttcaaatcaaattttcttcatttctttcaaacaattaatcatttttggactaagtgatcgaatattattagaaattcagatttacgtttcacataaattttttcggcacgctttttccaaaaaacttagcggaagaaagggggaccggcggtgccgataggcgccgccgggggaaattttgaaaatttgagtgagatttgttaacagattttcaacaaaaaaggctggttttgggattactaggctcaatttgtacggattttctttaaaaatgataaaatacaattaaaaaaaaattaagaatcatattttgtcgataggaaagccatgagtatatataaaaagaaatttcaaaatattttcatttctgtagagggatcgaaccaggggaaagaagaagggaaagtgaaggagactagccactaggccatttgcacagttggtattgctactttatgaatatatttaattattatttctaaattttttcctttaactccaattttctcactaatttttgcactcagacccccattcttaccagtgcttgtttttcccggttgccctaccgggaccgggacctgagcttttcaaaatccgggacc

SEQ ID NO: 29220 - DNA, 827 bp, Heterodera glycines
tagccatttttctgagaattaattcacaatttccgcagctcttgcggtaatggaaaaaattttgaagaggctctgcggaacggattagcatcggggttacgagatagaaaattgtcctaaaaagagatagccatttttctgagaattaattcacaatttccgcagctcttgcggtaatggaaaaaattttgaagaggctctgcggaacggattagcatcggggttacgagatagaaaattgtcctaaaaagagatagccatttttctgagaattaattcacaatttccgcagctcttgcggtaatggaaaaaattttgaagaggctctgcggaacggattagcatcggggttacgagatagaaaattgtcctaaaaagagatagccatttttctgagaattaattcacaatttccgcagctcttgcggtaatggaaaaaattttgaagaggctctgcggaacggattagcatcggggttacgagatagaaaattgtcctaaaaagagatagccatttttctgagaattaattcacaatttccgcagctcttgcggtaatggaaaaaattttgaagaggctctgcggaacggattagcatcggggttacgagatagaaaattgtcctaaaaagagatagccatttttctgagaattaattcacaatttccgcagctcttgcgggtatggaaaaattttgaagaggctctgcggaacggattagcatcgggggttacgagatagaaaattggcctaaaaagagatagccatttttctgaaaattaattcacaattcccgcactcttgcgggaatggaaaaaattttgaa

SEQ ID NO: 29221 - DNA, 1098 bp, Heterodera glycines
  unsure (1)..(1098): unsure at all n locations
tttgcagggatactccccggtaaaggactactttacactgaaatgagcgccgagctagctggctcaaaaaaattttcgaaaatctgagtctttcgtttttatttattttttgcaaaattaattcataaatattttttcagaaaatgctctgaaacgcaccaaattttatttacatgctagtttaggcactctgatgctttttctatcaaaaagggagatgaataaattttaaaaatttttaattcctttttaaacaggccaaaaagtttaggcttaacttttttttcagaaactgatcagaagcgcaccaaactttgcagggatactgaaaggaagagaaataacctattttaaatattatctagtcagttcatttaaataatttttatccaaaaaatttttttttgggttttcggggcagtccccctgaaccgatgcgcccagatttatggggagaccgaatccttccggaatagcttcgatatagcctgtactttaattctgcgttggatttttgctccccataattgtttgagtaccccaaacggacacttgaaaaaatcgatttttttgttttcggggcagtccccccgaaccgatgcgcccagatttatggggagaccgaatccttcgggaatagcttccctatagcctgtactttaattctgcgttggatttttgctccccataattgtttgagtaccccaaacggacacttgaaaaaatcgatttttttgttttcggggcagtccccccgaaccgatgcgcccagatttatggggagaccgaatccttcgggaatagcttccctatagaaaagggagtactataattctgcgttggatttttgctccccataattttatgagtaccccaaacggacacttgaaaaaatcgatttttttgttttcggggcagtccccccgaaccgatgcgcccagatttatggggagaccgaatccttccggaatagcttccctatagcctgtactttaattctgcngtggatttttgctccccataattgtttgagtacccccaacgacacttgaaanaatcgattttttgttttcggggcagtccccccgaccgatgcgc

SEQ ID NO: 29222 - DNA, 767 bp, Heterodera glycines
gtgaaaattctaataaaattggtaaccggtactcccaatattttcttaaaacatttggcacagttttatataggacttagaatttgtaaaaattgtcgaagtgtctaattttgtaataattcaaattgcatctttgatttagcaagacaaaatccaaaaaatccgtcaacatttggagctgcaacaccagaaggagcttcgacgccaacaacagcaacagaacggcggcccgaatcagcagggcggaattggcacagcgtcgccacgaaagaacacattttggcaaattcgtactcggattggcggtgctgcggcgggcatgggacaatcgagcgccaacgaatcagtatatatctgacaaataacacttgcatttttttgataaaaatgagaaatctggcgatgcaaacagatccaacggggaccggtaaattggacaccagaaaattggacaccaagcggaaaaatggacaccgccggaattttggacactaaaggaaaattggacaccagaaaattggacaccaagcggaaaaatggacaccgccggaattttggacactaaaggaaaattggacactaagatttcctttttaaaaaaaatcaagaattaggtgaaaataaatttgagtagaataaatgggttaaatgagggatgattgatcaatgtgccacaaaatgcaccaaaaatgggtgacgatgatcaaacaaaatgcaccaaaaatgggtgacgcttgatcaatgggccagaaaatgcaccacaaatg

SEQ ID NO: 29223 - DNA, 1442 bp, Heterodera glycines
aatcactccttatcatttatgctcactttccttccgttttgatcagagtctgttccttatccccgtggcaattgtctgatcacttttttctttctttaagctctccgtttcttcaccagcagccgccaccactgatcagcagatcgcatcattacaattcatcatcctccaaatcacttttttctttccatcattccccccccctaattagttgcctaattaattcccctcctcctccgatcagttctctcccattaagctcacgaaagcatttgcccactaattgcccattaaccaacaccaccacatcattattagcatcataagctaggaggggttcctacttctccccctttcctctcctcacacatcacattacatcctcccatcaatttaccacattattaattgggctcccccctaatttacccctccctctcccccaaataatttcgcctcccctccggtgccatcatttcatttattttgtgtgtgtgattattgcgcagcaccaccaccacaaaaactaattgccctccctattattgatgatgctaatgatgatgatgatgagggcgagggcgcgccggcgaatttacgaatgatcgggcgcccattttgcattattctcttctcttcatcatttttcggtgaggtcgtcgttgttcgttgccccttcattggtggcagccggcggcccccaaattcgccgcttttcgccccattaattcatcgccccccattaataggcgcagcggccaaaatgccatcaccaatttgtacagcagcaaacacaaatgcgcatacacacatttaattgagtgataaaatgcccttttagggttggctcgagtcaaacttttgccgagatttaagcattgatcacccggctaaatctaatccctcaactcgagatcaacaagactcgcgcactgtcccctagtgcccctcccctctctcttttgtgcactttgtctatgtctgtctgtctgtctgtctgttctctctgttatatgccactgtctctcatccacttactgtctctcacaacttttctcgtttgtcaatcctatttttttttttttgctgagttccccgtccaattttctcctcaccatcattttgccgtggattggggtgggcggggaagttattgttggtggaatggctggcctaaattatcaaaaattactattcctcccgcatcccccggagggcggggaaagttgggccggggcggctggctgtaatcatttatttgatgatgatgatgacggcgatggtgattattcaattcattcactcattcattcatggcaatttgctcggggcgccaattgaaaaattttcacacaatttacattcattgttgtataaataaagcccaaatagtgccgtaagggaaaggggcggcaatttgatgaaaagtgccaaatttgatg

SEQ ID NO: 29224 - DNA, 1512 bp, Heterodera glycines
  unsure (1)..(1512): unsure at all n locations
attgganaatttgaccctttttaacagatttttcacataaatggcaacaaatntagaaattttatggagattttgtgggcccgcaacgccgtcaagcgctgccggaaagaattttggaagtttcaaatagttttgtaaaggatttttttttctcttttctctcttcgctggccaccttccccccccccccacaatgttcatcgttaacagtaaaaattctcgacctccgagaataaaaactcgagaaatttcacatccctagactttgtgatgatacctttccaaaatttcaattttttcgtttttgaaattccttctcccttaataaagttcgagttttcatgatgaaaatttgttttcattcgagtttatgacatattttggccaaacttaaaaaaaaatccaaattcgaacaaaaaaaatttcccattataaaatgcaattcttcgggataaagatgtaagatttacccatgaactcgaaacaaagtgtgtagtttggtaatttgtagatacattttcccaaaaattaagcatttttctggcaaaattaatttttttgttgcaacgcaaaacgtgtcgaaggcaaaaaaggaaacaattcaaaaacaattatgagattattatttttaatttattcattcatcatcaattaaaaattattaggtcacaattttgctgaaattattgggaaattcaaatatgaatgatttctatgggtcatcattttgccgcaatttattcttaattgaccctaaaaatatgtaagcaaaatcaggcagaagaatgaatgctcatttatttattcgatccctttttaacaaaataataattatctataaaaaaattaaaatctgaaaatgatttaaggaatttgcattttctaagaatattaaatgtcaatctcaaccaattcaacaaatggcgattttacaccaacagaaggaggtaatgagaaaaagagaaaccgtaggaagttaaattgagtactggaaatgttaagataaatattaatttatgtttgcgaattaaattttataagattttcagaagttaattgtgaatcaattagtttggacaacgatggacaatctgatggaaaagcgactgatccgcagcagcagaaagtgagcaattaatagcatttgtacgagaaagatttgaaatattttgacataatatttttaaaggaatttgttgaaaagtgtgccaagatggaaatggacttcaaaattagcacattagaacttgagaaagttggttttcatagataattaatttatattcttgtcctgacctatgcacaaaatcataaattagagaaatttcattttaaatgttagaaaatggaaaaactaatttactattttgtgtttgcaaaaaaaaattgggcgtttctttacatatttttacatttttcaagaatattctgcatataaatatgtataaaatatttattatacacttttggaactttttgtaaatattttgagggtttttgagaaattaaaat

SEQ ID NO: 29225 - DNA, 965 bp, Heterodera glycines
ccaactggtgggaagaaaagtggttggaaaaataaatacttaatgcaatgaaaaatgaaattgtggcttggcttaatcctcagtcattacaattcgaaaaacaaaatttaccataaaaaactttacttaaagaaattaaataaaaatcataaattaatttttaacttcagtttaagaaaatgctataataataaaaataataaatataaaacgaatacatgaaaatgtcagaaaattaggaaatattgacaattggaaaactatggagccaatttttgcccaaatttaggacaaaacatactcttaattttaaaagcactttaatttaaggaaaaaaaaacaaaattaataaaatttcaatttttagctgaatttttcatgtttattagctaaaaaaatcaacaccaatgaggagaatacataattgtaaaataaatttttaaaaaccccgtaaggcataggttcaccatttttgatgaaaattgcccaaggcactcatcttttcctactgtttggcatctttgcgccacaacacacatccccccactatccagaagcgacaaagtttaataatgagattatttgtttgccatgccaatgcccccggggggggggcgaaaaatgttgaagaagcagcgcatatgatgatgatacaatattattaaaattaaatgggcgtgattattaaaatatttgtttaccgaagatgaatttttttttttggaaaaaagaaaacttgcattatattaaaacaaatagaaaaaatatataatagtgggaggtgggcgcaattccaatcggcatattcggggaataaacggcgacagaattcagggttcgcttttttattataaattttattaaaaataaaggaatactttcttggcaaatacaaggcgaaacccctgttcctccccaccaattatgactattctttaaaaataataataaaaaatttaatttat

SEQ ID NO: 29226 - DNA, 1728 bp, Heterodera glycines
aaagaaagaaaaagaaacatttttaagaactgttttttactcaaaatgacaaaagaaaaaaaatgtaaaacaaaaacatttcatttttcaaagcatttatacaacacaacacaatgttaatattatagtattttcttagtgaacaaactaaggagtgtcctctttcttttgttaaatattttatacaataaaaaatgggttataagtaaggaagggatgcgagagaaatttcccattatctctccctttcctttcttttactctcttttcttttccattgcaatttactctctttttttcccactccctccttcacccacacacacgcacgcgtccaacagactgctgctgcacagcagcacgcgtctgttcactgtatgcccctctcacccgccgctgcccgcgtagacagacaatcaaacagtgcactattttcccacctttccctcgctctacatttttcaaatacattttttaacgcaaaacaatttcaaaacgccacacaacattcaaaagatggcagatacaaacagacactcaactttaatatgtaggatttttccgaaaaatgccaaaaaggcaccaaaatagcaaaatgccaaaaaggcattaaaggcacaaaaatcctgaaaaaggcataataaaattcagccggtcgcttaagatttgaatttatgttcaaaattgtttaaaaaacctcataccaagctaatatatccacattatccgtttaaaatgaatttaattcctaaatcaccattttttagtaaaattcttgcatttttcgtctcaacctaatcatgaatcgtggaagaaacaatcaaaactatttaattcatggtaaattctcgataagaaattgcacagcctactaatctattcaagattttgtctttttaaaattttcttaaggaattagcaaatactggcaagtcgtcggcgctctgggtctatgcgttgtcatggtatgcatcacttatcaattgtttctgcacgtggacgaaaagcacaaatcgttcaaactgatgatcgatggacacttcaaagatttcaagcaaatccacaacgatttcacggcgtggtcaaaaaatttcacatcgcatctcaatgagcgtttcgaacagcaacaggctcgatcaagagcgcgtttcaaacaacagttggcgaagtcaaaagagcgttttgatgaacaacacgctaattttgtcaaaatccgtttggactttgatcgacagtttcaaaaaactatgcaccgttttgccgaagttgagttggaaaccgtgctgaacaaaaggttggattgtttgttttttggaaaacagagaatattcgcttcacctccacatccctttgtttaaggttttcgtataatttttgtttcaatcaaaagcatcaactcctagaaattttcaacagacaaaacaaaattcaattttcgtacttttttcgagtagggattaaaattgggcaaaatgggtataatattcgtgatcagcgacccctaaaacaactgaaaacaaattttcaagtttttttggtcaaaaaattatttttatttttttgcaaaaagagggttccccctttgattttgaaaaaactcaaaaaatacaactttttcgcttctccatttgggtattccggggtacttttttctacaaattgctggatttcgggctttccccgggattggctctggaggcgtttcattttaattttaccttcttttag

SEQ ID NO: 29227 - DNA, 1151 bp, Heterodera glycines
ttacctcctccctcatccccagaaattcatgtgccctccccctgaaaactttttctgggcattcactcataacttaattaactacaccatcatacagttgcacaagcgttttaccgtataaataatacaataccgtattcgttaacaggatttaaccaaaaaattgttaggatttttgcgattatacgccaacattttttggaaaaatcgaacgtagctgaattggaaaattcgaatataatgcacggccctttccttgattctacgctcccttttctcgcttttccccgttttttctttcctcttttttttctctcccttttctcgattttcccccgttttttctcctccccccccccgttgactacccccttgcacaggtatgatcatttctcagggtattatggtcattgatcatcacaatttagtccaaaaattacttcttcaaatgtgatttgagctgtgtcgtgtccagggaatccgccaccaatgtccaacaattgcattcgatgtcccattgatgtgccgagcacaaacaattttttggatgccgcaattgcttcacgaaatgccgatggatcacgacagccacttccgacatggaaactaatgaattggagacggggatttactaattgatgacagacgattaggggcaattaatagcgcgaaatggccagaaacattgttcgagagtctcaatttcgttatcgagtattgctcattttttgggcctgttctggcctctatggtacttaagttaactgattttgagacgcgagacaaagagacatttttacagcccgtaaaaattgtacttttgtgaagggtgaataagaaatttttaattttttttaacaaattacaccgaagttttcaacattcaaatgcaggaacattgtcaatttgaaatttgataagtttttgaaaaattcacatcaattttcattacaaaatctctgttagaaattttttttaatgtaatgaatatattaaatttgtatttttatttaatatgaaattaagaaataaaaattacgaaatgccaatcagttccattccttggtcgagtgccaattggagcagtgtcggagcagcgtccaaatcgcgtaaggatttggtggctaacggacattgtgcggtcggatcag

SEQ ID NO: 29228 - DNA, 714 bp, Heterodera glycines
aaaaaatttttcggattctggacacaatttcccatgaattatcttggtcagtattggacatgtaatgcccaaatgcatgtagggcgtaataacataatgttttaagtatttccagtgtaaaaaattcatcataattacccatcaacccctcagaatccctgcgtatcccccctaattcttgaggcaaaaattttccaaaatttttgaattcccgtggattgcataactcaattcaggcttatgctagaaacatgcttgatagctcattagaagcgtctgagtgtcgacatttatcctccaaaacatcgctagtccggtttcggcactccccgccaagatacagccctttttctgagagccgttcaaaaattttccgaaaaatttcaaaaattttctgaagaaacttttttttacgcaaaaatttcaaaaaacgcgttccaccaatcgatgcaaaatccttaaaaaatagttgtactcttttgttcggagccgatccgagcattttgaagagagttattaaaaaaaagtcatttcaagtgctattttcctcttatatagagaaccagggccccaaggggccctgtgaaagcgccggggccgctttcaacaccggggccagccggggccattgggttttccccgcgcttaaggtactcgctcggccgcttcgcggcctcgtacgggcctttggcatagtgcttaaggaagtcgctc

SEQ ID NO: 29229 - DNA, 1004 bp, Heterodera glycines
atcagaatataccatatttactcgattagtgccccaggggctctattttatttatttatttggcttttcaatttgatattttgccaacttcattacatatgtgcataatttgttgggctcaactcaaaatgatgacaatcggtggatggattggatcggctgattaccagcacagattttccattttccttttggcgattggttcatttgttggtgatggtccgtcgtggacttggcctaatcatcagaaccaatttgcttttgctatcccttttttttctttttttttttgtgccacgtaaccatttgtgataattaccaccaccaacatttgcttggctttagctatcattttgttcaatcattctcattttattgggatggttgaagcaaatgagttggggttggccattagctaaaattatttttaccaatttataaaagaattagaaccccccccccccctgaaatatagtcctctattaaggggggttgaaaatttgaagcctcggggcttacattttaggaaataaaaattttcaagggttgcccacaaacgaaacagcagactttttactttgttataagtttgttattttcattgccaacttttcccccgtttttctttgctgtgtccacacatttttggcaccgctcccgcacatttgctcctcatatgttggcatttttttaaataaattattttatatatattttttcaaatacagcctcccccgtccgtgtacaaattaaataatcaaactacctaattagtatcataaaatgtttccccgttttgtgtgcccattcattgtgatgtttttgctgatggctctgttcgacaacagttggaagtgcaatagtcgtcccttatttggtagtaaatcaacagcgcctccgaccactgtgaagccgactgccaagtcgggtgccattggtggtgtgcgggtgggccagcagttgttgcttttgcccatgccgttgttcatcgcgctgtcgctggc

SEQ ID NO: 29230 - DNA, 1163 bp, Heterodera glycines
taatcatccgattttgctgtatcaaaaagtgttggaactgttcggcgacttgcaacacaaaggaaccaaaaaggcgaaggtcgaccatttcgcgtgtttccgttgcatttggtcactccagaatgttttagaaggaatttgtcaacttttccggcgtcatttgccacttccccactcgctacgaactttgccaatgtcgaattgaggactcaggtcgaacttggccagtttcagggccgcgaaatgaacaaaacgcagaccaaattaaggaaaactgttcaaattgttcgaaattgcgacggaacggagcaccgaacggctgatcgtcgcttcgaactttgtaaaagtgcgtcggataggcgatggtatcgcatgagaatttttgaaaatttgcatctaaattcaacaatttgttgctaattttggctggcttatcccatcctttcttttcagactttggatctgctggactctcttttcggccttttgcgcgacaatttcgtcgtttttcgcatcaatcccaacactcccatcacggcactgccgcaaattgagcatcaaattttggaaggggcgaagggacagacccaaatcgtattgctgagctcaaaaatgggtccaatttggacggcttgtgattacttacagaaattcgttttcagaacggttgaactgcgaccttttccattcggcacggctcattttcttcgacttcgacccgtgcaacgacggcaaaacgatcaaaaaatgggatgccgaaggaaggctaaaagcggcgcaacgactatctacctttcggttggttttatgcggaattttaccccaaaaatcattgttccatttgcttggtctttcgggcttttttcccaatcgattgaggaaattttttaaatcggaattgcattttaggcacaaaaaatcgcaaaataggcattaaactggcacaaaaaaacctcgaataggcacaaaaaagaaaatttgataatgctttttaaaaagttaaattgcaaagttttggtctttttcaattgcaaataaatgctgatagattaacacttttggcactgctccgtgtacatttctctttttcaaggagacttttgaagcgaatgaattttccttttacggcggcgacaattcccggcccaattctcagccgacca

SEQ ID NO: 29231 - DNA, 1121 bp, Heterodera glycines
ttggttccgttgccgatcggttcgtccctcttcctccgcccaatttctcgtcttggccatcgtccgccgtttcttcgtcctttagtgcggccattgccaagcattgcctgtgaaattcctcctccgccgtcccttcccctttctccgagctcaaaatgcgctccaaatgtctgatgtacaaaatggcggccttcaaagtctgcgccttggtcagctttttgtcaaagaacgcttgacagctgacactgagctaaaaaacaaaaaacaaacaaattaagggtaattaaaaggcaattgcgatgcaatgcgatgggaaactcatcggcagaccgtttgcttctgatcagagagtgcagccccttttgatcactttccattgatcacttattttgtgtcctccccccccccccgctccccgcccgcatttattcgccctttcggtacttttccgtccgcgctcactttgctggccaatgtttcgaattcgctgttcatctgctgcactctcttccgctcccgctcgttccttctcgccacttggtgcggcttcttcccaccaaatttcactcccgtcccgcgacttcgctgtttggtcttcggcggcgaagacaccaatttgcaagcaaattgactcttcttgccatttttggatggtttttgtttgattttgttgtctttggagggattcgactgcagattggaaaaggaagaagaagaagagaaggaagaggaagaggaggaaagacaggaggaagaggaagaagaagaggaggacgagtgacgcggttgctgctgttgcggatggtggtggtaaagcggcacagagtgagtgccaatttcgaaaaaatgacaattgccggaaagcattggagaagaagcggaacaaaaagctgaaagaaatacaatagaattagaaaataaattggagacaatcagagaagggatgaaacagaaaaagatgaaaagtgaaaaagtaacagcaaagggaaggctaattgtaagggggggggggcaatgaggacgaatttggagggaaaggaaagagggaatacaaaatgtggaataccaaaaatggcatatgggggggggggggacggacggcacatggggcacagagggcg

SEQ ID NO: 29232 - DNA, 1838 bp, Heterodera glycines
gcgaagaagaagccacagagagaccctcttatgatgaaaacacttcgaatgctcaaacaacaaagaagatgaagcaacacacagaccaagtcaatcttgacaaatcctattgatcattaaaaattgcaagaaatagtcaaaactgactcgctctcgtcgtatgagttttaacaaccccccacccccctccaatcaattatgactggaatcgaaaaaccaccaaaaaagtcattgggtccttaaagttctataagggcgggtcattttttgactacgacttgcagagggaatgcccattaacattactcgggatcagaagcaacaacccctttctaaatgtgaatttttctattatttgtttgtgtatatcttaaatggcgtgttctttcctttattatacgggagtgaaacattaaaatgttgtagtctaaatttctaatcgaattgttttttctattaattacttactttttacttgggtttttgcatggcgctaacttccatttaaaattgtgataagtaaattcgaccaatttcgaacttttgctgttttgtctgtgaattgtcgtccattgttaagaatgcctttgctcctggtcaccggctttccgtcctgtggcaagtcgtcaatttgtgaaaggattttggcgttttttgaggatcaaaatccgggaggggaatttcagctgcacatcgtttccgaccgaaacaatgaattggacttttcccctttaatttacggtgacccgaaaaaggtctgaggagtaaacgtattggcaattgaatgagaaatgattaaggaaaagcaattgcgaagtgcacttcgcgccaaagtgcagcgattgttgcacagaaagtcactggtcatttgcgactcgaccaaccacataaagggtgctcaattaacaattaatttggcgtaattacaaaggaagtcaattaaggctatcgatacgaattgtttgtctagccaaaaacacacagactcggtgcgccgttctccactgcaaggcatccctgccacctgcaaatggttaaatgagcaacggacggacaacgaacggtaaaatctgatggcacttctttgataatccattctttaaaagatatccagatgaaatcctatcaaatttgtttaaacaatttgaaactccggaccaaaaaaatcgatgggtttttttttatatagtacttttttataattttaatacttaggacgcgcctctttttgaggttcaaattggaagagaaagtacggaagagaaagacgaacttggcggatttggttcaattgccgaaggcacaaattgcgctttattaactgagcgaacggaggaaattgacgaggccaaaatgccacgaaatataaaccttccctttgagcagctccacgcgattttgatcaaagtgatcaataatatttgtgaagcaaaaacaaaaaaaaagttaagggcaaagaattgaccgccaacaaatgcatgaaagtgcaaattccaatggtttcgtccgcgtttctcgtcgccttggaccagcaaactcagcacattttggaccgtcttttggcattacaaagtcatgcgactgatggcgacgaattgaaagtatttgacggagagacgggacaaaggaatacggtgactttggggccacaaatgaaattgacatgcaatttgatctgtttttattgaggtgactttccatcatcgcctccgttcactcccacagctcagccgactccgacaacagttcatcgcttatatgaagacgcatccgatcgacgactttgacagaatcggccacgtttttaccgactatttgaattctaattcacattgata

SEQ ID NO: 29233 - DNA, 1402 bp, Heterodera glycines
attcaactccttataattacaataatatatggtgagaacaatcaaatgatataagtaaataaactattaaataaaaaatgagcttctcaaattttagaattagttttttaattacgaataaaattaattataatgagcaaaaatatttatttattttatatttataatacataaaaatttgctaaaaaaatgaaataaaaaaaattattttggttcaaaatgttaaaataatgagagaataaatatgcttgtaaataaatcattataagctacattaaaataaaattgaaaaatttgaaaatataatcttataattgaaaataaaattactataattaaaatggacaatgaatcatttattgtaatttgaaaataccttttaatttattgcatttttgcacacagcgaggactcaccaattaaacacaaatgctttattaaaagataaattttaatacataaaacttaagataaattattttttgaagaatattactttcaaaattatctataattcaattagaaaagaattattgtaaaacaaataaatatgcaagaacagttatgagaacgctatgaaaatatcataagcaaaagtacaaaaaataaaataaaaaattggtcgcccgttagaattcgatagaatcttcacttataagtatgaagcagggatgttgctcgtctcgtgtatcgtaatctcgtattctcatgtttttgggggtgtctcgtctcgtgtctcgtatctcgtattttggcacgagacacgagatttttatgctctggtaagaatgggggggggggcggggtgtgagagaaaaaaagttttttggaaaataaagagaaaaaataaaattaaaaaataataatttgatttattcttttacataaaactaaaatgtaaacatttagtcaagtagtccattcattattttgtttttgtcttttaataaatggtgacaagatttccgaaaagcgccggaccctaaattccctaaaattttaaaaatttaatccaaaaaccagcgaattttatctttattaattttttagttaaagatgtgatattctcgttccaaaaatatttcgagaaggctctctaaaaggaagagtttttctggccgaaaaccagaaaaaaaatggaggcgttgttaattcagtcatcaaattataaaattcctgtacatagagactatgaaagccgcttttctgattttaataattcttgatatctttcaatagcattaagtgttgtttatcagaatattaatttataaaatttttatatgaaattataaaaaagttatggtccaaaattttcaataagttctgaagcaaattcctttaccagaacttttttaatactcccctgggggggttgaaattttaaccgtaaatagagaat

SEQ ID NO: 29234 - DNA, 1269 bp, Heterodera glycines
attaggtggtataaacaagttaatatgggagaatttctttgtttccatggctacaaagtcgaaaataggttttgattagaaaatgtaattgaaaagttggaatttttggtgtttgatcaaatttctccgcatactcgaataaatagtgccacggttctcgaccaacttttgctattagtaaaattggtcattttttgtagtcaaatgagccatattaaattttccctttttaaaagtgcttgctgccctaccttataagttaattacttgggctgggatttttaagcaaaaaaaaaaaaaaaagcaatgattcattttttatctaataaaataatttctatagcatatcaatcaacaaatgatgacatcatcggaatcgtcgcaatgcacttataagcgcttgtgaaacccgctgttgccagggttactaagcacagtctcagagtcatgcacttgcggatggtctcctgaaaaaataaatttattaaaaataattaattatttattacctttgggagtgcccaagctgatttgcccaacagaagaatgtccagcgcagcacagttggtgtcaattgtgccaacttgttctcggaactggacagccaaattggccaattcggcgttggcaccggcatgggaagcggcggaagcggcaatttcgaacatggcacggatgaagccgagagagcgagcacactcatctaattaggaaccaaattaatagaaattgaatttaaattaaaaaataatagatgattttaaagggatttaattgtccattggtaccagatgatgattgagctgcgttgatctcgttgatgagtgtttgaccaccattgccagggcaccaaattgttttcagttggttttccaccgcagcggcgactctttcggcactcagacaaagcgaagactttggcatcgaagcggagaatgtgccggtgtgatctttcatcatcgaaacgacatgttggctgccaggacagcatggatctttttaaataaaaatgattttaaataaaaaaattttaattaatacggggtgccgaaaagcagcatttgcacagcaaacagacaattgcgacgatggaaatgattgaggagcagaaagatgaagccattttctgagaggatttgaattcttagaggatgagtgaatgtgaattgaatgatggttatttggcattttcttctgcgtttaaatatgcaatgaatgaaaggttatcgaataccacttttaagacggggatttcctccgacacaaaaa

SEQ ID NO: 29235 - DNA, 1378 bp, Heterodera glycines
ttttaaaaatatgatgtaattgtattttttaatatataggtgcaaaatttgcagcttttcacccggcgacgcctatcaacccccccccccccccaattttcttaaaaaataggctcaaaatcgcaaaatttttatattttttgcttaaatttgttacaagatagatcaaatttcaaaattttcctcgcgtctatcggcactcgtacccacccttttctccaaaaaaaattctttaaaaaatgagcagcaaaaaaagtcgtgtgaaaagtaaaataaaaatagtcgttgccttgacttaaaaaccgcgaaagacttagaaatgacaaattttcgttgaatcaaaatcaaaaaggaaaaatttattcagaataacctcatttattaatttcttttaatttgagaagctttaattatttttgtgaatacgaaaattttttgaaaaaaaatgtttttgttaaggaaagattttttcaaaaacttcgtgcttcgaaaaaaattgggcttcgccttcggctccgagtgttaagccgagcttcgcccagccctgatatagatagagaaaaatatcgaacatttttattgcttatttaaattttttaacgctcgatctaaagcgcttcaaaaacaaattttctaacacattttttttggtactttcctgttatgaggaggccaaacccaaaaatttaaaaaaatcaacaaaagggcgcgatttatgcctcctcaagtgtcatgcgcttgcttgattttgcgcgtcattttgttgatttttttttttaatttttgggtgtgaccttaaaacaggaaagtacccttttttctaatatctctaattgattaggcatttgcttagaaaaagctgtaaatgaggtaaaaactgtccttccctcggatgagagaatttctctgttccgtaattttcagagaaagtaattttattttgataaattattctgtgcagcgatgtatggatttaaattaatcagatatatgactaatcattttgaactaaaaatgttgaatgagcatagattgatatggagctaaattggacaatgaaaaaccaaatgccaatttacgacatgattttgctgttggcaattgatacatattatggatgccaacaaatgaaaaaatgttctgatttgtcagaaatgttctgattttggggtagcgaccaaaatttgttctgatttcttagataaactcatatttttgaaattttgtggcataatgttactttttgtcaagaaaatataagatttgtggcaacatttggtttttaaacgcaaggaaaagtcgtcgcttagcttttaattgcaaaaagcggccttttttggtgaaaatctgttaacaaataaaaacgaaattacaaaaa

SEQ ID NO: 29236 - DNA, 1301 bp, Heterodera glycines
  unsure (1)..(1301): unsure at all n locations
atttcattcattcactcactcatcatacaattttggtagaaaggctggacacaatttgcttaagaggaatttgcaggaatttcagtataaattttgaattctgtaaaaattttggcatggcattccgtaaaatgccgcaaaaattttcaaaaaagagagctttttaccttgagatgtaatccgccttttcgttttttcattgttttacacttttttggtcgaaaggcacgaaaactcgtgaaatccgtaaaaacggttatttttttggagacatttttccccattcattttatgtacttatcaaaattaaaaaattattaattttttaacttttattaaattcctttagaaaattcaaaaattgtagtttacaaataattatagccactttcttttatgaatgaatacataatctttaaatccatgaacaaatcccggattattcgcttaatatggtaacaattgcttaatctctggcaaaaaaaggatttaatttactaaatttataagccggcactcaatttctggtgccgaattagcttttccacatgtgccacaaaagtaaattggcaatttttccgaaacttttggcttttgatagtgccaaggcattgaaaatatattttcaaaacatggatttttaaacaggcattgattgatactggtaatttttgattaattcacttcggggttcgaacaagcattgcaattttctattggaaaaattactatgaaaataatggtacatttttgctgctaaataatttcccgaaaccatttaaattaatttaaattggcaattttggcatttcttaattatggcgtcgaataaaaatatttaatttcaaaaataattgcattttaaaagtattaaaaaaatttccggcatttttgccgctaattattaccttattataagcaattttaaaaatttgcaccaattttggcgttttcaaaaaactctcatttttgattctcgacactcttccagagcaatcattcccgaaatcgatcatcctcctcctcataatcacctccatcattatgcacatttccatcgttgtggcgggcggtcggccgtctccattttatggcgtcaaaagcattacaaatcattcattcgttcatttcctccccccaccgctcctcataagcgtcccccccattagtcatccaatcgcggcgccggagcgtccgtccgtcccgcgccgcgggggcgcaaaaccaaacaaaatttgccgccgccgccgccgccgccgccgccgccaataatattcttccgattgtcnggcggcaaaatt

SEQ ID NO: 29237 - DNA, 2217 bp, Heterodera glycines
cccaattcaagcgttttattcctaatatctatgaatagcatttttgtgctttcttttcacttccattctgctgtttgttagtcctgttatttggcatgtcatcgtgccccaagaatatctacaagaagtttctttgctgtttgtgtggccaacattttgatggagttggtccgttggagtcccatttggccctggtgcatgtgttttacttggcctatgaatgcggtcagtcctcaaacacagttatttagaggaaatgggtggtcaaacctttaatctaatttgactgcataacgctaagcattttcagatctctgcaaagatgcgttgtttccttccgattttgcgttgcgagagcattacgttaaaatccacaacaaaacatgttttactgtgagttcttcttttggggttgtgtttatgggtcaatgcagttcgtacaaatttattcaattaaaaccaaatttttcaaatagtggttttatacagagacgggtgcaggacccgggtcccgtgccaaattttacgagttcccattcatcccgcattttgggaattgagggttaattcttagaatcgatcaaagcttctgttttcatattcttttgctcttctcagataaaatatcgcgtctctcctgagttggaagagcgacgcgcattgctccgtcgtttggtcgatcagtcaatgcataaaacgggaagcggcacaattcagcagaacaaagcaccgaatttggagccgcccaattcatacacttctcagctgctgatggattgcacgtcactgctgcaaacgcaactgatggccagcaatcactttctgaacagtggcatcaaaaaggagaatgtttgggaggagagaaacgacggcgaaagggtcgaccatttggagggcgaaattgaaggaccaccaattgagggggttggtgaacgatagaagacaacaaaacaaatggaaaccgatagggttaaggtcaccttttgcgctcacaaacgaaacgctttgatgggtcagaaacgcaccttttctgatgaagacaattcaactttgtaaagccaattgcaatgggaaagtgtcactcatccaaatttaagcaatttaaacgatcgcctttcgccgatgccaatgaattcgctaaatgctgtaatggatacggaggagatgctaaacgaagccaatttggagattaaaggcaccatttcagcaaaagtttgattttattttttatttttttagtttctccaaccaaaaaacaaacaaaaaaccgacgaaagacacaccgagacacgggaaatgaccaaatgcacgcgaattcctcgcaagggtccaacgaagaaacgaagcagcaaaagggaggaggggtaattttatttgtactttttcattttttctccaagaatggacagatttgaatttgttccgaattaagccaatggttgagtgttcgggctgcaaacggatggttggccaatatcgcaattcgatgctcatccatgtcaggtcagcagcccatccaaatgattgaatggtccaatccggctttgactgttctgtcctctgtcagtacgcatcactgcgaccagccgattttcgaatgtattgcggacggatgcgggaagaaatggtactccatttcagcacggactaaagagcacattgaggctaagcacggaggcgacttcaactttcttcaggtgcccatcatcatttcagcattcatttgttgctattataatttttaatttcccattttatttgactctgaaattcaaacatttatttcccccccccccaggacaatcgcagttcgctgttgcctcttctccggtcgaccgccgtccgcctcttttctggtgcttattaagcgcacatttgtgattttttgtgtaaatttgtattttctgatcactttcactgtatcgggtaccatttaatgcaaattcaatcacatggaaaataaaatatttgcaattgccattaattgtttagtcaattagcagtattaataatagaggaattgaatctcctttttgcttattttttcaccattttgtggttaatcacgcttattatcttataattttctgtgttttattggattgtttctttttcgaaataataataaattgactcaattatttttcacttttctgtactttttttactctttccatgcttttcttcggaataactttttctttcccttttccataa

SEQ ID NO: 29238 - DNA, 1263 bp, Heterodera glycines
  unsure (1)..(1263): unsure at all n locations
tacatatagtacaaaactcaattaatgttccaccaaaaataaaaaaatgtcccctcatttgatcgaatttttctcgttcaaatttgttctaattttgttgtagctgttgttgttgcaggtgaatggccgtttgagaccgggttggcggcgttccctcggggtagtgcatccgtctcttacgagtctaaaaaaattgcgtagaaaataggggggggggggcacatcaagtccgaattttcagaaattaaaatttcgaaaaaatcgctagaaaatttaaatttttttcggtattttcctgttttggggtcgcattccaaaaattaacaaagggcgcgcaaattcacaagtttcgcaatattccaaagctaatctattcgaagagattttatcaacaattgttgttctcattatatccccgagatttaatgctttatgcactttataaatttgtgcacatttttggagaaaaacgagctgcaccctttttttcattccccatcccctaaaaatgagcaaaaaacatacaactgttgttggcgctgtgttcacttcaatcattttggtgatcgctcggccggtcaccggtgccggcttcagttgctgtttgcccttcccttttcctttgcctccctcagtcattggcgtgttcagcaccctcaccggactccgttccaattcctcgtagaatgtgctgctcacacgaaagcgtggctcaatgattggacattcctaaattgggattcaaaaattaaaaaagaaatggggaaaacaattttttttttttgccaacactcaatttatcggctggcatttgggcggcaagttggtcaagttcaagctcagtgttgtgcagtgccgtcttcagatcttgcaggagaacaatgtgggaacgaaagtcgttgtactgcttcacaatttcttcgtaagcgtgcggatattcaagaccaattgagactgaaaacgcagaaaattaaagaaattaaatttcaaagatttctgttttttctactcgtcctttttgattttttctttaatttaaattaggccattaaatttggtctcgcttaccaatttttcgagttgtcacaaccagtccaatgttggacaatttcttctgtccaatgttgctaggcaatttcatttcttgacttcgcnaatgtgggccaggcgtcttgaattcgggccatcgaatgtgcgagtccatctacaaaaatgatttttttcanttgaagcaaatcgaaagcatttttttatgaatcagag

SEQ ID NO: 29239 - DNA, 1065 bp, Heterodera glycines
gcggtcggggtcgttttcgcgtggccgtttttgcgtgagggccatttgcgcgtggccgttttcgcgtggttgaacataagcgaattttttacttttttatagtttggaaaattttttcactcccgttttacttctggtgcttaattcaatatatttaaaaaaaatttccaacccctattacagaattttttctatataaagagttatttgtgcgtaaaatgtttggggcattacttttgtacggcaaaaaattgaacaaaacagttaagactatccaatgggttaatctcttggatatgtatgtgaaaagaagagtcctccgccccggaaaaagaaaaaaattaaagaaatgtcgtgatgccgatggtcggattctgtgtctcattcacgttgtcaatacttgaagttgttaatctttacaagcataaaaatgaggacgcttttgagtaaacaaaagcaaaaaattgtttgaaatcggatttgggattcgaaataggtcgaatgtatgttcggcacacatccgaccaatttcagtcctaataggcactcacgcgaaaacgtaccccacgcgaaaacgggccacgcgaaaacgtcctggcccccaaaaccgggaccttggtactcagttgtccgctaccaggtcccggtcccgtggcactctattttttaccatagaaaaagtgattttgtaagaaatttttttaaatttattttttcgggcggaacaccaattccgaaagattaccaacaaaaagatacaaaaacttcatcaattccttttaatgactataaaaatgtttgttttttcgcttttcctcgcatttgaaaaaaaataaattttctaacgcaataattctgcaattattcttacctctgtgacgacgacatcattcggagctcggccaaaattgtgttaattgccaaaaaatgaaccgacggtaaaagaattttaatagtcacacaaattcatcatttatttaactaacaataaactgttttctataatttcagttggatttgcaacgacgtttggatggacattttcccatcctttgaccatgctca

SEQ ID NO: 29240 - DNA, 1176 bp, Heterodera glycines
tatgcctatttaaattactttcattgctttcctttcgcttacgaccataccacgttgaaagcacgccatcccgtccgtctggcaagttaagcaacgttgggccttcttagtacttggaacggagacgtcctgggaatcgaaggtgttgtaagcttttttccttttttcacttgtaaatttatttaaattttcaatttttttagctttttttcgaaaaattttttgtctttttttcggcaggcactgcctctgacaatgttttttatttatttagaaaaataaattgattttttttctttttgatttattttaattatatttcatccttaaattttttaataaacattttcaaactttcaccttattaatttaaggcgaattttgccttttttaataaattctcttgtgaaaaggcaaaaaaataggctcttttaaatatgcctatttaaattactttaattgctgtcctttcgcttacgaccataccacgttgaaagcacgccatcccgtccgatctggcaagttaagcaacgttgggccttcttagtacttggaacggagacgtcctgggaatcgaaggtgttgtaagcttttttccttttttcacttgtaaatttatttaaattttcaatttttttagcttttttcgaaaaattttttgtctttttttcggcaggcactgcctctgacaatattttttatttatttagaaaaataaatttttttttctttttgatttattttaattatatttcattcttaaattttttaataaacattttcaaactttcaccttattaatttaaggcgaattttgccttttttaataaattctcttgtgaaaaggcaaaaaaataggctcttttaatatgcctatttaattactttcattgctgtcctttcgcttacgaccataccaccttgaagcacgccatcccgtccgatctggcagttaaacaacgttggggcttcttaatacttggaacggagaagtcctgggaaaccaaggggtggaagctttttttccttttttccttggaaattattaaaatttcaattttttaactttttttccaaaaatttttttgttttttttccggggggcctggcccttgaaaaggtttttttttttttttaaaaaaaaaaatgattttttttttttttttattttttttt

SEQ ID NO: 29241 - DNA, 612 bp, Heterodera glycines
ataagtaaaattgtaaaaaatgagcgaatgttaattaaacctaacttatgccaagtggcgagggatccctcaggcttagtttttagaatcttaatttttaaaaaagtacatttttctatttttgggttggggcccaaacgaccccggggcccaaaaacgggggcccaaacgaccccggggcccaaaaacgggggcccaaacgcgggggcccaaaaacgggggcccaaacgctctggtcccccatgtcgccccccccccccctcccttgcacgatccgcgtcagtctctctctttctctccctctctgtttctttttctctcactatcaatctttctcactctgtctttctctacaaatgcaggacagaaaaacatccgccgatatgtaaatacacatgatatgatggggtgttcaatcaatcaccatcctcactttcttaggacaacaacttttttcggtaatagtgaagacaatcgcacctcagatgagagtcattcagaggaatggccaatcgatcccctactgggatgcgtccccagtgatcgatcaatataccttaccttccaagacctgcggcgtctaaatatggacgcgaaagaggactcctctgg

SEQ ID NO: 29242 - DNA, 1198 bp, Heterodera glycines
tttatgttaatatttaaagtttaaaaatttcttaaattttattcatgcataaattatatttattcgctatattcattcttgctaactttcctgtaggaaggaacgaaaagcatttctgtacttaaattcttatatttaatataattactattattccgcttcaaaaatcttagttgatttgttaattactaattaaatttaaaaggtcgtttagcattttttaaattattagataaatctgatttttcaataaaaaatttttttaagttcaattttctgctatttaggagtgtcatgcatttcataacatggttttttatgaaaatttaatactaattatttcttttctcctcgaatattttatattattttaattagtatgtcttttatgatatgctaatttatttgttgtttattatctttaattcatcgtacagagtgctaagcattgtaatcatctggtaaattgtcgctagtgtatgatagcatatgattgtgcaaatatgttgagttactgacaaaaacaaagggctaaaagcagatagggaaaatatgcatattggctatgattagggctgaaatatgtatactaaggctatgaaaataggggtgaaatatgcgtatgcgccatgaaaagaggggggaactatgcttatgggctatgaaagagagggggccaatatgtttatgtgctatgaaaatataaggtgcggataaagcaattggaaatatgaggcaggaaaagaaatagagagatttacaaatgacgtgttagtttagaccatggactgcataaataggtaattggccggagcaaaaggcatcatttcatttccatattagccctctccctatcaggaatctgctttcgcgattcgctttcgcatatttcgcttttttggcactttcgctttcgcgtttcgcattttatttccagatttggcccatcccagctccctatgaatgtgaataaaacatatccaaaagctgttcactggggcttaacatttgtcctaatccatttaaacagagtctctctcttttggcgatttgcttatggggataagaaatggaaatgtaacgttcgccacgaatactgccccataatttgtctccctccaaatgttatgatatattttaacatgttttaccgcataagtactgcatcgagcttattttttccttgattttggcggca

SEQ ID NO: 29243 - DNA, 1284 bp, Heterodera glycines
gaatggggatggcacatgtcagcctttacggtgggtgccgaattgcccgcccttttcaagcaaatgcgagggacttagttgcggcacattaactctctctcactcccatataaaaaaagatattttcatttaaaaaccgtcagttcccctttaatataataaattttatcatttttctcctacataaaaatattgttctatttacatacatacatacaagatatattagctatgtattcattaaaaaaaagaaaattgccgcccgaacttctctcggagttggccagtgccttaccctttgactttcgctgggccacaacccgagtttcttcttcttttgattattttgtcaaaaagagacagaaaaaatggatttggaccgaattcattcgggtaaataaacgtttgatgggtttttttagggctcagattggtgaaaagtggaagtaatataatgatcagcggccgctataaaattctcggggatttaaagttattttaaccatttccgacttcattatcattaaatttgaacaaaaaaaacgaggaatttgagttttgacttttttcaagttcgggttagggatagaaattggtcaaaataatgtatgatttgtgttaatctaaaatatattttattaacagatgaaccaacgtaatgtatactacagctggacggtgagttgtgttttgattttgcgcctattctttaattatacaaattaatttatgaattgaaaatggtaaatgatcgataccctttttttagattagcaacttttccttttgtcgcgaggaaatcggcgaagttttgaagagttcgactttcaggtttttcccttttaaacgttttttaaacatttggactgcatgttatttgaaaatttgattggcaaaaatgatttaaaattttcgattttttgggttcagtcgattcactcattgcccgtgggacttgaatttgggtttttgtcactccgctttagtgtcggccccaacgacatgttcaagtggcgcctgcgcatcaacccaaagggccgcgacgaggagtccaaggactatttgtccttgtatttgctgctggtgcaaagcaacaacacgcaggtgcacgccaaattcaaattcggcatactgaatgccaatggagatgaaggccgagtgctgggtgagtgacaatgaagggaattggatggaaatgaatggtaggagatggaaacttccatcgttacgagtctcccacatcgatacgactgaagcaccgtgactttacaaccctccagtaga

SEQ ID NO: 29244 - DNA, 1035 bp, Heterodera glycines
  unsure (1)..(1035): unsure at all n locations
aaaattcaacatcgctggactggtcactgccattaagaacatgccaattgcgaagatatgcggcgacgttttcatgacattggcccaaagtcgcctatttgaggaatcggtaagtgttcagaatttcgggaaagcctagattttttctttgcttttttccgataaattgattattattcgtttttctcatgttcaaggatctcgtcgaccgttctttggcatacattgaccaaaatgcggacactttgctcaaatcggaggaatttctgcaaattgaccagcaaacgttgtgcgaaattttggggcgcagtcaattggcggtggaggaggaaattacgatttggcaaaacgtaaatattaggccatagaaatgccattgaataaatgtgtgccgttttgtttgataggccctccgctgggccgatgagaagtgtcgccaaaatggcaaggaatgttcgggaccgaatcggcgcgcaatgctcggcccggcactgtacaaaatttgtttcccgcgcatctctcaacaggacctttgtgaccagattggtagttgttgctcatttttcagaggggtcttttctccacgcccttccctcgacgaaattataaaaaaaaaatttaactagacagacgtcctcgtactgttttaagtggccgttcattcgcccttggatctgttcttcaccgcatcgttccccccccccccccccaaaaaaaaaaaaaatttgtttttaaacttctcggggggggggggtaacgtagtgcatttggggaggggggtaccccaagccaaaaccctgtggacgaacttgtccccaacccccgctcccgaaaatttttctttacagttttgtccggcgtattgacacatcaagagttgctcagcctctttctgtaccactcccgtccgaatttgcgcgccgttaccgaagcatttccactgaaattttccaccaatattcggacaaaattcgatggtatgaacgacttgaaaacagcatgcattttacgaantgttgatcaccatccatttta

SEQ ID NO: 29245 - DNA, 1571 bp, Heterodera glycines
  unsure (1)..(1571): unsure at all n locations
gcggtacgccccgctcggcgaccacagcagcggcggcgattgtggcggtggcagcgcaacgcgcgcggcagcagcggcaaaaatggcggcggcggcggccagcgcattcccatcgcggcggcacagttgcacatcggcgggcgcggactgttccgaatggtgagagagcaattagcgggaattacagtaatggtttttttgacaattagtattagctacaagaataattacagtaatcgtgttgcatagttcgtcgagagttacggtcaagggtaattacagtaatcgttgcatagttcgtcgagagttacggtcaagggtaattacagtaatcgttgcatagttcgtcgagagttacggtcaagggtaattacagtaatcattggcatcgaggagttatggcaatggaagcaataaaaaacatttgtatttaggtggacgttttttgacaggaaaaattgcgttcaactaatcctttgaatttttggatcatcaggaaaactaaaataatttctcttaatttcagcattttcatcataatttagttaattattttgggaattttcacttagattttcttcaaaattttggaatttatgaaggtatttctaaattttaatttttttttaaatttatttttttaaattaaaattcgttgtattttctttcaggtgatgtttctgtcagcacaatcggttgctgaactgttctcaatcagagattggctcaggttcgaaagggcacggcattggtcacaattttcccgtcattttttcaaaattcaatttaattattttttcagatttttggtcgtccgccaacgcattccccatttgatcttgggcctccaatttgcgtgggctgtcgaggaaaaaaagaaaaagcaaaaatcatcggccaatgccatttcgccaaaaaagcgatgtcggacgatttacaacaaaattttgactgtttttggcatcaaaaaattgggcaaaaaatgaataattaattattactataattaaataaatgatgaaattagggtttttccattaacaaacaattacttttttttcaaaaccatgaaatttggaaaaatgccgtgaaaaacggtggttgaatgaatcaaatgcttcttctcaattaaaataataattattaaatttatttttatcttttttgctggatcttccgcgctctcttcggcttttttcccccaatttaaaattgcccttttgttggttaaattttaatttgttccattatttcacatcgatcaatgagtggattatttagttttaacaattttaagggcttttttggccttaaacgtcggattgtttagggtgttttagtggggtttttgggcaattctgttttgaattttcttaaattcaataccccacactttatcaagaactaattaatagggatggaattgtgtccgtccgaatgaaagaaattattaaaaaaggattaaaatcaacattttttaattaattcttcatttttgtttatttatttaaccganttaaatacaaaggtcagtgagcggtggcagcggtagaaaaaagagagagaaattg

SEQ ID NO: 29246 - DNA, 1616 bp, Heterodera glycines
tccggtctccaaaattatagaaattcaaaataatttggcattttgtaatagaaatacaatttttttttaatggccatcctgttcaggccgattgcctcgtctttcgccttgcattttggatcaccggtgccgtgttcaagctgttcccgtgcctgttgctcacgctgctcgtctcgctgcttatgcgcatcctgcgcgaggtgcacgacaaccgccagcgcctgttcctggcggggcgcggctgcgccaccactgcggccgccaccgctgcgctcactgtggacgcgccgtcttcctcgcagcaaaacattcagccggacagcgtctccaacgccaccggcaagttgccaaacgcatttgactgatcagaggtggaaatcgcctcttttggcgccggggagttcccgccatgaatttatgctaaaccaaatgttataaaatggcatttttcgaaagcatttgacaagctctagtagcctgctaaatttcaaaaaaaaacatttttgatttgacccgggtctcaaaattttccaattacgtctgagacaagtttaagaagcaatcacttttttattctttgttgatcaaatcaaactaacttggtaccattcaaatgctcttaacaagctcttctgagctaagcaaattcacaattattcgttaagaaataaaacagttaaaaataaaaatatatgaattttttatgggttccttaatcgctttgcaaaagcttacaaatatcttcgaaagatatagacagagctttcgaatgatatctatctagtttatttgatttggcgaaaaatgaaaaaaaaatggcttcttaaagttgtctcagaacgcagttggccagacgcaattgcctcctaccgggtgtgccaatgatcggataacataatgccaattcaattaaatccccgaactttcttccgttaaattgctgtagcttactttgccatcatctctgattctttatggtttacagcggtgtttttcttttccacacattgtgatcagcacgagcgtccgccgctgccgcctccgtatggcaccgtcgtggccaagcattcgcaacaacatcaaaggaaaagttcgtcgccgtcaccgtccgcgctgtcctccgccgcttcagtggcatcccatcagcaccaatgtcggcacaatctgatcaatagtgatcagcatagcccgatcagcagcagcagtcatcatggccatcatgaaaagatcaatccgattaatggttcggtcagtccaggcgatcagcatcatttggcgatcgcgacggctacgacgccaaattgttgtgtctgttgttgttactcttgcacaaatggacggcacatgctgaccgggacgacgacgacaacgatggcacgggcggcaagaacaaattcgccgatgacgacgagtccgagtgtcgccgagaacgcatcacaaatgggcggcggtggtgccaatggtgttggttgggcaacagcggtagcggcaaatgccaagtgggtgaagggaatgggtgtggcacggagttcgttttctccccccttctcactgttttgaaaaattttaaatcttatgtatttcatgaaaaaaattaaaaatttgcccgttttttt

SEQ ID NO: 29247 - DNA, 1594 bp, Heterodera glycines
  unsure (1)..(1594): unsure at all n locations
aaaaaaggcatgcccagcggggtattagagtgtcttagactcattggganaatactgaggggggagacattgttcctgctttggtccacaanttaaagattccaaaggaatnttgtntgagtcataaacggaagcatcaccctacacttaggaattaccgagaaaaaacgtaaagagcggcaacctgttggaggagtaataagtaaatggaatcgaaatcaaaatatgacaggacggacttggtagaagtgccgctgttggaaccatttgtccctgaaatgggaaggaacaacaattaatttgcatctgaattttaagaattacgaccaaaaaaccttttatataaatttgtctttccatttcagccccatgataaaatattttcttgccaagacatgcgtcccaatcggtgcgcgtcgccgctctccgagttcagtcggctcatccgccgctgtccgctgttcggctcactaactcccccgtaaaaaagtgccgtgacggcggtaccaagcgcaacagcaaccagaccgagattctgaacgagtggagattttggatgttgaaaagtccgacaagaaatcaattttgcttgtgggtcgaacccgaaaattggccaaatcggatggtttgattttgctggtgtccttgtcttgggccaaaaacagaaagagacaggcaaacacgaacagattggctgccacggtgaaaccgtaccgataggaagtcattgactgaaaagggatggccaaaatgacattgctctcattaattgctttttcgctgaccattcgcgtatgctcggagttggacagctcgggaatcattgccaagtgcgaaatttggacagcggcccagccaaattggaaaagcataatgggcggaatgaaccaaagaaggcgcagaaaaggcagccaatgacagagcaaacaaccggagaaaatcagcgggaaggaaagagtgacacagacggtgccgaaaacgcaaaggttgaaataggaaatggaaaaatgccaagccaacctatgatatgccacgactttcgtcgcccaaaacggcgtaaaatgccgggcagaagggacaaatcgctgagcattccaaccaacggagtggacacggcgtcagtcacctggcggaaaatggcgaaatgtttttgtccgtctacatttgcagtttttccatggaatattcattgattgtcagtccgtgtttgcctgtccaatgaacatgagcagaccagcttgccaacttagcagcaagacgaccttctccaagaaaatcagcagataggtgaaccacatcgatgcgcacaaatcgttgtaaaaatgacccgtggaataggccaaaatgcgccgttttggaaggtcatccgatgaaacttgggccgaaacaacctgaacagatatttagaataattaaaacttatttcgggcttggtaaaaaaatggtaactgcaaccaganaatttcctcacattttgttcgtcctcattcccttcgatttcgacgccgtcaacgctttcgctctgaacgctcgcatccgcgtgaaggagncaatgctgctgacttccgcttatcggagaagaaagcatcgcatg

SEQ ID NO: 29248 - DNA, 1331 bp, Heterodera glycines
aagataaatagatgaaaatatttcaaattttatggtttaggtgacgaacaatgatacgacagttaattggaaagctataaaaatgctacgtacactattatacctaatggacaatacagaatatttgtagctgttgggccatacggtaattcgaaatgaaattttttatatataatatttactatttacttttccattttccattatgcaacccattttagcgctatgaagaatttggcgttttttttttgcatgattttaccaaaaagaaattttttgaaaaattcagaaaaatttctataactttttgaaatccagaaaaaccccctaagattggtggatctcttaaaatttgttgatgaaaattatgggaggcggtataactgaaatatggcataagcagtaactgaatattttgataatgttaaagaatgtgacttgaaaactttaagttttttttaagatggcccaaaacaatttggattttcaactgacaaatatggcaaaattaatcgaaattttttgaaaaacattgtaaatgcagatgctacccgagaatggtttttaagcaatgaaacagcagagaaaatcaccattctagtggagaagggctctgataaacgtattattagcgaatatacgaattatgccaaattaaacaaagcaatggatgaaaatgacggcaaacttttcaactccaactacatcgatttcgaagcccttacggtattatacttagaaaatattagagaaatattaacaaaaaataaattaaaaggaattgtttgagaggaatttttatcgataaaatgagaacttacaggttgcgccaccagatttacctgatttaatgggtgatagtgaattgagcaattataatgcgaaaaaagatgttaaattcatccaaaaagaaaaagtttgtttaatattgcgttaatagaaccatgcataaaaatcaaaataagatcccttatgaaaataaatattttttaaaactttgattaatataaatcaattgacgaatttgctggattattttaattgccatatgccagttttaattaaaataacataggcattcaatttcttattcagttggttcgcgatgcggaacattcaaaaaaatctactaaacctatcagaaaaatacaaaaaattggacgagaatggaaaaagaaaactaagctggtacaaaaaattgaaacggaaattgaaagaagaaaaaaccgcgaaaaaaagtattaaaatattagcaaacaaatgaatcaaaagggacaaactgaacaattgcactttccagcctcctgaaaaataccaaattattatcgtaa

SEQ ID NO: 29249 - DNA, 926 bp, Heterodera glycines
ttttgctctccataattgttagagtaccccaaacggacacttgaaaaaatagatttttttgttttcggggcagtccccccgaaccgatgcgcccagatttatggggagaccgaatccttcgggaatagcttccctatagtctgtactttaattctgcgttggatttttgctccccataattgtttgagtaccccaaacggacacttgaaaaaatcgatttttttgttttcggggcagtccccccgaaccgatgcgcccagatttatggggagaccgaatccttccggaatagcttccctatagcctgtactttaattctgcgttggatttttgctccccataattgtttgagtaccccaaacggacacttgaaaaaatcgatttttttgttttcggggcagtccccccgaaccgatgcgcccagatttatggggagaccgaatccttccggaatagcttccctatagcctgtactttaattctgcgttggatttttgctccccataattgtttgagtaccccaaacggacacttgaaaaaatcgatttatttttgttttcggggcagtccccccgaaccgatgcgcccagatttatggggagaccgaatccttcgggaatagcttccctatagcctgtactttaattctgcgttggatttttgctccccataattgtttgagtaccccaaacggacacttgaaaaaatcgatttttttgttttcggggcagtccccccgaaccgatgcgcccagatttatggggagaccgaatccttcgggagtagcttccctatagcctgtactttaattctgcgttggatttttgctccccataaatgtttgagtaccccaaacggacacttgaaaaaatcgatttttttgtttacggggcagtccccccgaaccgatgcgcccagatttatgg

SEQ ID NO: 29250 - DNA, 1030 bp, Heterodera glycines
gtctccccataaatctgggcgcatcggtctgggggactgctccgaaacaaaaaaatcgatttttcaagtgtccgtttgggtactcaaacaattatggggagcaaaaatccaacgcagaattaaagtacaggctatagggaagctattccggaaggattcggtctccccataaatctgggcgcatcggttcggggggactgccccgaaaacaaaaaaatcgattttttcaagtgtccgtttggggtactcaaacatttatggggagcaaaaatccaacgcagaattaaagtacaggctatagggaagctattcccgaaggattcggtctccccataaatctgggcgcatcggttcggggggactgccccgaaaacaaaaaaatcgattttttcaagtgtccgtttggggtactcaaacaattatggggagcaaaaatccaacgcagaattaaagtacaggctatagggaagctattcccgaaggattcggtctccccataaatctgggcgcatcggttcggggggactgccccgaaaacaaaaaaatcgattttttcaagtgtccgtttggggtactcaaacaattatggggagcaaaaatccaacgcagaattaaagtacaggctatagggaagctattccggaaggattcggtctccccataaatctgggcgcatcggttcggggggactgccccgaaaacaaaaaaatcgattttttcaagtgtccgtttggggtactcaaacaattatggggagcaaaaatccaacgcagaattaaagtacaggctatagggaagctattcccgaaggattcggtctccccataaatctgggcgcatcggttcggggggactgccccgaaaacaaaaaaatcgattttttcaagtgtccgtttggggtactcaaacaattatggggagcaaaaatccaacgcagaattaaagtacaggctatagggaagctattccggaaggattcggtctccccataaatctgggcgcatcggttcagggggactgccccgaaaac

SEQ ID NO: 29251 - DNA, 1728 bp, Heterodera glycines
tttaaaattttattcatctccctttttgatagaaacgttcagagtgcctaaactaacatgtaaataaaatttggtgcgtttcagaaccctttctgaaaaaatatttaagaattaattttgcaaaaaataaataaaaacgaaagactcagattttcgaaaatttttttgagccagctagctcggcgctcatttcagtgtaagttagtcctttaccggggagtatccctgcaaagtttggtacgcttctgctcaattagcaaaaaatatgagtgatcgaattttcactaaaaaagttaagcctacattttttggcatatttaaaaagcaattaaaaaatttttaaaatttaataattttcctgcaccgaaggtactcactcggcctcttcgctgcctcgtggtgggccttcgccccccccctcccacgcccttcagagcacgacaaatatttcaacaaaaattttgaaaaattgactagagcaatcgaacgctaacggacgacctaatggaaaaaaatccccgaaggagagaatttaattaaatccattccttcgggggaccgtgccgggtgccgcggggtaagcagtgctggttcgtttcatcacggcaccgaaccttttggctagtcagcaatcgttgcttaacttgccagatcggacgggtgcgcatgattccactgttccaagcaccccaccaaaagcaaaacgatataaccaaaatataaggaaaaattttttctccatcttcctttttgatactaaagcatcagagtgctaaaattaagttgtaaataaaattttggtgcactttagagcactttctgaaaaaaatatttatgaaacaaaaaaatcgattttttcaagtgtccgtttggggtactcaaacatttatggggagcaaaaatccaacgcagaattaaagtacaggctatagggaagctattcccggaggaatcggtctcccccataaatctgggcgcatcggttcgggggggactgccccgaaaacaaaaaaatcgattttttcaagtgtccgtttggggtactcaaacaattatggggagcaaaaatccaacgcagaattaaagtacaggctatagggaagctattcccgaaggattcggtctccccataaatctgggcgcatcggttcggggggactgccccgaaaacaaaaataaatcgattttttcaagtgtccgtttggggtactcaaacaattatggggagcaaaaatccaacgcagaattaaattacaggctatagggaagctattcctgaaggattcggtctccccataaatctgggcgcatcggttcggggggactgccccgaaaacaaaaataaatcgattttttcaagtgtccgtttggggtactcaaccaattatggggagcaaaaatccaacgcagaattaaagtacaggctatagggaagctattccggaaggattcggtctccccataaatctgggcgcatcggttcggggggactgccccgaaaacaaaaaaatcgattttttcaagtgtccgtttggggtactcaaccatttatggggagcaaaaatccaacgcagaattaaagtacaggctatagggaagctattcccgaaggattcggtctccccataaatctgggcgcatcggttcggggggactgccccgaaaacaaaaaaatcgattttttcaagtgtccgtttggggtgctcaaacatttatggggagcaaaaa

SEQ ID NO: 29252 - DNA, 1307 bp, Heterodera glycines
tgacaaataatctttgttttctcctttagttgatcctttcccgtcacattttgtccgagcatatgattcatctgatacttctttcctcaaagcaaaagaaaatgcccttgtgaaaatcgttgccttcagcttctctgatagacctgatatactcgaagctgaggttcaaatattattactattttgacagtgctgatcaaatgactcccaattctttttttaggacaatgaagggaaaaaaggcctcattttcgatagtcacattgacataacgccttatgtgtttttcttggagtctgctttaaaaagtaaccaaaccctgtacatggtggaacgaatgagtgactggccgaagttaataagtgggttaattagttaatcatgtgacactttcgaacaaattgttttttctttcaataatttacataattgatatcataaattcgtattttttagaagaagtcagtgctgtccctgaacttttgagaatgtacatcaatcatgcaaacaaattggaaaattattcattggacaaggatctggtcgcacaattagcaaagtttgaggaatcacagaagaaaacaaaagcgcaccaccaccatcatcatccaaattctcaacaacaacagaaaaacagcaaggaacttcttactgctaaaagtgacaaaaaagaagacgaaaacacaaacaatgaaatgagaacggacgaaggcttggaaagaaagcaggcagtttcatcaccatcgcatgacacatcacaacaacccgaaccaattcaacgggatgaaaattcaccacccaaaactcagccggaacaaatactacaacatcaaaatccagcaagccaaaaccaacagcaaactccaccccaagtccaacagaatccatcgactgatgatcaaaaagaaacggattcaattcaacaaaccccaagccaaagccaaccaaatcaacagcaaactccgccccaagtccaaccgaatcaacagcaaactccaccccaagtccaaccgaatcaacagcaaactccaccccaagtccaaccgaatcaacagcaaactccaccccaagtccaaccgaatcaacagcaaactccaccccaagtccaaccgaatccatcgactgataatcaaaaacaatcggattcaattcatcttcaaactgaaggtcttccaaagtcagaagtaaatattcctcatcagcatttgaatcagaatctaccacaacagaatcagatacatcagtccgactcacaacaaattcttcgggaaatggtcccttcaaatgcacatcaaaatcagcagcaa

SEQ ID NO: 29253 - DNA, 1382 bp, Heterodera glycines
cttgcaaaaccatttttcatgcaaaaatattttccaattggcgcttattagcaccgtctttttgtttcagtttcttcccaattttggactttggtaagccttcggcatcgtccaacgccattgtcaaagtgggcaatgacggcaagcacaaattttacgtcaacaaagaagtatgctttttttgtgggaaatggaggggaatgaatttaaatttaaacaacaacaaaaaaaaatttccacttaaatcccgttttaaatgctcttttttgcagttgctctcaatgttttccgagggcttcgagcgcatgttcaacagtgagggctttcgcgagcagcgcacccaggaagtggagctgaagaccgtgtcgccggacgtgttccgcgagtttttgtacatcatttacccgagtcacaagcgtccgcatggtatttttcttagaaaaatcatttatacagtttatccaagataattggaagagggtgcaccacccaacgaactttttttaagtcttcattcatttcaatttattttcggggttttagaggagggagacccaatcctgatttaaatatttttcaatttctaaagtagcttcagtatattgcaatttatttatttcccttttcttctagtgccaaatacgcgcggactgctcgaactcgcccgcatgtatttcattccgacagtgactgcgatgtgcgagcagtgtttgctgcaagcgaccgagactgacatggtggtgggcgagcggctcaaactggcggacgaatacggactgttgcgtttgaaggtacaacacgttcctacggaccttttattcaatacaaaactgccataatgtcaatagattttcaagtaagaaaaattattttggaatagaaagtccacctaatcttgttgttagttatcttcgcgtttttaaatttaaattttttgtctttatttcctcattgcccctttctcgtgacaggccaacatcatgcagaagacggatccgaacgcgttgcgcgacatccaaggactgcgggaggacacgctgagtatgttggtgcgcaagctgcagaaccgggacaaactgcagcgagagaaggagaagcgtatgcaacagacgcgaaaggacgacggcggagaggcgatggaagtggacggcaaacaggtgggggagagggagagcaaagtggaccccaatcttcagtggctaatgatgggatttttttcaaaaaatgagacatgaaccaataaatagagagtgcagagaaaaaacatctctctttttggcgtactatttctttatctgtgttaatagagaaaaactgaatttacttcatgctgtttaaaattttttcgacttgttaaatctgcttcaaattttgcataccga

SEQ ID NO: 29254 - DNA, 1244 bp, Heterodera glycines
tttgtttggtttcttttttaagcaattttccgtcatcttctaccaactgttaggcgtacagcaacggcggcacttgccttcgatgcagctgttcacgggctctctaaccctatttttattttttttctatctcttctctgaaaggagttataacaatttttcacaacagttttgcatttaacagacacattctaaaatttctaattagtatagtagtccaagcctattattattttttttgactagtctctgaatggggttatcccagttttagtatcctttttgaaaaacaaaaattttaataactgatacggtagcccaacatccattgccccaatgtacccttcggtttgtcaacgggagctaacaattgatgagtttgtttggtttcttttttaagcaattttccgtcattgctcaccaactgttaggcgtacagcaacggcggcacttgcatccgatgcagctgttcacgggctctctaaccctatttttattttttttctatctcttctctgaaaggagttataacaatttttcacaacagttttgcatttaacagacacattctaaaatttctaattagtatagtagtccaagcctattattattttttttgacttgtctctgaatggggttatcccagttttagtatcctttttgaaaaacaaaaattttaatgacttatagaataatcgccacaatcattggcatctatatagttttcgatagccataagtattttccattatccttcaaaattagaaaaaaattcttaaaatttaaaaaaagttatgacctgagaagctcaaaaacacaagtttttttgaacatttttagtcataactttcttgatttttaacgaaactttttggaattttgtaggttaatagaaagcacttagtgctatttaatgatatcaagaattaaaaatttagatgcttttgaacaaagttatatcaaaaaatattttcatttgatggttttttgactaacgcccattatgatggtttttgactaacgtcatagcaccaataatcctattgctaatagttaacactaattccattcttcgaatccctgaatcccttcattccaattcggtattgaagggcatgaatgtggctgatcaaatcctcgtcatttttatcttctttggcatcgtaggcaacaactagtcttcttattgcttcatcgttttcaacatatttttttggacgtggacgagatcatcaagcccgcgt

SEQ ID NO: 29255 - DNA, 2052 bp, Heterodera glycines
  unsure (1)..(2052): unsure at all n locations
tcgaaaataatgtcagattcggttatttggcccttaaactctataatacatatttgtatcggtgtttaaaaaaatttcatttttcgaaaatggggggggcaaaccagactattaccggatcccgtcctgcgcgcgccggtctcttcgttttcgggtcactggtcacaaatctagcatccatttcgaacagttccagccccggacccattcgaacaaaaagtccaagattcaaaattttcgaatttcacttctatattataaaaactgtttgatgatcttttattgaagtatgatgactttttgttcgtccgtgtacttaaacaaaattaaatttgtgctgccgtcgaaaaattttaccgaaaatgcctttaagctccctcttctttatcattaattaaaacaagagaaattactcattcctttttcatacattcaattttagtgtaatccgaaaaatggtgcgctttatgtccacttgtgttcgttgtctccggacaccgaatatgcgttttacgtctctgctcatggggcaagtggccaagaattgcgccactctcgccgagtgtgtgtgcctacggatatcgcttaaatggctcgctcattggccgaaataacagcgggatttatttattgacataatacatacgcatttttgttctcacgatttcaaangcgggaatttttattcatttttaaccgatctcgccttaaagttgtttgttgacaccgtttcgaacactgaataaaagtggaaattacgtacganatgtttttgatttgtttatgaaaagaggaaatttcagtctaatttaaaatatatttttattggattgacaaaatagttcgggcttggggggtttgtcgttacgaaaattttattttgttatgcactttggatccccaaatttttcagcttttttcactttccaagcaaaaaacatacgaacatgtatgtttcgggctcgctgatcactaattcagcatccgttatgcccaatttcgaacccttgacccgaattcgaacaacaggtcgaaaattcacttcgccaaaaaagggtggtgggaagggaaccaaaaagggtggagtgggaagggaaccaaaaagggtggagggcggcgaggcgttgtgtgatgggccttcactctttttgaagtgctgttaaaatccctaatcaaacctgaaaaccgaaaatgaaagagcttcaaagataaatttgcatcaaaaattggcattggaaacgatgaatgatattttcgactttttgttccaattctggtcttaagttccagtctctccgatcaaacgcaaaaaaatcaaaatttctctgatcaattttcaattatctaattcgctctttcccgctatttgctatttccaaatatgcataattattacctaattatttcgatatttaaaatttgggttcaatggtggtttgacagtgccacggttcgcaccggaagaatggagtgtgcatcaacggacgttggatggaggagacagaaccaacaattacgcagaagcattccatagaaaacttcaacaggcatttgattgtacccatcctagtgtcttccacttcatcaacacaattcgatgtgagcaaaagtcaattgatgctgacatctcacgatgcgtcgctggtgaactccctcctctaaagaagcccaaatatcgtgccgccgatgcgagaattcttcgacttttgcagggatacaataccatcaacaataacccggctaaccaaaatgaccacaattaccatgccaatgtcaatgttaatcccgataacatcaaccatttgctcgttggtgtttctcgaaattatgaaatgcgcccgtaatttttcaatgctttgttattttttttttgttgttaacacattgataaatattttttgataataaattaaacatttttagaaaaaaatcagaatataacccatgtggcacaaaaacagcttgccagactaaaacgaccccctgactaaaacgtcccctcagactaaaccggccagactaaaacggccagactaaactgacccggtccgc

SEQ ID NO: 29256 - DNA, 905 bp, Heterodera glycines
attttattcgttttcctcctttttaataatttgtcatttcccaatgatttcctttgtttttcagatttatttaatttacagcgcaaattgtgcagcattaattagtaattgaattttctcacaatggccctgccaatggtcggcggcgtttatttgggccatttgtggcgcggcacaaccggcaaattgcgcgccttggcccgtccgctgctcaaagatggcatcggcgaccgaatggacaagggcaatctgtgggtggtgcccggcttcacattgctcgtctttgccattctgtggacaacaaaactgtgagtgaattatccccactttttactcattaatcccccccccctttcccattttccccttatttttttgtaatttttccatttcgtccaactctcttttccatccgttgtcgtccaaacttataatttgttattgtacaaattcaattgttcatttttcagttccaaaattgccctggaggagtccacttgccgcggggcatccatttatgactttgctggcacacagctggacgaagatgcgaagaggcattgccagaccgcgaaaaggtattacgttgggccggacgaggcgttttcgttggaccacaattggcgcaaacagcgggaggtcaaaaacccggaggtgggcacaaaatgcaataatattaatattattatttatttatttttatgtaaatattaattaataaaataaaattgataattttccaattcttttaattgatcgatgaaagtgtttatttaattatttattatttttttatttattgatttgtttgtttgttcagtggatcctttggttttgggctccaattgtgttcgtcatgtacgtgttaaccccgttcatgtggactcttctgcttgaaaaccaag

SEQ ID NO: 29257 - DNA, 923 bp, Heterodera glycines
ccaatcagtaaacacagttggagatctgctggatgggatggttgtgctcgcccgatcggaacacggtgatcactccgtgttctccgtaacagccaacctcaaacaaatctcattgtcagttaaggagcgtatacgaagcactcacagcttgaacatgcaccgctcgttgtgtctgtggcgattgcagcggaaatgcctgttcttgccgtggaaggtcgtcttgtgcaccgtcacccgttgcgcctgtcgcaacgtttccaactcttccgcggtcgtcaccgtctgcatcggaatccaattggtgcgcgggttgcctgagggagagaaaacgagaacagcgattagcaaatgtctcaatgttccacaggagggactaagaaggcacaggggtctcagtgattctcaccaggcaatcgacctgttgctctccccgacggcaccaccgcgtggttgtgatccccgcttttgtacacgcgaaacgtcccgtcctccgattggatggccaacattttgaaagggcacttctcctggtgccggtgtcgattgcagcggtagtgtttgatcaacttcaatggacaataagggttggccttcaatcgcaccaattgaatgatcagtcagccacctgcttcccatctgtgccgttgctaatcgttttgtgtacgatcgcctgacttcgcactttcagttcctccaataagtctttgctggcgattgtggccataaattccatacttgcggcggcggcagctacattttggctgattagctcaacaaccgtacaaatgcggttcactactgtactctcacttcccgtcatactgtggcgcttttcccgtaatgtcttctttcctatcgtttctctgtcgggagcactctctccctcttctctctctctctatacctacaatgctaatccctct

SEQ ID NO: 29258 - DNA, 1614 bp, Heterodera glycines
ccttttggtggaaaacatttgattcttgctggcgattttcgtcaaactttgcctattaaaaaattttgcggaagaatgtgagattagcatttgcaacaacttttataaaaagtcaaggagcaacatataaaaaaattggcattgattggacaagaccaagtttttcccatggacaaacttatgtagctttgtcaagaacgggttcatggaaacaaattaaaattaaactttcggaagagaatactgagaaaaaaatagaaaattttcttataatataaaataagtaataaatacatttcataattcttatttaccttattattgaactttgatcaaaaatagttaaaagggcactcattgttattcgttttgcataaataaacaaagaaataaaaatttagaacctagcctttttttgagaattttttaaaataaagcataaattaagcatttcaaaaccaatttggattttttttttaatggagaataatcgtctgcaaaaaacaattaacaaattaacaccaattaagcgtctaaaaatcggcgaaacaatgatctaagtttaatttaaaaatacatttaattatattttataattattttaacaatatatttaaaataaatgtttaataattgttgaaataaatttaatatttagtgatatcaaattgacaattgtaattgctgatgcggttagaaatgtcaatggaaaatcagtttggacattggttggtagcgatggttacgattttatcaacatcacaatgtggggcagcaattacgaaaaaatggcacgagaattcggacaagaatttaaagttaaatttataatttaattaaaaattatatttattgttaagcaaaaaacatatgtatttaatacttggggagtacaaaaagttattccgaatttcaattatggtaatgttgattatgaattaattgcaaaggaaggatcgacaattacactgatcactgcggaacaatatcaaattttatcgataaaaacaaccaattatttcacatttttgcgtgagaaatttgcactcgataatgatggtttttttccaacgccaatcaaaaaaattcgcgcaggcgaacagtttgtgtaagttaataaatagggattttagctaaaacaaaaaaataaaatttaagtgaaattgaatgcgaattattcgaattaaagcccgtgagaactgtaatggcaaaaggaaacgaagcacgtgtcattgatgcaatgattaatgaaggaaataacaaaactcaattaactgcttggaatattcttgcggattttcttgaatatattttacaagacaaaaaggtgtattaaaatatatatttttttaaatattttttaaaattaagggatatgttttaaaacttcaaggcttacttacgaagaaaggctttccggttcagaatatttcttttgtttttatcaacacttctcgaattggatttgctgaaaaacagcgaccacagaaaattccattgaaattggcagaattaactgaaggactttgtgaatgtaattttaaaaagttttgaaagtcataattttcggattaggtaacattcgtctcagtgtttcaaaggaaacagtgtctt

SEQ ID NO: 29259 - DNA, 1004 bp, Heterodera glycines
aaaaaatcgtttgttttgtttttcggggcagtcccccgcgacccgatgcgcccagatttatggggagaccgaatccttcgggagtagcttccctatagcctgtactttaattctgcgttggatttttgctccccataattgtttgagtaccccaaacggacacttgaaaaaatcgatttttttgttttcggggcagtccccccgaaccgatgcgcccagatttatggggagaccgaatccttcgggagtagcttccctatagcctgtactttaattctgcgttggatttttgctccccataattgtttgagtaccccaaacggacacttgaaaaaatcgatttttttgttttcggggcagtccccccgaaccgatgcgcccagatttatggggagaccgaatccttccggaatagcttccctatagcctgtactttaattctgcgttggatttttgctccccataattgtttgagtaccccaaacggacacttgaaaaaatcgattttttttgttttcggggcagtccccccgaaccgatgcgcccagatttatggggagaccgaatccttcgggaatagcttccctatagcctgtactttaattctgcgttggatttttgctccccataattgtttgagtaccccaaacggacacttgaaaaaatcgatttttttgttttcggggcagtccccccgaaccgatgcgcccagatttatggggagaccgaatccttcgggagtagcttccctatagcctgtactttaattctgcgttggatttttgctccccataattgtttgagtaccccaaacggacacttgaaaaaatcgatttttttgttttcggggcagtccccccgaaccgatgcgcccagatttatggggagaccgaatccttccggaatagcttccctatagcctgtactttaattctgcgttggatttttgctccccataattgtttgagtaccccaaacggacacttgaaaaaatcgattttttt

SEQ ID NO: 29260 - DNA, 1128 bp, Heterodera glycines
tcacgccggaattcgttgaagggacaaatcagacagtaaaggagcgcttgtacagatatattccaaagagagacactcttcgatgggtcgacgtaatagacaaaataataacaaacattaacaacagtgtgaatagaacattgggagccaaaccgtcttcaattaattttgaaaatgcccgtgcgctctggaaaaaattatataaggctagggaatttaaaattttaaaaaataaaaaatttaaaatcggtgatatcgttcgtattaccaaggaaaagggaaaattttcaaagggatacctcccaaactttaccgaagaattgtttaaaatcgttgttgccaattcgacgacacccgattcatacaggatcgaagatttggaaggaaatttaataaaaattttataaccaggaattagtgaaaacagatggatgatttttacattgtactaccttcgaacacaccggggcaggagaacactacgtcaaaattcacagtacgcctccccgagactttggaattgggcacaaattggtcagtagctctctcatcaattatttacccctactcattcaccgcactcggtataaatggtcaagagtttattaaagtatgggaaaatgacaccagtgtccccattcaagtttatttaccggacatgaattttaaaaccgccgggggcctgggaaataaaattaacgaggcattcacacatcattacaaaatcaaaaaacaacgtggaaagagagaagccaaggctgaagataccaaagattcaaaaattgatgtcgcaaagagggccgcagaacgcgccgggagagacgtagaaagacattttaatcagatcaacaatatatcgaattccatccaaacccaactaaacacactacgagaaacaaatcctcaaattttagaagagcctgatataaaaatttggtttgacaaaatggttgagatgggaaccgaaattcaaacaacccgaaatgaacttaaatcttttcaagaagaagtagataaagataaagccaaaaacataacattggagcatgtggaaaagaatgacttgaaaaaagcaaagaaatcagccgacgtcgcaaagggaatcgccagacaggcaaagaccaaata

SEQ ID NO: 29261 - DNA, 1307 bp, Heterodera glycines
  unsure (1)..(1307): unsure at all n locations
caataataatcaaagttaaagatttaatcagtaaaaaaagtttttaaaaagtcatccataggcttattgttaaaaaaatactcgacctaagacgataatattaaaattatgtagatttaattgctaaaccatttgatccttaaatatcaaatgcacgaaaaaagtcccctaaaaatagctataataaataaactgcagaaaatctgagactaacattaaatatacaacaaaaattgattacaatttgaatatgaaaatatcgtttattattgacaaattaaaatcttaaaaaatggatattaatttgagcttatatatatatatatatatatatatatttctacaaattttagtttgcaatatcaatattgaaataagacaagaagataatcaatccttcagcttaagtaaaaatcttttaataaaaagaaaatataaacaaaaaaattcacttggatttgtaaaataaaaagaaaattatttattcagcaaaactgaatgcagcaacccagagtataacgcacacctgattgtttatataccatcatggatttaaattaaatgcattcatttcttgcgatattggatatcttggatctccattctgttctctttcacaattttatgcatttttacatttttcgaatcanattttcaggttctctaccatccccagggtatgattgtcaacgggctgttcccttcatcaatttcgacaatcgaaagacgtttccaattttcaacttccactcttggccgtataatgcaagtgcgaaattgaatttttatgaatttttttgaaaaaaaaaattttttcttcagttttacgactttggttacgtgctgttctgcatcccggtctcatattttggtggtcgacattcaaagtcaacgggtctcggggcgggtttgcttctgatgtcggtcagtgctaaaaactcatgacaacaatttttgcattttctatagaatagaaaaatccaacaattttatttatacatgggacgggggcgtgaagactgaagggggggggggggggtagaaaaatttgcaatttttttttcttcaaatttttttaacaataaatcttttttcttgaaaaattgataagtttgaaatttaaaaaaaataaacggtgaaattttacccggcgaaattttggggtgcaccccgaataagctacctaatttcttcccttttcacagcttggctccctggtgttcactttgccgcattttttggccgaaccgtacacaacttcgtaccagattgaaaatactggactttcccgttgcctgaacggtttg

SEQ ID NO: 29262 - DNA, 1500 bp, Heterodera glycines
  unsure (1)..(1500): unsure at all n locations
cgttcccaaaaagctcagtgtgggcgttccacaaaaacattcagtgtgggcgttccacaaaaaaagctcagtgtgggcgttccacaaaaagctcagtgtgggcgttccacaaaaagctcagtgtgggcgttccacaaaaaaagctcagtgtgggcgttccacaaaaagctcagtgtgggcgttccacaaaaagctcagtgtgggcgttccacaaaaagctcagtgtgggcgttccacaaaaagctcagtgtgggcgttccacaaaaagctcagtgtgggcgttccacaaaaagctcagtgtgggcgttccacaaaaaagctcagtgtgggcgttccacaaaaaaagctcagtgtgggcgttccacaaaaagctcagtgattgataaaataaaataataaggttaaataataattttgaactgtaaatgtaattttgatttaattttattgcatgcttttaaattataatttttattacaaaactaaaaaaggaaaaacaaattaattgaagacaattgataaggtgctaattttctttgcatttcatgtaaagaatttataattttattacaaaactaaaaaaaggaaaaattcacaaattaattgaagacaattgataaggtgctaattttctttgcatttcatgtaaagaatttataattttattacaaaactaaaaaaaggaaaaattcacaaattaattgaagacaattgataaggtgctaattttctttgcatttcatgtaaagaatttataattttattatttaagtcggattctcgtgcttttcccaaacctttgtgccaaataatcttgccttctgactcacatttataattttctcttctttgttctctatcaacctgttctgtttccagtttctctaatttttcgggcttacagttagcattatggtttgactgcaacataacaagttgtattccctgtcgcagaacagctgatgcgacgatcgatttgacattaacatttttttcttgttcgcgaaaataacgacattttgaacaagaaatatatatgtcttcattattctcatttgtttgaacatattttctccaagcagattcatttccaattataaaaacattttttcttaaagtttttgaaaagcacttttcaaatctaagttcatgttttggcatttcatggcttgaagcattcgagtttgaagcatcatttttatttgtatgcgcagaaacaatagttagtcttgacacgtagcgtcttaaggtacaaaaacttaagtcaataccttttagttgcatttgttcatggagtttttttaatgttttaatttctttattttgatagcttttgacaagttctatagctntgtgattttttataaattctttcaaaccggaattggtagaggtcgaatactcnaatcgaaataacaaaaaaataaaaataaaaagtcttattcatttttctaattataattttatttaaccatataaaatttattgtattaattttac

SEQ ID NO: 29263 - DNA, 993 bp, Heterodera glycines
aaagttttttcttcataacttttttatattgctaaaaaaattttgtgctttttgtaagactaattgagcatgtgaagcgctttctaatgataccaagacaattttgatttagttgaaaataaaaaagttatagccctaaaagttgggctggcgccaaaacgacccattcattctccctttttgactgttcgcttttcatttgtgctgccaccgctgctgctgcgaccgggtccaaagtacataaaagggcagacactgaccggcaatgggtcatttgcttttcctccgttcgtttttcctccatgcctttgcactccctttgcccctttcccctctctctctctcctccttgcatttgcttattccatcttttttaaaaacattgattattttgagacggcactttcattttaatcagcaggacactgcacgaatggacggagaaaaacatcaataaatcactctggtacgaaatagtgcaggacagtgattgcctcaggcaatttgaatggctttgcgctccttttttgcctgaggcaatctctatcatgtactatttcgcaccagagtatattttcttttcgtccatttttgtgcagctctcctgatttgaatgtgtatttgtttatttgttttactgtactcatttattttctttttagagttcagtaaaccctcttaactatccaacatttggtcaccatccgtgcgtcctgtaaagcattgacacaacatgaatttcccggcaaatattttggtgggtttattggtttttttctttccatcatatttctgctaacaatttattggatattctgtggcttttttgcaaaaataattgtaaatttatttttgttttttttaatttatgtaaatccattttttattcaaattgtttttaattaaaacaaaattattttttttttaaatgccatttgtttttatgttttttggctccgaatatttgtcttcttattgtacttttttgatttt

SEQ ID NO: 29264 - DNA, 1928 bp, Heterodera glycines
gttcgtaattgtgattgaaaccaacgacacatttcagacgaaaaagccaaatatttggggggggggcgctcaacactgcccctcaaatttgtcgtctgagaagtgtcccaaaaatccaccaaattattttgatctaaaaaaagttttatttaatattaaaaacatatttctaggtgtaaatgagttcgctcatgaacccgatctcagattttcatttctatatttttatctatgatttttcatccatttattcgggtcttttgaatttaactctaattagagcaaaataaatgttagattcggaatttacgtacccaaaaaccaatagaaagacttttttttttgccatttttcaattttttttgcattttcctgaaatgtttaattcttatgaaaaatgacgacaaacgacaatttacggtagattttgtcaattgtgattgacgacaattcacacgacggagacaaacggaaaaacggcttattcaaacgacaaaatttttgtcgtaacgacaaattcggagacaactgccaaatttgtcgtttgtcgtccgttttgtcgtttgtaattgtgattggccctggggcccaaacgtgtggggcccaatcgtggggacccaactgaacgtagggaagcggaagtttaggtaccgggaagtttgggcacaaattaaggatttaaaaaataaaaatatctttaattgtctataaattgcaaacatctaattaaaagcatattaaataatcaagttaggaatcgaaaattttttaacggatatccactcaattttaaccatgcttattttgtttgctaaattcattacaattcattctttatcaatgtcatacatatgtattgtgtatcattacaaggctcggtctattcaaagacttaaaattttatgagtttaaacagaattagacgggactcttgatatttcgggcccaactaagccgggtattcaggactaagtccaaacagaaagaaatacgcgtttaactctacgtttaaacagctgtaagaattgacgaaataataagattgccatgctttaattttcaagaaaatataaatttttaagcacgataattgttaaatttactaaaatttaatgatttacactggtggaaaaaagtctttgaacaaacatgtaattttttataatggttcataaaccgataattaatgaagcattgtgggcaattgtttatgtatttattagtccaatatatcggcttcatatcagcgccaaaaaattccgaatcgaaaataaaatgaaaatgatatggtcaacgaagtgagagagatggtcaaaataatggcggaaaaaagtctttgaacaaacttagaaaacaatttcaaaagactcttaaaaatctgaaataattcatgcagatttatcttttgatgctgaacaaaaaagtattttcaccaacttgatcagatcactccttcatagtgattggaacaccctaaaatacactgaaaatctgggaaattattcgaaaattcctagggggttgggaaaatttttctagtgaaaatgagtaagctcactgcaaagagcacaaaattctcttccgaatttccctttgaatggtgccttcttctacgacttgtacataaaaagttatatttggttgaaaaattgacaccataaaattaatcaatttttgatcattttcccttgaaatactgtagaaatcaatccaaatttgcatatttgtcttgtttttttgaaatccctccctctgtgcctaaacttcctggtgcacaaacttcatgtcgccctgacgtggaccgggtcaattccactgtgcagagaaaagcctagtactatcacgtcgttactctttttatttgtaatttctctcactttggcgtacaagcgccattttttaatagaaaaaacagcatttacttacta

SEQ ID NO: 29265 - DNA, 1285 bp, Heterodera glycines
tcggagtcaagtctcggtctcgagtctcgggaatttttcggtctcgagcatcactaatggcggggtgggacccaagactcatttggggggggggcgggggccgagaattggccggaaatggcacaaaaaatgttagggattcattgatggcccagtaatagtcacaggattttggctgggtgccaaaaaattttcgcccgctctatttttgaaaaaaaattctgtaccaaattttaaatgaaaattcaaaaaaaatttttttgttttttcccattaaaaatgttgagtattttgtggttttgggagattgattaccttttgaagacgcggaaattatcatttttcacaatttcccttttattgcttaattgatatttactataattgttaaaatggattcaattaatgttttgttttttttttgactgaatttttctcctatttttccattgaatttttttccaaatttcaattgttttttctatttcaccaagttaacatttttaattattataattttaacaagggttgaattactgtcctttttttacattggattttctctcattttcccggttctgaattttttccaattttaaaattttccaatttttcaggcactctctcctcacttcggcggacggggggcggccaaccacgtccacggcatggcaatgggccgaagaaacattacgccaaagagatggacaagtaaaatataattttttatttaaaaaaattattttttccaagatatttcataaatttatgcaataaaaattcaaattttctcccctttggccgacttttttttggcccaaatgccaaaaatgcaaaattttggcccatcttaactctcttaaaaagcaccaaaaatgccctcgggagatcatttactccctcccccaatttcctgctgcacccggggccaccaaatatttatttgctggccgcttcaatttcaccgcaaattttgtgccgtcagtggcggcggcggcggtggcggcaattttttcattgccccaggggaaatgacaaatttgaaattgttttttctgttttatcagattttgtggggggaattttttaaatttcgtcattttatgaataattttagggttgaaaaaaaatacttttaattaaattattaaattatttattatattaaattttaatttaaataatttatttttaattaaattttaaagcaaaaaggaaaataatttatttttaaaatattattttctattatttttgaaaaatcattattttaagaataaattta

SEQ ID NO: 29266 - DNA, 1317 bp, Heterodera glycines
gttatggagcctggactcaaatgtcccgctgaggccaaaatttttttctatttccgggaaaaaatcgaaatttttccgaaaaaaataccagtcgatagagctcgaaaaactatgttttggaagtggtctccgtttctctgggaaaaatcgttaaaaaatcctaaaattcaaaaacccgaaaaccgttttttaggcctaactcgaaaatttttgaaaattttcgaaattttaaaatttggaaaaatcgagctttcaaagctctacaataagtccgctggagccccctcgctcagatcaaaccctgacgcggtattcacctgggactgaagtggacaaagttggtactgaatttctcctattttctgcagcccttcctactataggtagaggcctggaattttttttgacttttagacaacacttcaacttaggttcctaccagcggaaagtttttgattcgggatttagaaaaaaagttatgggccgtcaaacgcacgaaaaaatgagaaatcagtccctggtactcagttgacccttggaccggaaaacctatatttttcccggatgcgcctcaaaaagttgtaagacccttccactactttcagggcgctcccggccttcggccgggagattttgtttttgcagacgaaactccttgtcaatataacatatatagtaatattgacaggatattcggctaaaaacgggtttgatcatttttagcgcatttttaggtatacatttgagacaattgggcaggacaagaaaagaatgaagttgatgcctcatgaaactcggaattggttatgtttagtcgaaaatatccttacataatactcataaaaaatacaaataattcaacccacctattctatgaccacattctgaaaaaaatcccagaaatacgaggaaagatatgcttggtcacaataaaataaaaaatggctagtatgtaaaaatttgcggtcacaaataaaaaaaaatggctaatatgtaaaattggcgtcttgaaatttttagactaatccgaagcaaagcacgaatgaattaaagaggcgaaagaattcacagtatcgtttctaatagggaaatattgacaggatattcggctaaaaacgggtttgatcatttttagcgcatttttaggtatacatttgagacaattgggcaggacaagaaaagaatgaagttgatgcctcatgaaactcggaattggttatgtttagtcgaaaatatccttacataatactcataaaaaatacaaataattcaacccaccaatggtatgaccacattctgaaaaaaatcccagaaata

SEQ ID NO: 29267 - DNA, 1548 bp, Heterodera glycines
atttctttcatgtcactgcgcagtacaagtgcataaaattcgttgaaaaattgctaataatacatttttctgagtggcacacgagtgcattattgattgaaggcgctagtgtcgtggagcacatgtccgcagtgcaaattttgcgtcagagacgtcacggtacaaaatatcgcaacatcggctcaaagcgacgaagatcattatatgaacccactaaaatattcgtaacttgtatccttacataatttccggcttaggtattaattattcgctaaaagccagcgctctttccactacggcggccagtaggtgcgcgagaattagaaagaagtgcgcgcgtgatttgagcgggtctcattatacgtaatatatttcttcagcatcggcaggtgtatatctggtccacccccgtaaaacacgctttgtgttccccatcgcgttggacgtcgttgacatggcgaattagtccatcgtctggggcgagcaatggaaacacactttttgtggcaagacccccccacccccaaggcccttccgcactcgaaatttttaaggaattacatatttttgctgaaaattttaggttttccttgcttgtatccccctgacctagcctcacccaaattttccaaaaaatttcgctaaatttttcaaaaaatctacaattttttgaagaaaatctgctaaaaatgactaaaaatcgcaaaatttgtcattttttggacaaaattcaaccccctgttcaccaaaaaattttttcgtaaaaacagcaacaaaaaaaaaagtcgtcgcccgggtggagggtaccctccccaacccgaaatcctgggaccgtataaatgcttttggtaatcaaaaacggtgaatttcgcagtcacctcacggcttgtcttagccacggctcattatccctaactttacagccattgaccatcgttttgtcccgttccgttgaccgactgtcgccggcactgtccgtcatgccaatggcaaacagttcgaccagaccagtctcagcaacaggtgttttttttgccggtttcaaaatttgtaatgtgttttttacgaaaaattacattttctagtaattttttgaatttaggccaaaagtctcactcaatatatttttttaaatgccgctttcatgaaagttttaccattttgaaaaaaaaagattgttggtagagagaaagagagagagaggggagggggggtataaattggactgaaataaccaaaaaactatcacaatcaacatttctgctcttaattaggtaattaataaatttcttataaaaatttaattttatttttaaaattaaataggctgctaaattaaattgatttttttaataaaaaacataatgattaatttcttttttaataaaaaattaaattacgtaataattaaattaattttttttaaataaaaaatcggtaaacatttttaactgtgttcttttctacttggaaataggtgactaaattagattcttaaaaggtaaaatttattttttaaataaaaattggtaaaaattgactctagag

SEQ ID NO: 29268 - DNA, 1289 bp, Heterodera glycines
  unsure (1)..(1289): unsure at all n locations
gtataaccgttttagaaatagcgtagaaaacagcttcgatatcagaaaccaagtcaagtccagaaagggatattttaaaacgatttcgttttgttttggcattatgataccgaataactttcggaaattatggaaacanaattggagaaattcgaataattttttgactgcaaatttttttccttttttgaattgggttcaaaaaaattttaagagaatttttgattattaatttgaagtcttgaatttatttgacaaatccaagacttaaaactgggagaagcaaggggctgtggctgggggcctaaaatttgggccacattggagaattaattctgatttctgaaaaagtcccagaaataactattttttctttccatacgttcttgtagagctcgagctgctctttccaatggtcttatcccggtctcgatccgtgccgaactcacaaagttatggagtgaaatgtgaaatattgttttcaccacaaggcattttttctgaaaaccggattcaaaaatctggggtttggtataaccgttttagaaatagcgtagaaaacagcttcgatatcaagaaaccaagtcaagtccagaaaggaatattttaaaacgatttcgttttgttttggcattatgataccgaataactttcggaaattatggaaacaaaattggagaaattcgaataattttttgactgcaaatttttttccttttttgaattgggttcaaaaaaattttaagagaatttttgattattattttgaagtcttgaatttatttgacaaatccaagacttaaaactgggagaagcaaggggctgtggctgggggcctaaaatttgggccacattggagaattaattctgatttctgaaaaagtcccagaaataactattttttctttccatacgttcttgtagagctcgagctgctctttccaatggtcttatcccggtctcgatccgtgccgaactcacaaagttatggagtgaaatgtgaaatattgttttcaccacaaggcattttttctgaaaaccggattcaaaaatctggggtttggtataaccgttttagaaatagcgtagaaaacagcttcgatatcaagaaaccaagtcaagtccagaaaggaatattttaaaacgatttcgttttgttttggcattatgataccgaataactttcggaaattatggaaacaaaattggagaaattcgaataattntttgactgcaaattttttttccttttttgaattgggttcaaaaaaattttaagaagaattttt

SEQ ID NO: 29269 - DNA, 895 bp, Heterodera glycines
  unsure (1)..(895): unsure at all n locations
tagcagtggaaaataaaacttatttaaaaatttaaaaatcaaattttatttttttaaagcgaaaatttttcagaaaataattttttcttcaatgaaaaaaccataaattttgaaaaggattaattttaaaatcattatatttttttgaatgattttcatcaaataatattaattatttgttcaaatattaataattaaatttatttagtgctcaaaaaaaaatttcaaaaaagactaattagttaaataattttgttatttatttgttaattagtgaatctgtttaattcaaccaaatttaaatatagctttggccgcgtcctgctttttcatctcgggcattccccgccccattgaatcggcccataattttgtacatacagactatcatcctattagaacggtcgcaactaattgagcccattatttcttatcaaagagaagacaaacacacgaaaaaataataatttgtcaggcttatcatcataataatctgttaattgacccttaattattattttgttatgttgccattattttttgccatcaaaattgngacatgaaaaaagtttgctgatgaggtaaaaaagtgtgcgataaatttgggcgaggggtgactgaccgtggatggtacggacgagtggctagacataaattgctaattagtaaaaaaaattaacgaaaaaatgaaataggtaataatatttgacaataatcttctatgaaaaaaatgtatattttacaatgtttgaagaagacaatagacacaattaaattcagtttatagaaattctaatgtcttttgtgtttacgtaattagttcatcatccccaattgtttcttccatattaaaatgctctttcgatcaattttcaatgtcattgcaatttttttt

SEQ ID NO: 29270 - DNA, 1138 bp, Heterodera glycines
acgccgaaaaagtctgttgatatttaataaatttacttcagatggtcaagcaaaataattttttatttttgtggcaccattttaacgattctccaaaaataatggcaacacaatatttggccagaacgccgaaaaagtctgttgatatttaataaatttacttcagatggtcaaataaattaattttttatttttctggcactattttaacgatactccaaaaataatggcaacacaatatttggccagaacgccgaaaaagtctgttgatatttaataaatttactttagatgctcaaataaattaattttttatttttgtggcactatttttacgattctccaaaaataatggcaacacaaaatttggccagaacgccgaaaaagtctgttgatatttaataaatttacttcagatggtcaaataaattaattttttatttttctggcactattttaacgattctccaaaaataatggcaacacaaaatttggccagaacgccgaaaaagtctgttgatatttaataaatttacttcagatggtcaaataaattaattttttatttttctggaactattttaacgatactccaaaaataatggcaacacaaaatttggccagaacgccgaaaaagtctattgatatttaataaatttacttcagatggtcaaataaagtaattttttatttttgtggcaccacttttacgattctccaaaaataatggcaatacgaaatttggccagaacgccgaaaaagcctgttgatatttaataaatttacttcaaatggccaaataaattaattttttatttttgtgacactattttaacgattctccaaaaataagggcaacacaaaatttgacccaaaaccccaaaaaaccgggtgaaatttaataaatttccttccaaggggcaaataaattaattttttatttttgtgacaccattttaacaattctccaaaaataatggaaacacaaaatttggccaaacacccaaaaaagcctgtggatatttaataaatttacttcaaagggccaaataaattaattttttatttttgtgacaccattttaacaattctccaaaaataatggaaacccaaaattttggccagaaacgccaaaaaa

SEQ ID NO: 29271 - DNA, 1334 bp, Heterodera glycines
tcagagcacgacaaatatttcaacaaaaatttttaaaaattgactagagcaatcgaacgctaacggacgacctaatggaaaaaaatccccgaaggagagaatttaattaaatccattccttcgggggaccgtgccgggtgccgcggggtaagcagtgctggttcgtttcatcacggcaccgaaccttttggctagtcagcaatcgttgcttaacttgccagatcggacgggtgcgcatgattccactgttccaagcaccccaccaaaagcaaaacgatataaccaaaatataaggaaaaattttttctccatcttcctttttgatactaaagcatcagagtgctaaaattaagttgtaaataaaattttggtgcactttagagcactttctgaaaaaaatatttatgaaacaaaaaaatcgattttttcaagtgtccgtttggggtactcaaacatttatggggagcaaaaatccaacgcagaattaaagtacaggctatagggaagctattcccgagggattcggtctccccataaatctgggcgcatcggttcggggggaatgccccgaaaacaaaaaatcgattttttcaagtgtccgtttggggtactcaaacaattatggggagcaaaaatccaacgcagaattaaagtacaggctatagggaagctattcccgaaggattcggtctccccataaatctgggcgcatcggttcggggggactgccccgaaaacaaaaaaatcgattttttcaagtgtccgtttggggtactcaaacaattatggggagcaaaaatccaaagcagaattaaagtacaggctatagggaagctattcccgaaggattcggcctccccataaatctgggcgcatcggttcggggggactgccccgaaaacaaaaaaatcgattttttcaagtgtccgtttggggtactcaaacaattatggggagcaaaaatccaacgcagaattaaagtacaggctatagggaagctattcccgaaggattcggtctccccataaatctgggcgcatcggttcggggggactgccccgaaaacaaaaaaatcgattttttcaagtgtccgtttggggtactcaaacaattattaaaaatttttagatttttattcatctccctttttgatagtgaaagcatctgagtgcctaaaataacttgtaaataaaatttggtgcgtttcagagcagtttgtgaaaaaatatttatgaattaattttgctaaaaaaataaaatagtgaagctttaaaaattaataaaaaattttaaatacagaattactggagttagcatcatagcagtgcttttcc

SEQ ID NO: 29272 - DNA, 890 bp, Heterodera glycines
caacctcatcagctgcaggtcaaccagttggccatttgcattttctttacgaattcgaagctcagatagcaaatagcatttggagagatcaatgcaattttggctggagtgaagtttgaagtggtagggggtgtcggtcagagggttacttgggagcagttcaaacactttggaggatgagacgctgacgttggttggcgggatgcggaaaaagtccaaggcgttgttgatggagttaacactgtcattgtaaattttatggaatgccatttagtaaagaccaaatgcgtcagatcgaacacgttttctcgctagtttgctttaattgaattttttcaaaatttccaaaatcccgcacgggatcccgcaaattttaaatgcgggattaatcccgcgggatcccgtaccgcaaaaaattttggattccgaacccgcagcgggatccgcaaatttgaaatttccggtctttaatcactactgactaaactaaaaactcattttttcaagttttggttttttatcacccatccggcacgagaagcggtcattatcggtgttgctccttcgctgtcccgagattggcgttggcgccactctccacgagaagggtgactgaaaatgggaaaaactgctgatgtagaaattattgcggatgattgcttcaccgattcctgtgagtcagcggcgtcaaggaggagtcggttcccaagtcaacgtcgtcaccgtgagcgacaacaaatgcacatctccaaatggagcaactgacagcaaaccacaagggcgtaacggctgcaaattgcgtgaaaatgcgtgaattaggaaaccgcagaatcggtccgcaaacgcattcttaccaaggttgacttggcgatagtgttctgatgcgggtc

SEQ ID NO: 29273 - DNA, 1282 bp, Heterodera glycines
cctcgctcaatgtgccaatcaatgccttcatcgcttggtgtccttttcataaatcgggtcaaacagtggctccacctgaaaagtgcaaccaaattattgtcaggatcttcggtcgaaatccatttctaagggttttcagggtggagaatccgattctgatatccagatcgaccaaattccgaaccccggacccgatttcgaacaaaaaaacgaaacttcaaattttcgagtttcgcatttttggttcaaacccggcatgaatgtaagtaagcaaactaaaagccatcaatgcttcaataaaaactttaaactatttattagaccaaaatgcgaaaattttgaattttcgactttttgtaagaaaccgggtcaggggttcagaatttggtagatagattttttgggcaaaatttgatttaatattttttgtcaaacttttgccgtttgaactcacttcttcgcgctccaattcaccgtccgatttcagtgcatccgcttcatattccttaattgttttacaatatcatttgaagcattgtcacggcactttttttttgaatttacaactttttcatttttgccagcgcccattggcaacaacattgacgtttttgggtgtaaaaccgttccaaatcaaattctagatggtgagccaccttttttgaagaatttttgttcaaaaagtcatgaaaatatgttatgggtggtttcgggttgtcgctgtcacaaatctgaaattcattttgatcaatttcgaatacgaacccgaaaatgtcagattcgtgatcagtttagtgacccagaaaaccgccccataaacatgttttcacgattagggatcaaatttcaatttttttttttgtgaattttaccgaccttccatgggatggtttgcacatgaattttgtagttggttttgctaccgccaggcatggacagaaggaaattcattggaaaagataggtaaataaatttgatttcaaatgactaaatttcggattttggggatgacatattagcaaaaattaagaaaattgaacaaaaaatggtggtactatgtactatccggcaatggcgtgtcccgacatttgctcttttgtccaaaatcggattcaaaactaagttttttcaatacctgatcgcctaaacaactttatataagtggtagaaagtgattgtgtctgataatttgatcgtcatgaatttagaaaaaaacatcattaaatcaaacaactggattaatggttcaaataactaaaaaacttttgcttccttaattttt

SEQ ID NO: 29274 - DNA, 1078 bp, Heterodera glycines
gcaaagaagatatatttttaattttgacatgagcatttggaaattttataagctttttttatgttttatgactctctttctaatttattttaaaatgttttttaatgtaaaatttttctgtttttgttcaatatttattctatatattttccttcatttttttttgcgtatcttccctttttttctttccaattccaattcataagacgttttcaatttaatgatctacatcattaaattatttatttatttttattttttttgctttttgtttattattatagctgcatttattttttattaaataaatattatttttttaaaagcttgcataaaaaatagcattcttggtattcaaattatacattttattgatatatgatactttaatattgtacttaatttttgactatgttttgtaaaattataaattttatttttttataatgcctgcggccactcggctctttcactcctaaaagcattctcttatttccaagaaaaactcctttgtcaaagatctatttatttgtaatttttattaaaatatttttacataaaataagaatgccttagctggaagacatttttttattttattatttaccattgtaattttgtccattcttagacaaactaaaattttaaaatatattcaattattagcataaaaacttcgataattttaattgttcttttttaagtttataaattacaagcaaataaatatttgattttatatataaataaaaattgtttttattaatcctttgatgtaattagattctttgttttgtttaaataaatgttcatttatatggaatgaattaaaaaattgttgaaagcaatatttattaccgaaaagtctcttataattttaataattttgtacaaaaaatcattcaactaattatgttgtttcaattgccaaagcttttcttcgataaagatattttttttaactttttttttgttttttttaaatacagctaagaatttatttttataataaatcaaaatatttatatgagttttaatagattcatttttatcttttattatttgataatgacaacta

SEQ ID NO: 29275 - DNA, 398 bp, Heterodera glycines
atttcgcctctagcacaattttgagcagtactttctcgacgccccgccccctcgcgcacccccgagacttgcgcagcaaaactgtgatggtaagaggaagttcatgccgttgaagaggaggtccgcggcgatggccagagggggtccgcggcgacggagagagggggtccgcggaagagagggggcccgatccgacggagagagggggtccacggcgatggtgagagggggtccgcggcaatggaaagagaggtccgcggaagaaagggggtccgcgccgacggacggcagaatggtggggggaggggtccgcggtaatggaaagagaggtccgcggaagatagggggcccgatccgacggagagagggggtccgcggcgatggtgagagggggtccg

SEQ ID NO: 29276 - DNA, 1092 bp, Heterodera glycines
  unsure (1)..(1092): unsure at all n locations
agtatagagtcgatagacaaatcatttttagaaaacctctttataggatacntaataatttgtgaatagagaaaagttttcttncctgtcatatccaatggttgagatctctagtatagagtccgatagacaaaatcattttttagaaaaccttctttatagggatacctaattaatttgtggaatagagaaaagttttcttccttgtcatatctaatggtttgatatctctagtatagagtccgatagacaaaatcatttttttagaaaaccttctttatagggatacctaattaatttgtggaatagagaaaagttttcttccttgtcatatccaatggtttgagatctctagtatagagtccgatagacaaaatcattttttagaaaaccttctttatagggatacctaattaatttgtggaatagagaaaagatttcttccttgtcatatccaatggtttgagatctctagtatagagtccgatagacaaaatcattttttagaaaaccttctttatagggatacctaattaatttgtggaatagagaaaagttttcttccttgtcatatctaatggtttgatatctctagtatagagtccgatagacaaaatcattttttagaaaaccttctttatagggatacctaattaatttgtggaatagagaaaagttttcttccttgtcatatccaatggtttgagatctctagtatagagtccgatagacaaaatcattttttagaaaaccttctttatagggatacctaattaatttgtggaatagagaaaagttttcttccttcaatggtttgagatctctagtatagagtccgatagacaaaatcattttttagaaaacctttatagggatacctaattaatttgtggaatagagaaaagttttcttccttgtcatatccaatggtttgagatctctagtatagagtccgatagacaaaatcattttttagaaaaccttctttatagggatacctaattaatttgtggaatagagaaaagttttcttccttgtcatatctaatggtttgatatctctagtatagagtccgatagacaaaatcatttt

SEQ ID NO: 29277 - DNA, 1869 bp, Heterodera glycines
  unsure (1)..(1869): unsure at all n locations
ttttttaggagttcaaaaagttaaatcgtcaaaattcgcacgtttttggaaaatttacacaattaatgaagcagaagcaaaagcgaagaaagaagcggaaaaactggccaaaaatcaagaagtaatagcgagaaaaggaggcgatagctccaatttgggctaggacgacaatgaaaaagatgatcatcattgtttgagacgcattgattgtattgtattgttgaaaaaataagtcgaaggatgccaaaatgtattcgcttcgtttgtcggcgatggtgntccttccnaattggttttggtcagtcgctttccccccccncccccctcccatcctacagcgtatttggcgtctccccctgcccttcccccgcccccatattccctccggcgactttgctgccctttagtcccttcggtgtctcattcaaaatgcgacgaccttcgtcctcctcccccttccccaactgtcgctgcttcctaattttgttttccgtctgctgctgttgctctttgttctgtcccttctccaatggcgagtacgtgttgagaatgtctctctctctgcttttgttttaactttcccttcctttttaaaaatgtttactgcacatactaccgggattccaacgagatcacttgcgggtgaatatcaataataattataataataatgactctgatttggatagcttttggatgagttttccgcttttaagtacggtgacttgtgagacgcattcgccgttcactcccgacaattccgagcttgacggtctcgacacgaaattgccgaggcaataattccaagtgtggttttttgaccaattttcttttcaggggatggtaccgtattgggacagtaagcattcaattgattttcaatttaattttatgtgtttcctactgtagctgtcaatcagacacgacagggcgtggttcaacctgtacaggcaatttgaaattcattagaattaattgtgagttttgtcatcgctttaggcgacgggccactggactcggctattgggacttttacacacagtaacccacctccacatttacagtatgtaacaaaatactcaatttaggattccggagcggaattgcatcgggtgggtcggcttaactggtcctctgtacttttccgcatagtcaattcggtttgcacgcgggtgaaaacattgccggatctgtggcagtgaaagacaaacgatgttttggtaagggattcaaatgtattgcatctggcgatacgttttttgcctttggcactgcctaaacactgatcgctatttcagatcgcctcgtcgtgcaaattgagcgcaaatcgaccaccgaaaaggcaaccgaccgcagcagcaaaagggaccaaacaagaatgtttaccatttcagttcgatgttctccaatgccgaaagtgtgtgttcaactcgtgttggcttggctcgcgcactttgcacgaccaacgcacttatctgaccaacctccgatcgtattgaccaaagaatatacggataacaaacaatgataacaactaaattattgacaattaaaatgtccaaaatgcattttgatcggatgaaaaaagactttccgcccgccgtttccctcctttttcccattccgtcctttgcttttttctttttcgtctgttgccggtgccattttccaatgcacaatttccgattgcatccgggtaataatcgccgttctccgcctccgctccctcctcctctccgtccattggttcttcgtcgaatttggccactttccttccgtttgatgttgctaaaactgtgttcgctctttccaaaattgcctcgaattggcgtcggccgtttgccaacccaacgatgtctcttcgtcctg

SEQ ID NO: 29278 - DNA, 957 bp, Heterodera glycines
  unsure (1)..(957): unsure at all n locations
atttcaatcactggggactcaacccaccagcatttcaatctcacccgactcaacccaccagcatttcaatcactagggactcaacccaccagcatttcaatcactgggactcaattctcctgcatttcaatcactggggactcaacccaacagcatttcaatcactgaggactcaacccaccagcatttcaatcactggcactcaattctcctgcatttcaatcactgggactcaattctcctgcatttcaatcactgggactcaattctcctgcatttcaatcactgggactcaacccaccagcattccaatcactgggactcaacccaccagcatttcaatcactgggactaaacccgccagcatttcaatcactgggactcaattctcctgcatttcaatcactgggactcaacccaacagcatttcaatcactgggactcaacccaccagcatttcaatcactgggactcaacccaacagcatttcaatcactgggactcaattctcctgcatttcaatcactgggactcaacccaccagcatttcaatcactgggactcaattctcctgcatttcaatcactgggactcaacccaacagcatttcaatcactgggactcaacccaccagcatttcaatcactggcactcaattctcctgcatttcaatcactgggactcaattctcctgcatttcaatcactgggactcaattctcctgcatttcaatcactgggactcaacccaccagcatttcaatcactgggactcaacccaccagcatttcaatcactgggactcaattctcctgcatttcaatcactgtgactcaacccaacagcatttcaatcactgtgactcaacccaccagcatttcaatcactggcactcaactctcctgcatttcaatcactgggactcacccaccagcattccaatcactgngactcaacc

SEQ ID NO: 29279 - DNA, 1327 bp, Heterodera glycines
  unsure (1)..(1327): unsure at all n locations
cgacaatttggcccggatttgtcccgnatcaccgactttcaaatttctacattcatttcccgacaaatttggcccgggttttgtccccgaatcacagactttctaaatttctagagctatccccgattttggtccccgaatcacagactttcaaatttctacattcatttcccgacaaatttggcccgggttttgtccccgaatcacagactttctaaatttctagagctatccccgattttggtccccgaatcacagactttcaaatttctacattcatttcccgacaaatttgcccggattttgtccccgaatcacagactttctaaatttctatagccatccccgatttttgtccccgatcaccaattttttaatttatacagccattccccgacaaaattaggtccgttatttttgtctagatccccgacatttttttttatccccgatgctcggggaggggcccaagtttaatttgtttgcaattaataactctaattggatcgtttgctgatcactctgtcattgatcattattgatcaggaattggtagaagaccacacttttcaaatgattgaattattgttttttcaactaccaaatcagccaaacaacagtaatttctgatcgctactgatcggaaaaaaaataaaattatttttaaatcagttataaatttttgacgacaaaataccttcgtcgtttgaagcttgctatgccaatttcgttgttgcgagcacaaattgacggtgcacaacccataaaaatgggcaaaatttaattggaaatttgggtaaattgttttttgaagcgaatgattggcactgatcagtccgagttgtttattcagtgccactgtagttggaaatgatcaaaatgggttggccatgtgaaaaaacttagattttgaattaaatgatggcctgatgctgttttttctaaattttatcgtaaatcggaaaaaaactgaaaaattgaacggtttagaattggggattttttatatttaaaaaccgaaattttaatgggaggcttagaattaaggatttttttatatttaaaaaatgacatttaacgggagataaagctaaaacttacaaaaaaattttataaatacctagcttatgcctaggacggctttggctgaacttatggtcgatttgaaaaccccaggtcccttaaaaaaattattttcacgacagaaaaattcaaaaaaaatttttaataaaattttatgagttttgacgggagttctgctgtcgctatagtcatattttgccgtcaattttcttaattttttatcgcgcgaaagcttttcattctt

SEQ ID NO: 29280 - DNA, 1930 bp, Heterodera glycines
aaaaaattgaaaatttaaattaaaaagaaaaattcaaattaccgccataattaaatcagcagtgagtaaactgacaaaatttgtgcccgaaatgacaacaaccaggaaaaaagtgtgcccaatttggtggaccaattcacaaagacaaatcaatgccatcagaaaattggcggagccgcggagggaactgaaaatttaaaatggaaaaatgaaatttaaatgggaaaatttaaaattaaattcagaaatgccatggcatttgcctggatttggcagtgaccaccaaaactgtgccgttcaacacaatgccaaccaacgcaaccaaatacagcgcaacggccggcacaatcaaatcgacggatggacccacagaacggtaggccaaataaagctgaaaaagtaaatttttattttcaaatacctaattataataaatttatgggatttttttattcacttaaatatttggttaatattttcattattattttttgttgttttaccgcattgtctgagctggtgttaattgaggacattttatggtcaaattttgtggcaatttgttaaattttagtgtgtttaaactgaagataattattccttttattacatttttgtccaattttctgtacttaaatttgccaattcgaatttgtcgtataaaacatcccacgtttaatgtgcggcgacataattttcccagcaaattcaaaactttcatttcataaattgtcttcaataaaaaataaaaaattccatgtacctaatgtcaatatcattccaaaattggcatcctatcgtactcattttactatactttttttaaatttcccatatttttttcaaggcttattttaggagcatgacttttggcgtaatattctcacgccgatgttttatttttgtcaatgcttctcattaatgtggcatgggaccggaaatttttgggcaaaacagggcccgggaatttcacaggacccgtgaatttccgggaccagaaagtccgtgaccgggacctcgattttcaaccggtatagccaaccgagaaatttctaagaaaaataaaataaaaaaaggaacagaaatcccagacgaggaaatttcggaaaaatttcatttcatggtgtataaaattgggataatttgttttattttcctgaaatccatttaattttagtgagatctgctaaaaaaaattcaaacgacttttttggggcatgctttttcaaaaaaagacctttgctgacagagttgtgccgaagcgccgccggagaaaacttgaaaattttggcatgctctggtaatagaatttgtatgaaaaatatcattattttgggtttttttttagtttaaacttgaaattttttaactaaaatgataattttgtgtgtttataagctaaaaaagtgaatgaaaaaaagcctgaaacgaagacagagaaaaagtgcaagtaatttagttcaattatgagaaataacttaaatacattttaaggccgagattttatagggaattttgtgctcctttaaatggacttaatcataatttatattaataatgctaagtatttttaatttaattattaataagcagaattttcaacattttatttagttattaaagaaataaacaaagaaaaacaaagtataaaaccataaaaaaatttggcacagataaatttattgaacatttttttaatttgttaaatttgaaaaaaaaaatctttgctcaatttattgtttggttatgtttttcggtacgtcgaaaccattttaaatgtccaaattacatattaatggacatttaaactgtcattaaaaacgaattacaatttttaggtctcaaaagaaaattcaatttaattgggaaacaatttaagccaaaacatgaagtaagagggcaatttctggatgtgaacaattgaagaaaa

SEQ ID NO: 29281 - DNA, 802 bp, Heterodera glycines
tcaatgatttatccagccttctctgatcagtgatttatccagccttctctgatcagtgatttactcaaccttctctgatcagtgatttatccagccttctctgatcagtgatttatccagccttctctgatcaatgatttatccagccttctctgatcagtgatttatccaaccttctctgatcagtgatttatccagctttaactgatcagtgatttatccagccttctctgatcagtgatttatccagctttaactgatcagtgatttatccagccttctctgatcagtggtttatctaaccttctctgatcagtgattatccagccttctctgatcagtgatttatccagctttaactgatcagtgatttatccagccttctctgatcagtggtttatccagccttctctgatcagtgatttatccagctttaactgatcagtgatttatccagccttctctgatcagtggtttatccagccttctcttatcagtgatttatccagccttctctgatcagtggtttatccagccttctctgatcagtgatttatccaaccttctctgatcactgatttatccagcctagttttttctaagtcgtttgcctgggtttaattcccctagcaattaattacttttcgcgatttaaaattacatgctgatcctcaaaccgtaaagagatccagctgatttgctctggctaatcattatgcggaaaaacagtttgatcactgatcagtgtgcattttaggccaatcaaattcagtcactgccaagccaattcttcataaattgt

SEQ ID NO: 29282 - DNA, 1728 bp, Heterodera glycines
caaaaaatgacaaaatttcactcttatgagcaaattttcaggcaaataagtatttttagtgtgcgccggcgccgataggcgtcgccaggaaatttttcaaaatttcagttccatttattaacaaattatcccaaaagtccttggaaatccctaaacaatggctaccataaccaggcagcacctcaaagaagccctgcggcgtttcaactcacgacaaattgtcatccgctccagcgcaaaattgtcccgtatcccccgtcagtgtccccccgcccgtccgaggggcatatgcgaatgaataaatgaatgaatccccctacaaacaattcaaaatgctccaaatttggtgatggatgggacgttgatgagggggggggggggagcaacccacaaaatctttgagtggatgaaacaaaacccacccaaatttagtcggggggagggggggggggggggcgggggtccttgaattggggatgatgggacgggagtggcggggcgggcggtacagttttctcgagattaatggactgttcccacgagagattggatgacgatgatgatgaagatggatggcatttttgagaggcattttcgccggggtcttccaagtgccaagataatgagagggcgcggggcgggggagagaaccgagaattaatgaaatttggaggccgcggaaaattggggtttgcaaatttggattcaaaaactgagactttttactgacgaaatatgtgacttccaggacccgtggtcagagatttttttaaaatttgattttagcccaatatttattgggtgactttttttatatatattttttcaatttattgaaatctgccatgaatttggtcaaaaattttggaaacataagttaaaaatgacaaaaaaaaattcccgtgtttcgttttcctttttaaatttcatgggggggggggggatattccttttcctgagtgtgaaaaaagccggataatgaaggctcctgcctaaaatttatatcattatgttcatcctgaaattaggtagttaattccctcggttcattaaaagcatttaaattgagcaaacgaaaaacctttcttttcttttttttttttgctataaaattaggtaattcatttacaatttgaataaatcaaattggcacatataaccgaaaatcgcacaaaaaaataaaaaataaatgcgcgcaaaacattcatggtttatgtataaagttgttgtatgttctctcgcatttgctcatcgtcagcatcaaaataaaatcaaataaaataaacgcaattgaaacattccgcaaaaagttggcaaaaaaaaaaaatggacgggcaaaacgacacacaaaaaataggtgaattgaatgaacatgaacaagtaaatgagtgatgaatgaatttggtaatggatggataaaaatcgtcgaaacaaaacacaataataatcaccaaagaccaacgggcggatgatttgaataatctccaaccttacatccaacatcaaagggaaaagccgcactccatttttaatgccaattttgcttatttttgaattacatacctaatctatggcatcactatcaatatatccgagattcggagacacggatatagaaagtatgcccaacaatttgggaggcaaaaattggggcattgtttgtgtttgcaacaaaatgccaatggcgaaaagagcaaggatcaaaaacaaagtgccgccataaatttt

SEQ ID NO: 29283 - DNA, 1366 bp, Heterodera glycines
  unsure (1)..(1366): unsure at all n locations
ttttattaatgctaataagattatcttctttttctatatttaattaaaatgatataccattgttttgggggaaacaaaattgnnttgatttatttgtcttttgaaaaaatgttttaaaagaaaagtatgttatggccaatgtcgcctcggtggctcagtcggtagagcgtcagtctcataatctgaaggtcgtgagttcgagcctcacccggggcaatgttttttttaaatgttttttgcgttaagaaataaatttattactaatttttaatgcttttttcaaatagctaaaaaaagctgaaatatcttaatttattatggatttgatttttttatatttgttctttttttctattgatgtatatttcttcttttaattgatattagaatacaggacgtctgaaacacaccttatgcttatattctgcaaattgctgagaataaaaattataacatttttatgaaatttttaactgcctaagattttaggcttttatttttagtgaaaatttaattccccataatttttcgctaattgattagaagcacaccaaatttcacagaggcatactaaaaggaagagaatccacctaatttaaaatatttcatcccatttcctgaaaataatcaacgcttattggttttaaaatttttttttaaattctgaatgaaaaaattaatgctaaagtggtaaatgtgaatcaatatgttcctcaaggccaggctttttcaaaatgccgagctctaattgatatgtatggtcgaagtttgatcggattaaatgaataaatacaaattaatcatttacttccaaaatattgcttacaattaaggcaaaggaaatatataaatttccctatttttacttttttttgtatatttattattttaaaattattattcatctattttatttcgctttcattttttttttatttctttttaaaattatgattagattaatcataaaattatttgtaaatttttcaattaaatataaaaaaataaaagaaaagccagcttagttattcctatattttcatgtctactattaaattcaagtaaaaaagaaatcttaaaacatgtatgataacgcctcggtggctcagtcggtagagcgtcagtctcataatctgaaggtcgtgagttcgagcctcacccggggcaaagccttttttctccttttacttttttggtgcttaaatttcctgctttggaaataatactttttcactgaatttataaaaaaaaaaatatatttttacaatttttgaatttaacaatcataattactaaaatttaatttgaagaaattgttaaaaataattttgtaaatattttatttatttaattaatacctatttcc

SEQ ID NO: 29284 - DNA, 1786 bp, Heterodera glycines
atttaatccacaaaatttttaaaatcatgaaagtaaacacttatattagcaccaggtttttagtttaattgcataaaatacttcttaattggtgctaaaaaataaattaattggtcatattagttttattttgtaatattttggttaacaaaggaaatgaaaaatagttacaaaagaagttgcttctacttttttttagcgtaatgttgcgctcgttaacagcatacaacacactgccattgttcttcattctaattttactcaaacggcaatttttttaaatttaatttttattttaaacatttaaaaaaattttttcaggattataacaatatcaccagtgataaatataaacaaatttgggaattggttgatgatccaattgtgatttggcatgatggggatgagcatttcaacagcatttgtttggtaaaaagatcaaaatgccaaatgcaaccaaaaaacacttatttttgaatttatttaatctttttctttcttacttgaatatgataaatttttaattatgaaatatagccttaaataaacaattaaaatacactaaaaaaatatattttcaaaaaaagcaaaaataaattaaaattgtttatgaaaaaaaatcaacaattcatttttcaaatttttggctttctgagcattataaatatgtatttatttttgttttaacatttttaaaacgcatatttcagaagaagaagatgaagagctcgttttggaattttaaatgaaacaatttgacaaatgatttctcacatttattttacatatgtaaatttatttatttatattatgtatttattgcaaagagtataacaaattttaaaaattccatgagaattttttgatctttcaaccatggttaagcccgacccatcggggaagaaattctcgtggagcgcgggggaagccaggtcggggattgactgggatggagcagaaaacccgattgggcaatgcgtagaagaaaattagatcacaaaaatgccaatttttcgtttttgggatccgttgaattttttaatttttttcaaataaaatcgagaatttattatcaaaaaaaaattaattgtttttttgccaggaaaacttgaaaaattctcattttcaaaaaaaaattgaggtgttttagaaaaaaaaaattgattaaaaagtatgttgaaatttctctattttttattttacacagtgtaaagcgcagatttgttaaacagagtttgtaccaaaaatggtcaaattttaaaaataatattgggttaaatttttctaaattttatagggagtgatattgtaataaaaaagatggtaaactcattaagaagaaagttatttttatttaattttttttgacaacttaataatgataaaatttggacttcaacaaaaaatctttaaaataatgcattaacacacaccgctatgagaacaaaatgaagctgagtaaagaagaaaatgaattcaagaaacaatcaactaggccaaaggagagataaataattatattttataataaatattaaattacttttttaaatttttcttatccccaatttgggtcaatatttacccagacccccccccccattcttaccagtatacttcaagaccggaggttagacccggacctgccagatcgggtacagggcattggattctcaaaaattcgggtccaggtccggagcttggaaatgtttgacttaacaatatcaaaaaaaaaaaatgcagctatggtcttgcgtctcaactcgagaacagtcttaggtttagg

SEQ ID NO: 29285 - DNA, 1773 bp, Heterodera glycines
  unsure (1)..(1773): unsure at all n locations
ggggaattttgagaattttgcccatatttttgcagattaaacgttnaancncaggcttcttatgaaaattttcaaaatcagcatttttgtggcgcacttttttaaatttagtcatttttggacaaattttcttaacaaatcgtattaaaaattgcaaatttttcccggcggcacctatcgacaccgccggttgcctgccccccccccctgttcaccaaaattctttataaatattaaagagcatttttctgttaataaaaacggtttattgcttttttggaaaaaaataaataaaatcaaaaaaaaaaaccgaaaaaccgtaaatttttcttcggttttttcggttttttaaccgaaaccgaccttcttgtccggtctctagttttaagcgatcattaaaagtaaccgttatcagaaaaaaaagttttcaacggctctccattcgaatccttattttttaaaaaagcataaatttctaaaaaaaataataatgccatagttggacagagaatatttgttattcagtatttacaaatatacattaataacatatatggtatgtacaaatcacaacaaaattcacacaaaatcgtatggcattttaacttcgttttgctcatttttctcctccgtccgtccgttcctttctttttccgtcgccgtccgtcacttacagcagcagcagttattgcatttgaccaaacaaatcacgaggcgaacaaccaggcaaaaggcgagcagcaacaccaggacaaggaaccacgatttcattctgaggcaacaatctgaaaaatggagaggggatggcattcgaaaatggcacttttcatttcaaaatggcacttttccattcaaaatggcacttttcatttcaaaatggcacttttccattcaaaatggcacttttcatttcaaaatggcacttttccattcgaaaatggcacatttccatttacgatccaatttttttgaaaaaaacgaatcctgaaaaattcaaattttcttctttttgtccgagttcgggtagttgaaatgggcctaaataaatgccatattcatgttcaacggcacaaagaagccgaaaagtgccacaaaacatttgtcatgtgccaatttcgtgtgccgacctgcgccattgtcgccacagcactcgaaataatgcgcaacggatggttcaccgcctgaaaaagcaaaagaaaatgcagaatttggtagatgaatttgtgtgggaatctcacagattttggcgacatcggaggagacacaaggagaagaaggaggcgccaaataaaaagacgaacatccgggcaaaaatgggacgaataggaaaaggacgacgaacagcgaaaaaggcatcggagaggacggcattttggaagaggtcacggcaaacaaattaatttcctggaaatttggggaatttatttgaaaatggcaatgtttaattttctcagaacagcaattctttttcaacttcttaattgatcctcttttcgtgtttttttgatctccaattctcctccctccctaattttgtttttctcatttaccgatcactaaaattgacattttgtgaagattcttatcgcctttccgtccgtcaatttatcttaattattattcattttagaaacttttctccgtttctaatttaatttttgaatggcagctgcctcatcgtccgcatacccaatgcttttcttcacgcaaaaattggccggagacggtgagttatgngcacataatacaanaaatatttgtagccagttgatt

SEQ ID NO: 29286 - DNA, 1921 bp, Heterodera glycines
  unsure (1)..(1921): unsure at all n locations
cagcgcaatggattgcgtcaaaatgggcaaattccgtccacctaaatgccattcccttgcggcgcataaatttggcatggccccccgggggaaggcggacgagtcgctccaccgcaaaagcgccttcctcaatcgcgggcaccgggcggtccatgaacagcgccaagactttcttggcacgtgccatcgtttccggcctcgagacgaccttttttaaacaataattatttatcaaccattttgattaattgatacccaattaagtaatcatttccaagctcaaaaaatgaagaattccgctaaaaaactatttataattttaaaaataatttaaaaataaacgtttaaaaaatgttttcttttcaaattttttaaattattttcttttaaaattaaatctcttaagtgaatttgtgtctctattaccatctgcttcatatgtcggcataatgtgcataaatcatatcataattatatcataaatatatggcattttgaattgaaaaagaccaaaattgataggccatgcgcatttatatgaatattatatcatatgtggccataatatgtaagatatgatattatgagatgtcatatctcaattaaacgtacaatatgacgtgtcttatctgctactgggatataatccgaattgaaatcatttcaaagccatttcgagtgacatttattaaaattatttttttaaaaatattattattaaatcattaaatctttgcctatttgtgtccttatttttaaatattaaatcccgaattctgtctgtttgttgtttgttttttacttggcttatcgttttgagcagacgcacgtcgtcaacattgaatttgttaattactggtgcgatgttcaatttgagcagcaaatgcgcagtgtgtgactaaatttgtgttcgcttgtgcaaatggcacccttttttgacttgttccgcatagaccggcatcacaatgagcggaacgccggcacagattccctcgcgaacgctaattaaacgacaattaatacaataatttgagtaaattactgtcgaagaaattcggcaccttttgttgcccccgtgggtgacaaaggcacgaacattgggatgggcgaggatttcaagttgaggggcccatttgagcacaagcacagagttggtcaggctgaaggcacgggattggatttcgcaacaaatgaggaaagagaaagacgggaattcgggaatggcatttttaatcgaataattttcaaattggtccgctgatcaactttcgataagtattggtttttccatctaaaccctttaagccgttctcccttttttaagctcactcttccggcagtttgcattcgttgcacacaaaaatgaaacgatattggggcagttttcgaaaaacggtgacaaaatcgtccaaaaatttccgtggcgcaaatttccaatcgatgtgagaaccgaaggcgatataaattgtgcttaaaaataaagcataaatgaattaattggatattatttttaatatcttttgagctcgggtcctccaaaaactgtttgattttggcggaaagggcggaagaatcttttggcgttttgcaatgggcgccgactccgaaaatgtcagcagcagctgaaccaacgaatacaatttaattttgtatttgtacaaaaagcataagcgtaattaatgctttgaaaattaatcaaattattgttcttttatgatttaaattaattttgctaattgattatcctctaataattatcattcatttcaattttcctcctcctcacttgtcaccggcaacccgagcctgtcgatgctgtcgtgcaagaacaattggctacgcgaataaaattcggtgaagctgaaattcggcactccgaatttggcaatgtttggcatcaanaaagtgaagggctgaaagt

SEQ ID NO: 29287 - DNA, 1298 bp, Heterodera glycines
tgtgggggagacggcggagacggttcagaaacaacagcagcagcagaagaaaaaagatggaaattctgcgaacaaattgaacaatgtctatttccagaaacaacagcagcagcagaagaaaaaagatggaaattctgcgaacaaattgaacaatgtccatttcaattttagtgtctgcaagagcattgggtgagcaacaaaaccatagaaaatgaacctgacgggggggggggggggaggttattggggaaaatcataaaatgcagtgatcaagatgcgaattttttttttacgaaattgagaaaaaaaattttaccaacagattcgtcaattaagaaatttcattgcctttttaggcctctttctccaccggcggaagcagcaaaagaagcgagtcaaagcagcgaaaagggcgtctaattatgtggaaatgaatttttggcatttggaaaatgtgagaattgaccgatcatttttgagttaggtattatgctaaattgtgttgattatatatataattctgtattgcgttttttgcgtccgaatgttttttttgttaaaaaaattatttgcttatcaatttatagaaattgcttatgaaaaggggacggattcgtacttaaatggcaagcacgtatttggaaaagcggtcctaatgtgggaaaatgtgaaatccgtaccctcacacctgcttaccctaaaagcatgaaaaagtgagccgtaaaaaatgcacatgcagcgaaatgaggaaaatgatcagcggaaacaaaaaattagaaaaaaaatctattccagtgaaaaatacgggaacaggacaaaatttcgtcgttgaacatcttggcgtcactgttaatgaatttggtacttgtacagtttggaacacatttaataataaaaacaagtttccagaggtattcgggatcgcaaatgacgaatatggcatcctttcgaccaatttcgaaccccggacccgaattcgaacaagtcgagcatgcatttttcaccaaagttcaacccttgaccatttagggtgacagcttttcctttttttttttgaaaataatttaaattgcgttgagttttcaaccctctttctccaccgggagcagcaggaaaagaagcgagtcaaagcagcgaaaatgacgtctaattatgtggaaatgaatttttttgcaattgagacaaatgtgagaattgaccgatcatttttgagttaggtatatgctgaattatgttgatctatatagtagagtgcagcggaaccgggaatttttggcaaaaccgggacttgccgggac

SEQ ID NO: 29288 - DNA, 1149 bp, Heterodera glycines
  unsure (1)..(1149): unsure at all n locations
ctcgataagggaaaaagagaggcggtaccccccccccccncccaagacccccgcagtaccccagagagaaaaaggaatgccaaatttaaattaacgccaaattatcataacgaaagcaacatattaattttaaattccaacgccaaattacaaagaaacattttctctgtcttcaatttcttcatttcctttcttttcaattccaaaatcaatcctcctgttcttcttcgcaaacacccctattttcccagtgtcgctggtatgagcaaaaaaaaaaaaggtcgttcgggcgaaagtttttcaaaaatacacccctaataattgacttttcggatcggtaccccccccaagcccaaatcctggatacgtccctgtaaatgtctgattgtgaccagcgactctgaaaacacacataagcattttttaaagattttttacggaccaacctgatttgtattactttgtcacgcacacattcttgacaattgagagtttaataaaaaaaataatttccaaaattcttacagctaatccgatttcaggaaattgcgaaatttacactaaaaacaaaatttaatttaatcattgcaacagaagaatatttggtacttcgggttatgtcgccccccctcaaaaaaattccaaaattcgtaatttggggtttccaacttcgctgatcacgaatatgatatttattttaacatctgatgacttttaatcatagatttgacaagtatctatgattttatataatgatttagaattcaagtaactcatgaaatgactcaaactggtagatagtagttgatcttggatattacataaatttaaaaatactctgtgaaattagatggggattgcacaccgcccttgctctcactctccagtgatttggcaacgtataaaatttctcatgataagagatattcatttttctcggatataagatagcattaaaaaattctctgagaacttaaatgctcgaatgccaactaacctccgtctcacgctcgagcgcttttgtaacacataaaatttctcataagaagagatagacatttttcttgcatataacataaattaaaaaatgctctgtgaaattaaatgtgcgattgctcgccgcacttcctatcaaggtcgagagcattt

SEQ ID NO: 29289 - DNA, 1172 bp, Heterodera glycines
ttttataaatttttcaaaccattaaaattctccccggatatctttttcaatgtatttgttatataaaaacatgatttttatgaaatctaagcatgattgcggcgctttttccaaaaaactttagggggaaagggggctggcggtgccgataggcacgcaccggaaaatttttttgtaatttttaatacgattcgttaacagatttgtccaaaaaaatggcaaaattttgcgattttgagcatttttagggtgcgaaaattaagaattttgaccattagcatattttcattgaaaatattcttaattttgagaattttcggaaaaaattgactattttctggtttttatgaaaaacaaatttttttggaaaatttgaatgtgattttcgttttgatgctctattaaaaacacaaattatcggtctacgtcagttcggcccccacggttcggccccagcatgtttttccaatataactttctataacttttttatttgtcaaccaaatccaatgttgttggtatctttcgaaagcttaatatgtttagaggctttatctaagctattgcttagcgattagacaattaccaaattagttataacatgaaactgcaaaaaagtcaaaaattcaagttttttctcaataattttttttccaggcttgaaaatctttttattttttgttaggctaatagagcatgatacgaactttcgaatgataccaagattgtttgatttggatgccaaataaaaaagctatcgtggaaaaacgaggtggtgccgaaccgtggggccgaactgagggttccgcaaattattaaatgattctcatacattatgccaatttatcgattaatcataaatttaacagattacgacgattttcctcaaaagcctcaaaaaacctcaaagcctcattttgtaaatttagcctcattgacctatcaaaaaaccacaaaatgaaatataagattttaggcaatggtcattttggacaaaaactgttaattgtattaaaaattacaaaatccggacgcccctgtcatcccaaagcctaagatagatatttccaaaaaatcaattgttgcataaaattttttggacgccgtatatcgaaaacctgaaaatgtgtaggaaaaatatggatttttcacgaaaatttacaaaatttttc

SEQ ID NO: 29290 - DNA, 801 bp, Heterodera glycines
gaagggaagagggaaaacggaagggaaaaacgtgagaacgggagaaccggaccgacaacccagtgaccgtcccatgccatcgccatttcgtcacaccggccgtgcttttcatcgtttgaatcgtacgccgactcatcacccgtatgcgaaccccgtcgaccgacaccagccccagccttttcggatgccgaatcagcaaggcccgagctgccgacagttccagcgctgaagacatcgcttgtcggagggcgaggatgtcgtaattaataatgacctcattttatttttgattttattatatttttggcatttgttttaatgtttgtgatttcgttttttgttttccttttttttcctcagactttaatttggaattgcctgacataaaataataaggctttattctgtgtgctttaattgtgtgtaagcgctgaactgttcgacgtactgctgagtaaaattaaattatttgtacgacgcaaaacaataacaaaacgccacattcaaacccagtcacagacatatatatacttatctttattatataggattatttgttctttttttgcattttttaaaattgttttcatttaaatattaataaatcattcttcctaatcgcaatctcaattaaggatttattcttattattttttaaattgataatcataatatgcaaaaattatgatcacataatcatggacataatcccgcaatgacaatgtttattatcccaaagttaattttttacattgtgttaaaaatgatatttttattataaaatttttaaaattcttaaga

SEQ ID NO: 29291 - DNA, 1631 bp, Heterodera glycines
  unsure (1)..(1631): unsure at all n locations
gaagcagtgatcaaagatttaaaatgtgaaaatcattggcattctgtccttatgagggaggagcaataaaaaattcccgaggcaacaatttttatttcacttacaattattttcaagaaataacaccagaggcaattataaaatggaattcagagacccctcaaaagtcccgcaagtcgtaaatcggaattccgaggccctaaaaaaattcggcggagtcggaagtcggaattccgggcccctaaaaaatttcgaaagttgggacttgaaattccgaggccctaaaaaattcggcgagtcggaagtcggaactccgggcccctaaaaaatttcgaaagttgggacttgaaattccgaggccctaaaaaattcggcgagtcggaagtcggaactccgggcccctaaaaaatttcgaaagttgggacttgaaattccgaggccctaaaaaatttggaggaagtcggaagtcggaactccgggcccctaaaaaatttcgaaagctcgaaactcggaattccgtcccatcccctggtggcgggtgaccttttgttggcacgaattttcgtgatgtttagaaaattccaaaattgggaaattgcacccctaaagaactgaaaagtttttcaaatttttgaaaaaaaaacttctcaaaagacgaaagcatttttaaaaataatatatttttgaaatttatgccaaaaatttaattggaagattttaaaacattaaatatccaaataacacaacatttaccgccccgccgatctgtgatcgaaaagatggcaattttcattgacaaaaaattgttggtgaaaaccatttgtaaaatggcggcgccggaagtttaatttttccgcacgcattttaaaatttaatttcattaattaaatttctgccaaaaaaaaaaattactgcgcggcgaattcttttgaattaaataattgtttttgtttttggaccattctttttttgccgagacttttctgatcatcggaccgacaaataagaattaaaagttttgaaccctacgcaaaaaaaatggaaagaaaaataaataaattaattgtgtgtgtgacatgcggtgcctttcccccncccccgggggcagaaaaatgttacaaaaattttaataaattttaccaccgtatgggcgcgcatggaccgaccgtcgtgttcaccgctaatatcaccccctctttaccttttccttcctttgtgttttattaattttcgtttccgtcgtcgccgcagggggcaattttaaagaggcgcctttttcttgctctctctctctatctcctctctctctcttctgtgttttctctctcgctctctctttctctcttatttatcccctctctctttctttctctatttctctctcttcactctctctcactcactcttatttatttatttatttttctcttttttcttcctccatctctctctttcccctctctttctctctctctctctctcactctcgctctctcccccccccctctctctgatcactagaaaaaagtgatcagcagccgtagatagagagagactgataactgctgctggatggtttgcaaaggtcgcgcggctggcggcgttttgtttctttggcctctccccccccc

SEQ ID NO: 29292 - DNA, 1967 bp, Heterodera glycines
  unsure (1)..(1967): unsure at all n locations
gcctgcannggtcatttgaaatttaaaannttgttaccatcgaaaatctgggcctaccctcgataaaataaatttaaatggggacagggaatatccaaaagtttaacaattatgttgtagtgatttttggccggtacaacaattttaatttttttttatcaactaaaaacattttgagagtaatggggggggggcggacaaattcgagagcgatgggctcggaggtaaattgagaattgaatatgtgtgtgtagtggaaaggggcgatttttatatgaaaattctttgggtggagggtagacactgcagggaatggggcgggataaagaggggagagaagctagaaaatggaagtagtgtagaaggaagagaaaaagagatcggaaaagagtggagagagagagaagacagagagaggagagagtgggagaaagagaaacaaagaattgagacagagggaaagcaaaatagaaaagaaaatgtcattttgagagagtactgaaacagagacgaatgaaagagagagagagagagaatgagagagtgtgttgaatgaagcgaaaaaagaggcagagaaaagagagaaaagacgaaagacaacgggcgccagacaaacagacgactcacaaaaacaaaacagctgtgtacgtacataaatgctgaagagagtgagaagaagaggggggggggggggagacacattgtccaatttgaatggggacgaagggtcaatttttacgacaaaaggcaatttatgcgtggtgtaattgtcccctccggtgctgtgctgccgctgtgagcaaagagcagcagagggaaattttcccttcggggaaaaatttcaatttaaaagattgatggatcaccaaataacaacgcgactaaaaagaagaggggtgatcagagagagagagagagagaagaattcagaaaaatgtgtgttttgatcaattaaaccctcctgatcagttggaggaattgcttgattgattggttgatgagtcgaactctgatcagcaacatggggtgatcaaaatggaattttttcagagataaaagttgaaagttacactgatccggctggccccaggcaaattacgaatgattaaagctctctgatcagtttgcaaatgagtgaatgaacgaaaaaaattgacgtatcttaacattggtgatcagaatgggaagcgttggttaaactgttcaacaaaaaaatcccgatcaatctctcctgatcacgatcgatcaaatcccgattaatttctcctgataatgatcgatcaatctcctgtgtttattttggcttgtgtccaattaaaaaagaaaaaaatgctattgtccataagcagcagcagttgcttctgctggagggaatatttatggacaacactccaaaggttcgttgtcgtcggctgtcagatgatctgccagacgacggacggaatgttgtgtgaaaaatgggccggcggcgaacgcttttcacaaaggaggccccgagggggaggaggacaaaacacatccatccatccaaaaccattcattttcattttcaattttattcttttcgacgacgattttattgggttgtaaaatgtttcaaatccgtcggcgaaggcccgacgaaaagaaaaaacgaaacgaattgatcaagtcaatcattgggcactttggccaggcactgcgattgatcagtcatttgggggtcggctgtcagatcgtgtttcgtccccactcccctcattaagatgctttagtgatcattgaaattaagctctcgatcagccccgaatgaggtggatgctagcggccagcagtgcctagtgtttgttgatcagtgcttcctctccccgggagggtggggggggggaaggatcgctggcgctgcccgatcattttctatgagtgatctctgctcttttgttggtcatggtactgctactgttactggttgtacacactgtcgtgtc

SEQ ID NO: 29293 - DNA, 1381 bp, Heterodera glycines
  unsure (1)..(1381): unsure at all n locations
gaagagaatggtgacaaattatttatgagggatttttatttatttatcgcatttttttttttgctgacccttcccnagttgataagaaattaaggtaaattaatatgaattaccgcttgttgactcatgaaggacgtaggaagatttttgtcggcaaaaaatattaaatgataaatacgatgagattaatgatagatgctttcaaatttgaaagataaagtggaatagagatcgaatatgacaattatggcacacaaaaaatttcataaatgagagagactacggcataattcaattttatgccagagaatgtgggcccttgaatcgaaccctcctatattaccgaccccatatgagcagaaacacagtaaattgcatgctaacattgacataatttacatactgtaagcctgggttgccatcccaactccgttttttttctcatcccgagatgcaacccaaaaatttggttatcacgatcagaatcctaagccgacttttttcgttccatggcaaccctgctgtaaaaaatttgaatcacaccaagagccatcaaatatttaattcatttttttaatggcttcataacttataagcggtccaacaccgctcaaaaaagcaaagataaaaaacccattggaaatcacagcatacatgcacaaggggtgtctcgaccgcaaaaaaaaacgttttttttttgaaaaaagtcgtagacttgccaaaaaatcgcaaaatttggcagtttttggtgaaaatctgttaacttatgtgttttaacaataccttaacagtaattgatcagatgcgataaaactgtatttgttcaagaaattaactagcgctaatttttattgattgatcaaaatatgctaactgatcctggataagaaaattgatctgatcagaaaatgccagctgattagaccaatatggcaaacatagtgattgggggataggcaatgacaaagaatctaatacaagagtaaactgatcgggggagtaatgttaagtgattcgaatatatgcaaatgtgatcgggcaaagaaaattgtttgtgtgtgccgttctacactaatgcattttcccctccggcacttttgcagttgccacagttggtcggcaccagcagcacactgacgctgaaatgtgtcgcggacggcgatggtagcggtactgaagcgacgcctccggtgacaggcgacgacaaattcacgtggtacaaggacaaccaagaaatgtcgacattgacaacagagcaacggatcaaagtcggtcttcatttgtactatacagcgcattgatcaaaaatgcaatatatcgattttatcaatatattgatcgatcgggcgctggcatttttgcacggatgatcaaatatgga

SEQ ID NO: 29294 - DNA, 1786 bp, Heterodera glycines
aagaagcagttggacacattcatttctcagatcatttcttttagattgggctcatatttcacttccgctttttacccaaaataatgtttaaaaatttttatttttttattaaaattaaatatttatttttgaggtcaattaagaaaacaacgcgtgcaaacgattaattataacggggcgtggcggagcgggaggggggcttaatggtgaccgatcagtcccgagggaattagtggccattagcagccgtgaacagcttttagcttttatgcttctgctggcagagtcttctgtctgtgcttcccctcgtttctctgccgttgtgcccggggggcgtcaaaccccgcggccaacagacagtcgacggtcggtctcttcttggcagccgctttgccttcattttgtttgccggttctaatgaattattgaagagttatgaatgtgtgtggagagaaagagagagagaaagggaacgagcggagagagaaacatttgaaagtggaaagcaaagaaaaacagtgccgagagagagtggaaagcaaattttttatatttaaaaatactttttttagaaaaacagtgccgagagagagtagaaagcaaagaaaaacagtgccgagagagagtgcaaagcagagaaaaatagtatcgagagagagtagaaagcaaagtaaaactgtgccgagagagagtgcgctttactgaaaagaaacaaaacatatttagggcaaagaaaagaaaaagccaaactttgccaacagcggcaaagagattatgctgacatgacgagagtgaggtaggacataagcgttgaaagttgggttttccgagggggagagattgtttttgagaaagatggatgggatggacgacgttacgccggcacggcgaaaatgaatgggtggggggagggggcgggaatctttggaaaattgtccccacctcagctcatccagacggaccagcagcagaggccattaatgattgatgaggtgggccaaacgccgagccgccgtcgttgaaaggcacgcttattaaaagttaacgtagccaccacaaaatgtacaaaaataaatatgaaaagtgaaaaagtgtttaaaaaaacatttgaattaattgcttagtaattaattaaaaactccttgtcacctgacaggcgaaaatttaaatttacaaatcggaacaactaattagatgtacaaaatatggaagccagcttacaaattagagctgaaattgataaaaaaacaaaaacaaatgttgtgattaaaaaagagatggaatgttattaattatttattctcattttaatccgttagttttttaaatacaattcaaattgaggatgaaccagacagaatattaacagcacaaacagagcagcaacaggtcagaacacctgcgtggtggtgcactttctcacttaatgcattaatattaaaacattattttatttaaatattttattttgaaatttaattgaaaataatcgaattttcaaaatgcagacatttagttcttcttgagattaattagcaaaaagcgggaaaatcaagcagtgcatagatgcggttttttttcttgctgcttttgaagtccaattcttttcgcttggcgttgcgtatgaaactttttcatcatttatacttttggtcggcaaaaaaaacagaaacacatttctccaagaatattcgttcaatcccttcatattcgtccacaataaaagttttgctgactaatggcccttcccgccccccgggggccattcattcttccaccccccccc

SEQ ID NO: 29295 - DNA, 1043 bp, Heterodera glycines
  unsure (1)..(1043): unsure at all n locations
cggtccctgaccgtggacattttgattatgccggtcttgaccgtggacattttgattatgccggtncctgaccgtggacatttttgattatgccggtcttgaccgtggacatttttgattatgccggtccctgaccgtggacatttttgattatgccggtccctgaccgtggacatttttgattatgccggtcttgaccgtggacatttttgattatgccggtccctgaccgtggacatttttgattatgccggtccctgaccgtggacatttttgattatgccggtccctgaccgtggacatttttgattatgccggtccctgaccgtggacatttttgattatgccggtccctgaccgtggacatttttgattatgccggtcttgaccgtggacatttttgattatgccggtcttgaccgtggacatttttgattatgccggtccctgaccgtggacatttttgattatgccggtcttgaccgtggacatttttgattatgccggtcttgaccgtggacatttttgattatgccggtccctgaccgtggacatttttgattatgccggtccctgaccgtggacatttttgattatgccggtccctgaccgtggacatttttgattatgccggtccctgaccgtggacatttttgattatgccggtcttgaccgtggacatttttgattatgccggtccctgaccgtggacatttttgattatgccggtccctgaccgtggacatttttgattatgccggtcctgaccgtggacatttttgattatgccggtcttgaccgtggacatttttgattatgccggtcttgaccgtggacatttttgattatgccggtccctgaccgtggacatttttgattatgccggtcttgaccgtggacatttttgattatgccggtcctttgaccgtggacatttttgattatgccggtccctgaccgtggacatttttgattatgccggtccctgaccggggacattttttgattatgccggtccctgaccgtggacatttttgattatg

SEQ ID NO: 29296 - DNA, 1258 bp, Heterodera glycines
tttcctggacattactggccacgaatgaatggtatcaacttttttgtgggtggtagactatagtacaaccaatagattttatgttatttacatgagcatcttaaaatgatatatcaaaatttaaataaagtaatattttgtatgaaattaaataacgagcaagttaattttgatcaaaaataataataataaattccaaaatgagtattaactttaacctttataaaaaattaccaatttcaacaaaattaaaaaatttgcaaacggaacttattatctaaatttaaacctaaattaaaattgaaaattaaaaaacattaatatagtatttttaattaatatccaataattagagtaagaatttatagatataattgattttttcaatacaggatatagcttaaattttaagaaaaaatcaatctctaaataggataaaacttttttgaaactttaaatatttgacgaagggcaataaaattaattaagacatttaaatatgaaacttttaacttaataaataaacttgtaacaaatacatataagaaatatttacaattaactagctttttggtccgaggggataaaaattaataacgctcaatcagtttttgaactgtctaaaaacttgaaaagtgtagagaaaggggtaactcttaagttttctaactgccaaacttgcaagaaaagtatggaagatgtcataacaaattataattcttactttaattaaaaattgcattaattttaaaattcatcatttaaaaaatattttgcaaaaataaatgtatttttaataaaaagcatagaaattattgcaccaaaaattgttgctacaattttctcggaacttatgtaattgtctcgcagctatacattattcaaagtgcttgatgaaataatggtaaataactaaaaacaattttaactatctatatgataaattcaatgagactttacaaactatattcttttaaacatttctcaagtaatgaataatttaaaaatctaaaaacaattttaaatgctaaaattataaaaacattcattatatatatataatatatactctacagacaaaaagataaaaatacctctataaaagaaggtaaagaccaaaattcaaaaaactagagtaattttattaaaagatttcaattcttaaatcaaaaagaattaaaaaatttaatgacaaaaccaaaaattttagcaaaataaatctaaattatatgctgcatgagaaacttccaatgataaa

SEQ ID NO: 29297 - DNA, 531 bp, Heterodera glycines
ccgacatttggcgacccccctcttagggaacccgacatttggggacccgacttttggggacccgacacttagggaacccgacatttggggatcccgacatttggggacccgacttttggggacccgacacttagggaacccgacttttggggacccgacatttgagcaaaaggcacttagggaaaccaccgacatttggggacccgacttttggggatcccgacatttggggacccgacttttggggacccgacactttggggacccgacatttggggacccgacacttagggaacccgacatttggggacccaacttttggggacccgacacttagggaacccgacatttggggatcccgacatttggggacccgacttttggggacccgacacttagggaacccgacatttggggacccgacttttggggacccgacacttagggaacccgacatttggggacccgacacttagggaacccgacttttggggacccgacacttagggaacccgacttttggggacccga

SEQ ID NO: 29298 - DNA, 1382 bp, Heterodera glycines
  unsure (1)..(1382): unsure at all n locations
aagagattagcaaaaaacattctctcttggaagtagttttttacccacaaaattctgaggtaaatttcaaaaattgtaattntaaagcattaaaaaattaatttttaaaatttttttaataggaatacatttgttcggatgaaaccgaatacaactttgtcaaaaatgcttggattgaaattaatcaaaacgatccggcactgagccaattgttagaggcattatttgctacggtcatttcggcaaataaagctttggaatacggtaaaaaataattcgcaggccgaaatttcggaaattttcagacgatgctaacaaaatatctgcgcagcttaatgaactcaaacagagtttggcatatgccgtgtttttcatggcaaagcgtggccaaattccactggaaagcccacgagaggagaaggaaagggagccaaaagaaattttaattggcctaattgacatttataatgagtgtcaattggacgctgataaggtgctaaaaagttgtggagaatgtgggaaaaaaggaaaagaagaaaaatggcaaaaaggaaaagaaaaatatggcaaaaaagaacgacgctttcttgaatttgttgcgcattcattggaaatgaaatgggacgcaaatgcattttcagcaggtggtcagcagcagcaggacgacgatgatggtaattattagggagtccaattatatgcacatgcatatttttttcctggactgtgggaggcctgaaacgcacgaaaaacatgtttttagcttgatttgaagcttctaagatgactttccatatgcatattttgcatatttgtgcatatttcgcgatttatgtgcatatttccatatttgtccatattttggcatttaactccatattttatgtccatattttggcatttttccaaaaaacctctaatagaacggcccccaaaagacaaattggactttttgacctcaaaaaccggaaaattttccaaaaaaataattttttgcaaaattttcacgaaaaatattgaataaataaattttctcaaaaaatggttaatttatgacaaaaataagcaaaaaaagcaaaatttcgctttttgggttgatttttcgcaaaaaatgagtaaattttgttttatcatgtttttttctcctaaaatgctttttaataccacatttagccatttttgaagattttactttatgtttaacaaatttgaagaaatttttgaaaaattacaccctcaatttggaaaatttatgtgcatatttttcactttttatgtgcatatttcgcaatttttgatgccatattttatgcgcatattttgcgatttatgtgcatatttttggatgccctagtaattatatgcctttttaatgattttca

SEQ ID NO: 29299 - DNA, 1349 bp, Heterodera glycines
  unsure (1)..(1349): unsure at all n locations
cagttagcaagtgcttttctatcgcaaaaccttctccgatttctcnnttccttccaatcactcgcctttctctgctgatcactctcaaatgccgcctttccctttccttttgcttntcctttgatcaattttccccccccccccccctttccttcgattgatccgtccatgggttttcctcgcttttccatgctttgatcgccaactgtttgtccttatcatagcgtgccatggctcgatggaattattccaaaactaatgaaagcatcaaaagcctccaagttgaagagcatcaccggcagaatgactttggtactgtccctccttcctcttttcctcgtcttcttccatccctgccaatggcaaacttttcgccaacacttcgccaaaatgaattccatgccaatgccacccgcaaattcgcattacatttgtctgctccactcaatgcatgtttatctgtgccctcgagaagcagagcgagaaaagttaatggccaactttttgattcggacgagcaaaaatgggcggatggacggagaaaagcgaaggacagcggaacattggcactgacaaaggcaattcggcacaatttggagagggcaaatcccccgccggttggagcaacgcctcctttatctgcactatccgttttggcacattctccggtatcggcatcgcctcccaaggaatattcaccacagaaggaattttgcgcgaggcggccattgtttcccaagtcaaaatttttgagaaaagctcagaagctgaggaaagaatggaattgggtggcaaacggaagcggaagagaaacgacgccaacgcggacaaaggcaaaggaagaggaggaggaggagaaggaagaggggaaacggaagaacaggaaaaacaaagcaatgatggaagaggaagaggaggaggaagagaggaaacggaagaacaggaaaaacaaagcaatgatggaagaggaagaggagaaagaaagaaaaaatgataatacaaaggggggcagcagggaagagcagaagaggatcattcatctgctgatagtgaatggagcagcagcagaaaaagtaaaggaggaagagagggacgacgagagcgagcgggacgaagaagaggaagaagaagaggatgaggaggaagatgaggaagaagaagaggatgaggaggaagacgatgaggaagaggaagaagaggagcagggggaggggacggaagagagtgacggcacaagttgctggagcggaatatccgtttccggcagcagcaaccaaagtcggagtttgagcatgagtcggtccgtgacaaagtccccatcagtggcactttgtctccacaatgccctc

SEQ ID NO: 29300 - DNA, 1391 bp, Heterodera glycines
  unsure (1)..(1391): unsure at all n locations
ttgcgcgaagcgctcatgtaatgcatattctttcatctctcacaagtatactgtctacaccgagcaattaatgtgcaaacatatacctttaatgttntaatgaaaataaattagttaaatntaattaattaagaataatanaatgaggccgcgaagcggccgaatgaacgcattaggccttaccgaatcaattagacaaagaagccgcgcaagcactagcaacgaagtccttttgcgcgaagcgctaatctcaacacacaacccaatgcttttcaagtacactgcctatagcgaagctatcactgtgcaaagcatacggtctacacaaagaaattactgagcacacacccgctagtttatatactttagaacaacagtgagtttcatttccaaaaacaaaatctcccggccgaaggccgggaggggttcgaaatttcgaccttgggggtaacttttgacggcgcattcaggaaaactatagattttccgatccgagggccaactgagcgccaggcgccgaaaagtcacttttttcgaagcagtttttgcagtttttgggattcaaaaattttttaaaggcctaaatgaaaaatccgctcccataggattttaagttggaatgtttggcacattttttgcttcttcaccgaacccctagggcctaccagtttttccgaaaaactgactaaaaattgcatacttttttgggccatttcagcgccggtggaataactccccggcttttgatgggaggaggtcggtgtaagcggcttttttgtagagctcgacgagctctatccaaccatcttttcggatttctgaaattttcagaaattttcgagctaggccccctcgaaaattttccgttttttaattttattattttttgcagatttttccgggcaaaacgaagaccactttcaagcaaccgtttttcatgctctatcgattggtgtcattttcagaaaaatttttaaaaatttttttggaaatagaaaatttttggttgctaggcctcaatttcagttctggcgcaataacttgtcaggagttgattttatgaaaaaatcgtctaagagcttttttgtagagaattttaagcccaatataatgtgctttatctcatgtttttaccatgagtttaaaaaaagttataaaataaaaatgaattttgaaattaaaaaccataggggggaccccatggttttgcatttcatgaaaaatttttttgctcctaaattagccaaaatgcatttttatggcataatttgaggtgctgaatacgtatatacgctttattttgcgtttcagattttttgaaaagtgtttaaaattttttgaaaaatcgtcataatgtgggccctggaaaatccagtgaaatttcgaaaatt

SEQ ID NO: 29301 - DNA, 1374 bp, Heterodera glycines
tgtgtcgcaagtggctgaacgaggtcctcctcctcccattttgtacttatatttcccacctttgcttttagaaacggaattctcttaagggcgtcgttttcgtcttggacagtgcgacgttcagcaaaaaagtgtcacttttctgtgcattttttacttcctttcctttctttaattatttgtattttcgttaaggatgccgccgaattgctgtacgatgtgctgtttgagtcgggcaatgccgtcccggttctgatcgcatgcaacaaacaggacattggacacgccaagtcgcactctgtgagggcgggggggggggaatcgtcatccaagcaaatgcatcgccttttctcccccattgttagctcatcaaaaaggcattggaaaatgagttcggcttgatcaatgtttcgcgtgaagctgccctcagttcgatcagcggagaatccgaaaagcgaattttgacaaaaagcgggagggaattcgcctggtccgaattgaagaacaagaaaattgattttttggagtgcaccacgcgaaaagatgagaatttttcattgtcttcggtccgggaatggatcaacacaatttgaaacgaattgataagcattttacagttgttttgatgataaaatcgagtcgataatggccaggggggggggaattgctcaactgattttgtcagtgtgtgcttttccattttgcttatcacaatgctttctcctttgcttcgtaattcgggggctccccccccctatttggcctttatccttcgcccattagggacttacgatggaatggcttggcggtgatctctccccccccccccccacaaaatagtcaggttttccctgcttattgtcgtttattcttcgaaaagctttttcttcccccgtttcatctccgtgcgatcctgaaaaggaccaccttttgatgggtttggaactcctccccccccctttcccctgtctccctatttttcttttctttcccctctctcttccgttccttccacgcgctttcatctaaaaatccgctcctcaaagcccacccatcagtgtaatgtactcgcgttcccaccccctccccccgtcgtccgttgggttgcgccgtatgcccagtggtacggtatcgcccggcactcctccgccatcggtcatttccgctctttccaccgaccagttaccacccccacaacaatcgcaaaaacggcacagtgtttcgctttttgggattccaacggcgccgagcattggaaacggcggtgtttcgacgatggtcccgtgggcgggggaagttcccctcctctctttctcaccctctcaatcaactttaaagggaaaaataaacgaaatgatttttaaggaatttaat

SEQ ID NO: 29302 - DNA, 1342 bp, Heterodera glycines
  unsure (1)..(1342): unsure at all n locations
aaatttgattaaaatttgttgacagattttcactaaaaaatgatcaaattttgtgatttttatataatttttctaaggagaaataagagttttggcgcgccgttgagaacagtttttcatcaaattaccaaattttgcgattttgggccattttctaagaaaaaataggagttttgggggcgcggcggtgccgataggcgccgccggggaaaaaaattggaaattttgatcatttataaacagtttttcactgaaaattagccaatttataggtaaaattttgaaaaattttatgggaattttatccaattcttaggggtgtaaaagtcgcttttcgcgccaaaaagcgaaatgcgaaaagcgaaatgcgaaacgccaaaaaatgcgaataatgcgaaaggcgaaatgcgaaaagcgaaacctcggcccatccctggtgtgggcggaggccggaggctatttgctgataaggaaatagtcagcaatgaagtgggaaaccgggaaaccatttgctccccatttcccgcaatatggctcttaactatgactccccgaaacaaggagcaaagcggcacgcatcggcagatgctggacagttacttctgcgaatttttatggcgtcattccgtcaaacgaagagatgtcgatgcattcgaataccatttgcaaaacatcgttgcttatatgccaccaaattaatatgatttcttgcgatgataataatttgtaggagaaaaaaagaaaaaaaaattgaattttgataattgttcgaatccgggttcggagttcgaaatgggtcgaaacggacatcatattcgggttctacgaccccgaaaacccatagaaacgacttttattaatttaaaatcaatttaacaaagaaaaaaattttgttgacacaaaacgcacaagtaccaaaattagcaatggacaaaaaattttgaaaattttattaaactatgaaattttgaagcttctttaaattcacgaaaaccaaaaatataatttttgacaattttcgagttttttctttccaaaatttgtgtttagaagtgtatttcttggaaatttaagaaacaaatccatttaactaagctctattatgaaaaaaataaacaagccgtccagcagaggaagtacaggtcaaaaattttcacacgcctcattgaggacaccccttacaaaacaggcgtgctgagtcgtttcgtaaatctgccaaggngtataaaaacaaaaaatgtgacacataaacattcataacttggctaatatctcctggtattattcaagctcatggctattctttatctgaatattattttcatttttttaagtataaaaa

SEQ ID NO: 29303 - DNA, 1228 bp, Heterodera glycines
  unsure (1)..(1228): unsure at all n locations
tttgaataaatcatcaagagtaaaatgtttaagcttttccattaatctaaaaagcaattgcgacaataataaaaaaaaaaattttgaaaaaatttgagcaataaaggggacccaaacgcaattagtacccaaaaaaagttatggccaaaaatgactgaaaccctggtttctgatgtacttttggacaatagtttgattttttttttttgaaattttgcaatctaataaaggacatttagggctttcgaatgataaccaacaaatgttggattttattcaaaaataaaaaagttggagtccaaaagcattgctgggacacaaacgtgccggggcccaactgctgaagtaaaccctccgttttcacccttttcagttacattgttcaccattccgtcgtcgcatttctccgcgtcaatcagcaaattttcgacaaaagtggcaccaatttgcgtttccccatgacatatgaaagtaaaagcaacaacaaaacggtttggaatgtttttgcccgcgaaatttggccaatttttgcgccaaacattcgccacttgtattttcaaaaagcggtttatttggacaatttgcgccgccttatttcgccgtcagttctcactgatcagtgccaattgaattcaatcgaatcctgttttctgttccccgacgcgattagtgacgatttggatgggccaaatgctgcatttttttcgtctggccaagcgttggccaaatggttgcacgcaccgccgcgcactgatggacagccgaagcgattgtactgccaccaaactttgtacaatgtggacacagacactggatggatcaacgatttcaaggaggtcggtgcgtggattttttttttttttgaaaaatgcttgtttttgctggaccgctgaattttttataacaacacaacactggagacaatttttggctcgaagagaaaaaaaaagtttttggattcgatccccccccnccccccccctctgaatcaaatccaacaattttggtatcattcaaaagctcttcacatgctctattcgccttgtaaaagcaaaaagattttcgagcctggaaaagatttattaagaaaaatttataaaatttcgaatttttcgcaattttcttgtatcactttttttgatatttgtctaattgccaagcaataagttagaaaaagtttttaaacatactaagctttcgaatgatacgaaaatcgtttgatttggtt

SEQ ID NO: 29304 - DNA, 1218 bp, Heterodera glycines
tttttactggtgaaagtaatcccgcaatgggggtggtacggtatgcacttcttcttcggtgtattgtacactggggattggactcgctccgtacgagcagtaaaccacgggcgtcccccgagcaaagtcaaagctccactcgtaagggtctcgggcagctgcaacagcggcttgggcgtcgtaaatgggctgtgggggtggcgtggggaaaagggagggcaaaagagtggccaaagtgggcggatgcggcggcagagtcagcggagtcggcgttgtgaagtacgccttgcaaaggaaggagaattcacattagtagcagaaagtacactgtcccccgagacttgtctcgtcgtgtactgttgctgtcctccttgcccttggccattttgtcccgctgccgatgcaatgtgttggccttgttggcgttgtgccgttgactgtgagtagtacccctgctgtccttgtccctgtccgttctgtccttgtcctccgttgtactgctgcgtcccgtgggatgttcctgctgttccaccatattgtgttccttgtaattgttgctgttgtccgccatttccactaaactgagttagctgctgctgctgctgcgtttgtcctccgctttgcacaatcggaatcggctgctgttggggcgtgccgtactgaccgcccgctccctgtgaagacgaaggcacaacgaccgtttgctgaccgtacgcgtaaggcgacgactgtgcagaagaggaggagtactgtgacgattgggggtagctcccggaatactgtgactgcggatagtttccgttggaataataataattcccttgggcgtattggggcgattgctgctgctgatagccactgaaaacagtctcatctcatttatttgccacaaatgccttccctcccccttttttaccccgttccgccaccgtatccgttgtttgtgttgctgttgtagctgtagtactgttgcggttgttgttgtgagtagtgttgtgccgtcgatgatccaccgttcgttccctggccaccgtactgtccctgcaccgaattgtactgtgaataggtcggcacatattgctgttgctgttgggcgtattgcgtgtaactgttcgatccgccgtccaccctttggcgttgggcttcgcaaatttggagttgaagcagcgacaaaagcagcagaaggaaaagtctccttctgagaatcacagaaagcga

SEQ ID NO: 29305 - DNA, 1699 bp, Heterodera glycines
atacaatcgaaataaaaaataattaaatatttgcgatttttctattgatttaatcgtaataaaggacgaaagaatactttcataaaaacgatttattttttaaaatacttttatcttaatgagggtgaaaaataagcaaaacaaagtaattttctgtaaaagtttcctaaaataataataataatcttagaatatttttaattagcttcattatctctgtgctttttaacttaaaaattataaaacttttacaaataatacaaaaccagcataattaattttaaatgttttaagcgatttaaaaagtcaacgctcaacatatagcatccaagaatcacttcttaggatcatgtgaaatgaacaaaaaaatttaaaaaattataaaatattctgaatataaaatggatttaagtattaaaagtaaaaattgaagataaaaaaattcaattttttatttactttaataaatttgtcttttttatttaaaattaattttcgagatataaaaaaagatattcgataacataattgtggatttatttatgcattaactgtttgaaaataaaaatttttgaatagaaaattataattatttctttttattaacaaaatttctattaaaagatcatctttatcctggtagtttattcttagaaattttattattttaaatgatttactctcattttacttagcttattttccaattaatgatttagcttaatggatttattttctgtcatgttatttatttcattctttattaacattataatctgcgactgatgggattatttcaaattttagtttaattttgttattaaaatttcactttttattattaataaaatatttcacagatattttagcaatttgactattcaaaataataataataatattatttttattaagtaataataaatatgtttagttttatcattttaattttagcagtcgattgccttgagcgctcgaaccgcatttttctggcgcgcccgcgggccgcctgctggagcgtttttgccttaaaatcttaacttattttccattaatgattttgtttaatggatttttattttatttttttaaaaattattaaataatgaaaaatattaatcctaacatttttatattatagtagatatagaatgatctataattttcttattttatattatagaatttatctactttttcataaatataaaatttaatttctaaattttcgaaaattaatttttggtttatttatttttttatatttttaattaaggaaaaataaaaaataacatgcaacgagatgtattttctaatgggcggcggctgatttttttttgtcaacccttccaaataagaataaaggtttttatgatttttgtggttaaatttgttatttgagtggtgtcaacagacaaatatgaacgaaacaaaatacgtacgttgaaaaattaataattgtcgtgaattttgccaagattagaaaatagagagtttcttaagcagcggaggaaccaagcagaattgtgattaaaatgattaattggtcttaaattctttattattttcattagttgattcttttttctagaatattaattattaaaccaatttatcattaatggcttttgttttgtgcataaaaaactcgcagtatcatcatagacaagagggcgaactttgtcgatttttaataaaa

SEQ ID NO: 29306 - DNA, 1948 bp, Heterodera glycines
  unsure (1)..(1948): unsure at all n locations
cttaccatacngagttaaatgctaatttggcaatatgtcttaatccaggattaaaattcatttttgttgcttccaattcaatttgatatatttctcggtaagttttcacaaattccaatttttcttcttcattttggacatcctgaggccacccggaagcttcaactttcaattttaaaaattttctgacataattcttaaataaatttccatcaaaattttcgtaatgataactgcggtaaaatctatcaataacagcccccaattccaaagctgaaataattttttatttttttaaaatacatctatcaccttttttcaattctaaagtacaaaattcaccagtaagtgcccgctgttcagcactatgtctacactttttggtattttttgaataaacaaaatctgttttggtcttcttggcacacgaagaacaattagtaaataataataaatcatcctaaaaaatctataaaattaaaaaaactgtcttttcctacagtatgaaaaggtaaaacaggaaggaattgattttttggagggatcactcgtactttcaaaagaccctcataaggaatgtcatcaggtgaagtcctaaaaatgcattgaattttgtattttttaccgaaattaccattttactatatattgtttaggaatgactatttttgggttgccaacgggatagggggtggaatagttcacccaagggtaaagactaacaatatcataaatcgaaatttccatattttcagaagcctcagcaaatagacataatgggcctaaaaattaatcattaattcagaaaaaacgaataaatctaccagtacggccacccgcaaaaccatttcttgggataataggtccaatttccggtaaattattaaaaaattttgccatgttttcatcataaatttcactctttcgatttaacttttttctcacatcacattcctaaaacacaattatgttttgaataaacttttggcatttacccaaacttcctctacagtatatcccatctttttccccgcaattcttaatctctccattttttgttgagttctatcataattttgttccgctgttagtccattcgcttgaatcataaatcccttataacattttttacatccatgaaaagcgcatccctaaaaatctttttaatattttatttcatttccattattacctgaaattcaattattctctttgcgccccaattatgcaatcgatttttaattttttatctccaaaaagcataatttctcccccgtttgcggcatgtctcgctttaactccatccctatgcattatccattcaaaatattttatcgctatgttgctctgactatctttaggctcaaatccgctctcgggaatgatgggtattgtttcactattttttaaaaatttggcacgaaaaatgctaaaaattgagttattttccttttattttggtccctacttcatgcatgatgacgcaatagttgtcgatagtctcattacatcgatcccattcggtgtttcattatctattgttatatcaataaaaatctttctcaattttataagcgctttcattaaaatgtccgtatcatttgaacaatattcatccaatttttcttctaaaatattaaatagttaacttaaatattttttctcttacctaaaataaatccattattgtaattcatataataccatttttttaatttttcatactcttcttcacccatttcatcaggaaaataatcctcaaaaggcgggagggttgtcaaaattttgcctaaattcttttttttttgtaacgacaaaaatattcttaccgtaattttcctctttattaaattgatggggaaaatataatttagagtcacaatccaaaccaaatgttttgggtaaatgtgccaaaaggttttgcattaataaccagctgtcccgaaaa

SEQ ID NO: 29307 - DNA, 665 bp, Heterodera glycines
  unsure (1)..(665): unsure at all n locations
tacgcgtcccagtgcactttacgcgtcccatggcattttacgcgtcccaacaacagtttacgcgtcccatggcatttgtgtccatggcagggatgtcattccgaggctcaaaaattttcggaaaccggaattaagtgctatccctggtctatggtattttagccgtcctaataactatgccggtattcagtaattttttaactaaaatttcgttgttaaacataaagtataataacaactcatacacaggcaactcgaacaatggcttagactaggcctaagcttttggcttaaacctaggcttaggcttttttatattagtaactttctgttgacatcattaagaaaaattataaaaagaagattctagcttatttttaagttttctatttcaattttttttcctttattttttattatgggacgcgtaaagtgtcatgggacgcgtaaaatatcatgggacgcgtaaaatgtcatgggacgcgtaaaatgtcatgggacgcgtaaaatgtcatgggacgcgtaaaatgtcatgggacgcgtgaagtgtcatgggacgcgtaaagtgtcatgggacgcgtaaagtgtcatgggacgcgtaaaatatcatgggacgcgtaaaatatcatgngacgcgtaaatgtcatgggacgcgtgaagtgtca

SEQ ID NO: 29308 - DNA, 1986 bp, Heterodera glycines
tatttgttatttcttttctcattttattttttgcctttccttcttttttttgtttgtttcattatcatatcattaacattttatcaatttcatttatcatttcatatcttttgtttattttcaatttttacaacaattttcggttgtttttaacttttttttccttttcctccaaattgcgaaggtttaaaagtcactgtgacaaagaattcgattatttttgcaagaagaaaatggaaattaaaaacaatttattatttaattatttttctttccattattgagagaaaagtgacaaatataattatataattaatttcattttttatttttccgatcattttaaatgggacgacgcctcgagggcaaaacggcactaatcactggcggcgcgcggggcattggccgtgcctttgccgaaggtttcgtaaaggagggggcgaaggtggcattggccgacattatcgttgacgtggcaacaaaagcggccggagaaatcggcgccggcacaatcgccgtcgaattggacgttaccaatcagaaatccatcgacggatgcgtccacaaagtgttggcgcagttcgggcacatcgacattttggtgaactgtgccgcggttttcgacatggcgccagtcggcgagatcagcagagaaagttacgacagagtgttcgctgcaaatgtttcgggcactttgtttatgacccaggcaaaccaccaattagcatggctaattagcctaattaaacaggcagttgcacgtcatatgatcgagcggggaaagggcggcaaagtgattaatatggccagtcaggcgggacgtcagggcgacgcattggtcaccgtttattgcgcatccaaagcggcggtgatcagtctgacccaatcgaccgggctggcactaatcaaacacagtataaacgtaaacggaatagccccgggctatgtggacacggaaatgtggcgacaagtggacaaattgtttgccaaatacgaaaagatcgaagtgggcgaaaagacacgccaaacggcgaatttgctgcccatcggaagaatgggcgtggccgaagatttggtgggtgccgcggtgtttttggcatcggaagagtccgattatgttgtgggacagactttaatgtgacgggggcagccgactgaactgagaaggaaagtgccaaacggagagaaaaagccaatcaaacggaaaaaatgccaacaaacgaatgaatgaaatgatcgaccagcataatgtatcaatgattatgccataacaaatgaaaagccgacgaatgattaattatgaagatcaaattaattgtccgattattacgcactttgtccaaaaatcagcccaaaatatgaaataaaagtaaaaatagcaacagaataatcaatcgaatatttaacttcgcataagcgaaaacattttgggacgggcggagaatggagggaattcagcggacacttcaaaacacattttcccttgtgaattcatatacataaatcaattaaccaaaaattgtcgaccaaaatatttctcccaattaacgctaatagcccaatgaattcgaattacgaaaaggacggacaaaaaaaggaggaaaatcaaatgggaaaagtgccaaacgaacgaccgaaagaaaacggaggaaaagacgaagagaaggtgagaaaaggaaagtaattagaagaagtgaaaaggtaattaaagaaaaaggaagaagcggaagaggaggacgaaaagcaaaagggaggagagaatggaaaaaggcaactgaaagaaagcggcgaagaattccgacttttggtggacgaagaagaaaaggagaaggaggaagaaagcacaaattgcgcacacaagtaaaaaagagaagggggaggacaattagtactaattaattaataattatgctaatttagcaaaagtggccgttgcccgttttaaacgaaacgaaagaggaggacacttttgatgattgatttact

SEQ ID NO: 29309 - DNA, 956 bp, Heterodera glycines
attcccgttttaagactgaaaagcggtgtgttttttggctgtgaaagtggaaaaaaattggccattttgagggcagttttgaagataaatcagaacatttaattaagtaaaatttggaagtgctggatttttcacagcaaagaatattttaagaggacttttcgatacaggaattttcgacagtatagagtaaataattttcaattttaggagtgtaaaatcgtaaaaaatttggctttaaaaagcaataaattaagccaacagtattgagatacataatttttaaaaccaataaatggaaaattttgcaatgaatttttttgattctttcatttcttgtggatgtattttctggagttttttgggcagattcttatttgttagagtgtattccgtttttattacacttttgttcacaaatttgggcaaaaggtcaaaacaaaatagaattttttaaaaattctttaaggtttttaggtcctataaaataaaaatctataaaataaggttaatatatctcgaaaaatagtttaacaaccacaaaaaaatatgttttttcatacgtttcaggccactaggagctcaggaaaaaatagttaaaagattaaaaaatgtatcactagtaataatgattagcaatacagcaatgcacattgatatgtaaatttaaaagaaatttaattcgaagcaatttattttctgttgaaatatcctttgaaaatccgctgtcgataagtccgttatgtcgaaatgtccgctgacaaaaagtccgtttagagcctccaaattagagatctaagactcattggaataatgcatgtgccagatgatttttttcgaaaattttcacgtttctaaacacttgggggatgatgagtgatcatcagatcaaggtgggtaaaagacttttcgatcagaccttttacagcgaaatttgggtcaatttatggggacca

SEQ ID NO: 29310 - DNA, 1276 bp, Heterodera glycines
ctgctccgcgcgctgttcaaacgcaacccagcaaatccgttgggcggcggtgcgcagggggccgccgcgctccgtgaccaccgcttcttcgcctccgtcaactggcagcggttggcccagcgccaggtgggtggtggcggcgttggatttttttaaaatttcaaataaaaaaagggatttttttgctatttacaaattgcaattaattggtaattccccattttttcaaggttacgcctccgtttcggcccgcttttggcacttctattggcgtcggttgtgatgccattggagcggacgcttcgtcttctgcggcattagcattggatgttgcccattattttgacaccgaattcactaagcgaacgccaaaggcgagcattggcttcttttttattctttctctatttctcttgctctctctatgtcaccctccatctttatctctcatctctctctccctctccctcctttatccccacattttatacctccattttaattcccttcctccaggactcgcccgccgtgccgccgtccgcagccgcccacgagctgttccgcggcttcagcttcgtgtcgcccagcattctggaggaggacgaggaggagtttgccgccgctctgctcaccgcgtccggcagccgcgtgccgagcccgctttgtacggtggacagttccgcgttggcgcagcgtcggcgccttcagcgcggagtcggcggcggtggtggtcgcggaagcccttccggtcgcgtcggcggtggcggcgtctgatttagcactgtttcctgttttgttattattgctatcggtgtatgtgtgtgtgacttcttcccatttatgacaaattatacgaaattgttgttttgttttgttttgctcgtcacaaatgtgccgtctcccccactccaatttttgtctcatttattttaaaattttctctgttttttttctctcgttttgagccgagcctttgtgacaacgacacaattatattcattatcaatcattcatttaccagtgacaaaaatgaagagacttataataaaatattatttattttctgtttttttttgtgtcctcgctgccgtatctatcattatatttatccacattgactgtaaatggattggcggatactgtaataatcttataatcgcattgtttgccttctcattttcgcgacctttcttcaacataaagggagtatctcgagctttctgggaaatccataaccttaatggctcagaaaggacatatttttgaagctcaaaga

SEQ ID NO: 29311 - DNA, 1257 bp, Heterodera glycines
ctggtgctccggactgtcgtgagcctcctgggttgtccgtctccaccgggttgtccagatggaccagggggtccgggcgggcccgggggcgacactccgcagacacagcaactgcctgcctggcgcttgtgacgtctgtcgtgcgacaccttggagtaggcctgggtgcgggtgacctgaaaatttgttgaaattttttgaaaatttcctggcttttcccctccgctttttcggctttacttcgcgccacatgttgccggagcgcattttgcagaagtccacttcgttctgcatttgggtgccaagctgctggaagtgctggtaggcgaacggcacggaaatcacagcgataaccgtggccacggtggacaggcacacgccgaagaaggccaaagtgcggagcgactccgcctcgcgctgggcagcgtgtttgtcaaagtcagaggaggaatccatctacaaattaagggcatggtcatcagcagataaacaaatttttgtgcgtgggagtgaaacagccaaaatgagtcatgcttggatcacaccatcgccataaacagaagtaaatgacatattttgctgttttcaatataattaggataatgaggggcatggaatatcatttgaacagttgttgaagctttttgtaacaaactgacctacccccaattattgctaattagtggggatatgcctttaaattaggcccgtgtctgcttcttctgctgttgctggtccctgggcttttccccttggacagtgtcagccttttggggtgttttgcttctgctctggcctctttccactccccaattttgggaactgatcgctctgttccaatttgggccccttaaataccgattagccggccattattttgttgttgtgttatgagacgacactcactcgcttctcccggcactgttgcggcgccaatttcagtttaatgtgtccattaccgacggagtagcggcggctgcggcgaccgctttttgtccgtaggggtggaactttcatttcatttcatttcaatatcgggggcgcgatccttagagttccctaattgtctccagcagcaatttcttttctacgattagcgcacagcaaaaaccccgggggcaaaacggacggacgaccccaatttgccgaaggggcccccccccccgccgcggggggaaatagtattttcttgtccatatttttaggccaaaaaaaaattaataatgttttttttggcccgaaggaattccttccttc

SEQ ID NO: 29312 - DNA, 642 bp, Heterodera glycines
tttcagtgggttttcgtatatttaagctaagtttgaaccaaacatgagaaaatcaaaaatgtgaattttcgactttttgttagaattcgggtccggggaccgaaattggtcgaaatgggtgccgaattcatgatcagcgaccccgaaaaccccataaaaaatgtttttatgacttttgaaaacataaaaaatttttcgaaaaagggggggggggacaaactgcactattaccaaagtcaactttaccttttttgagttattccattagccgttctctgctgcgctgacccacaaaatgtccaagtctcgaatttgagttttttattattcagatgggcctaaggctaggcaaggggtaatataaaggttatattcgtattcagcgaccccgaaaaccctaaaaatcctaaattagactcattttgtttttataaattttgaaaaattttggacatttcgtgggtttttactcttttggacatttcgtggcttggacactttgtgggggcgccctctgctgcgtcatttcccaggtactcaatcgtccatgtcataatgctcctcccttttgctgtcattttttcaaatgcattaacttaaatgaattttattattgtataagctgattgtcacatctttcat

SEQ ID NO: 29313 - DNA, 1704 bp, Heterodera glycines
  unsure (1)..(1704): unsure at all n locations
aatagtgggcgaaaaagttccattagggggtgtaattttttaaatagttgttttttaatttgaaaataatttaaaatgaaggcaaacaattttttcactgattgcagttacaaaatattttcttagcaaatattgaacaagaaaaaaaaaattgggggaagaatttttgtgaaatttttccaattcttggggggtgtattttttaaaatttttaggtagattcttaggggttgtattttttgaattttttaggtcgattcttggggtgtatttttcgattttattgcattttttgggaaattttccaaaaaataccaaaatagtggcaaaaatgatgacgaaacgccaaaatagtggcaaaaaattattttagtggccaactcccaaaatattttttttagtggcaaagctccaaaatagtgattcctaaaaatcgggacttttatttgcatatttttgcatatttcgggtttttatgcatattttggatttttctgcatatttcatgcatattttgccatttttcgtcaaatgtttttcgatttgaatagatcttaggaaaaatttgattatgcctaaaattaaatccaaatttgaatggatgcgcgagtgagtcaacagtgaattttccatgcgaaaaattgaaaaatttttgatttgaaattgcaaaaacaaccgataaaatttatgaggaataaaaattttttaaattaatttgcacccctaattttcaagttttttttgtgcatatttcacgactttatttgcatatttatgcgcctattttggctacttttcgtgcatattttttgcagccctaattgtgatataacacttttaggcagagttgcggcattacggaaaagtatcccaaatttttgaaaatggcaaaaaataaaaaataggataaatgagatatgcacctaaaatgccaaaatagtgacatagtggcaaaaagtgcgaaatagtgacataatttttagccaacaattgagcaaaaataagttttatactatttgcaattgctaatgagtagcatctggatttttaagggcaaaaacccaaaataggtacctaaaaaaattttttaattaaaaattattgccaagaaatttcttgggagtgagtgtatttttgaaaatttttgcgtcgatttttaggtggtgtatttttcttgaatttttttaagccgattctttcggatgtaattttcgtttttattgcatttttattgagaaattttccaaaaaatgtcgaaatagtgaaaaaataatgacaaaatgtcaaatagcgaattttaactagagtaccacgggaccgggaaattttgccaaaaccgggaccgtgatttgccgggacctgcgaagctgggaccgggaccgggacctcggtttttgtccgggacccggaccgggaccaaccgggaaattttaaaaattcaaaaaaaatttaaaaaataaaaataatacaaaattaaatttttatttgttttttatttaataaaatccaaaagtaaagctaaattaaattaatgaaattttcaaatcaaattttctttaattattttaagcaattaatcattttgngctaaatgatcgaatattattagaaattcagatttgcttttcacatcacattttttcggcgcgcttttncccaagactttttgggaagaaaggggtccgacggtgccgataagcgccg

SEQ ID NO: 29314 - DNA, 1062 bp, Heterodera glycines
  unsure (1)..(1062): unsure at all n locations
caagcaaaagagaaagtcgctgggatgagatatgtgttggatacncatcagtcttgatttcaaatatttccgatttcattgattttcagggtgtccgtgttgaaatgattgttcgttaccgaaatgaaagagcgattataatttttctaactaactatagatctacgggagcgtgactcccgcgggatttgcgatatttctgcgcgggattcccgtcccgcaacaaaattaaatttctcgagatttcagatcgagccccaaaaaaccaacacttttctcgaggtagagactcgagaccagaacttttttttcaaaaatttttctgtacagttaaaaacggattaaaatattaaaaaatcaatttctgaggcttttcataacaaatttttcttttattcgaatttttattcattacataataccaatcaatttttaatttaaacaaattttttacttgcgcttttaaaaagtacgagcaagctcggcttagcactcgaagccgaaggcgaagcacgaagcacgagtttcgaagcccaaaaacccgaagttttcgaaccacgaagtttttcaaaaaaatttcataccaaaaaatgtattaaagatgtttcattggcgaaatttagtcccattaatcccggccaaatggctgagaccgggcgccgggacttggaaaatagaccgaggcgggaccctgggaccgggactcccggtcccggtggtttatccaaaaagacgggaccgggccaggagtcccggcagggccccggtcccgtctagtctctaattattattttcatcattacatttcgctaaaaaagccatttgattattaactttttgttggttactttatcttggcaatttctctgtttatttaaagaaaacgatagaaaataaagtgtgcgatgaaataggaaaaaagtccgactacggtatgtttgatgaaaatgcgcaactgtagtccaatacagtatccgcaacaaataacgacagaactcaggacactcataccacacagtaattaatgatcactaaaagcaacagttagtcatcgccaaagtg

SEQ ID NO: 29315 - DNA, 1199 bp, Heterodera glycines
tttttgggtttttgtttatttatatatatttgttcatatgtatgggatgctcaattatttctctttttttttgataattatttttttaattttatatttattgcgattctttcctttgctccttggccataacttatcaataaattattattgacttatcatcttacttacatatcattctaatgaaattccatttgatcaataatgttccaaggcattttatttaaaaaaatattattttaattttaatttattctatttttaatgttagaaactaaaatattatcattaaatatttttggaaaatcttgtctttgaagttttattcatttaaagagcactatgcaatgttataagggttttcgcgttgaaatttttttttgtctattataaaattattattttccagaaaaaaagaaattttcatttccaaaaatttgttcaaaactgtttaattttattaaatttttacaaaacttagcagtttcattcgattggtccataatccgttgaagtcccctaattagctgactgatccttccctcgtctcgtttcatctctcccccctcgcctctgctgatcaaccaaccatccaaaagcaaatgctgttacttttaattcaaaaaacatgtccgacgagggccacccaagtgttgtccatccgcaagtgtccgagcccccaacaaatgtctgggcatgcttttaacgcacccaattttttttaaattttcgtctgctttttgtcggccttacatatgtaaatgcattttcacattaaatttaatcagcacacatattaacttccccacacaatttatttctgtctcccccccccccccttttactgatttcatttcaattcatttcttccgtcttcttctatccctcctcctcctcctccttttcctccccggtcttcttcttcttctgctgctgctgctgttctttgtgctgtttggcgatgtgttgtcctccgttcccaacaaaaaatgaatgaatgaaaatgaaatctctgtaccgtcagtcaccactttcccaccttttcacacttattcatccattctttcacattcagccaaactctctcttctcttcccccccccatcgttcaccttttgcttttttcaatttcaattttactcctcgcgcaccgtcgcacacaacaaaaaggcacaatttttaatctatcgtaattcccc

SEQ ID NO: 29316 - DNA, 1431 bp, Heterodera glycines
  unsure (1)..(1431): unsure at all n locations
cccagtcatgtctcgtntacgaaattgctccctccgcgcgccgaatctccgaaaaaagttntgagcaattgtggcacatccgtcctgctgttcgagttcccgaattagggcatttccaagcccctggaaaacgtgaaatggcgcggggatgatccggtcaaatccaatggacaggagaagcggtggtttcgtgatccccatcatcgccgatctgaccgctgcgtttgccttttcgccattcaccatggctctggagaattgctccgcgaattgcacagtttgatcaattgtccggagttcgcaaatttcgccctcctgcaccaaatgatcacttctgcaactgcaaattggagacggaaatgttgtcactgcagaaccacaatgcccgatcattgaccaaataaaactgacgtctccgcccataaaccttttgaattcagaaaaatggaaaaacaaattttaaaatttaccacttgactcggttgcccgccaatgtgcctattccgtcaatttgttcccaaagtgtgcttccatagcgctccaagttttcgcggctatccttggtagggaaaacggcacagacgaaattgtttgatggagaatttgaccgagcagcctggctgaatgagacggtaatcttcgtacaactctggccatggtcgccgctcagctttatgtagatttcgtcgccaaatctgatcagattgtccttggcagatgaaagacgcgcctccagagctgcctcaacatcagtgcacacaaatccaacacctgcactagtctcaattggtgcgtattgcaatgacccacagatgcggcgtttgatgtcaagcacctaacaatattcaattgaatttttaaataaatataaatgctaaaatttgtttttactttttcgagtggcgggaacacatcaaatttggcattgatcaggcgaatagtgctttttagtcgtctgtaagccttctgtgtaccgacaagcccgaggatcagaagagcatcctctggatcaactgactttttttgtcttgacagttgttgtttcttcttctgtggcgtgtaatgagcaaatttgtgccgaacttcccgactgatccgttcgagggacgcccggctggctgagcgtgatctgtcccgttttattacagccgcgatttcatcggccaatttgcgacgtgaggtgcgctgcaaatgatcgacattcatctttggtcgtcctgttggggttgctaaaattaaaaaagagaaaattatttgaaaatataaaaaggggattttagtttcactcacttttgctggtggtcggtgtctccatcggtggtgccatctttccctccaactgccgccgaagcgcagtgatcagtgcgtctctgttgcggacctgctgtcgaagaaactgatcgtttgttctgctccttcgctgtttgtcca

SEQ ID NO: 29317 - DNA, 1982 bp, Heterodera glycines
taaaaaattacatttttgaatattggaggggaggggtgctgcaaatgtaaagttcaaccggaatgaatgtttcctaccgcgaacgacagtcgcctgcggcacggcaggtgggcctcggcgcgtaagtgtacagactgtccgtgtaggagttgctcaacccagctggaacaggggacaaaaaagcaaattaagtgactgacagactgacgaaatgggcaaaatgagaaatatttgcaaaaaaataataatcttgtttgtaacaacatttagaaaacggtgcacccctttgaaaaaatcgctggaaaaattttgaaatttttttttcttcgaattttctatgaaaaaatttgaaacgacggtgggggggggggggggcgagctgcttccgataaaaggcataaaaagaattaaacacaaaattgtgataaattgaatacaattattggacatgcctcggttgagcacgacggggtcttgaaaagggaacattgtcgcactgagcaggtaattctgggagccagcgcactgcaaacacaaaatgatcaaaattaatgcaattaattaatcattttgttggcaatgactgaccggcacaatttgcgagtcgggcggaaattgcgtctcgcgctgctgccgattttggtggagcagtcgccactgttcccaaatctgtcgcaaaaaataataaaatataataaattaaaggcccataaaaacgaatgaaaaagccaagagttgaaaccccacacctcacggacattttttggccattttctcagggtatccctaaaaagttttttttttggacattttaaaaatccatgggattaattacgctctatttattattttcaaagaaaatgccaccccctaaaagatggaatgaacaaggttttttctgtattttgtttgtttgtttccttacgtaatcaatgaaggaatggtgaaggaagaaaacggggtcctgtggcgaggtggtcaacggcaactgaaacaaaacaaaaatacacttttacaatttgcacattatttgtgatggaatgccaataacccagggggtgagcttattgttttcgcaacccagaaaatttgataaaaaaattcccgatggaattcgaaaaagtaaattgcgtttttatgggtttatgtcgcgggtacacgccaaaacgtcgtcggccgaaacgtcgccgcaaaaaataataataataaattttcaaaatttcaagaaattgaaaagtattttagattttttgaaaatctaattgttaataaaactaaatttagctgattttccggaaaaaatgaattttcttaataaaaatttctttttgagtttttctagaattttcttcgtattaggtaggctagaactaaattttttgacaattttttcttggttttttcgttttgtccggcgacgttttgtcctgttcccttatgtcgcatgccccgccaaaaaatttcgaaacggggaatccgaagacatttttttttgctgctaaaacttttctttttctccagtgttttgttcgaaaatttcggcaccggcggaaaaagtaaaaaaatcatttagccggccgtttttcactgaaaaagacgaatttttttgtcattttggatttttttaaaaagattactaaacggggattttcgacggtgccggaattttatttttgaaaatttatttgaatttgttaaaataaaagtaagaatttcacaaaatagcccataattttcttgaaaaagtccattcaccatgtcccctccaacccaggcgtgcactccgttgtggatgaactcgagcacactgagcgggtttggcgtcggttgcgtacaggcgccgctccgtgcctaaaaacgtcgaggaaaaacacaaatattggaaaaaaaattgtttttaaacaaaattaccctcgacgtaaatgccaaaacgttctcaatttggggctgtccgatcagactggccactcttaagcaaaaaa

SEQ ID NO: 29318 - DNA, 1773 bp, Heterodera glycines
atcattacatattgtgtgacaaaaacataatgatgccaaccatttgtttacccttttaatatgcaaatgcattaattcattcctaaataatatgaaaaaataaaaaacaacgaaaggaaaaaagataaatttataataaagaaattaaacccaaaggaaggaaatcccaaagaataaaattcgtataaaatggaaacaattggaggcttttaaggtttgatgctttcattaataatagcaaaaagtatgggcaaacacagaagagcacggaaaaggtcacaacgatgaaaagaggtgaaagaattgaaaggagagaaaagaaagaaagaaagaaaggagagaaaagtgaattaaagcagcggaaggaaatggaaaatggtaaacttggaaagagtgagaagggatttaaaattggaaaaaagaatttaaatgggcaattggcgagacttcctggaaaatcctctatttaacagtgagaatcattgataatgagtaggtattttcttgaaagaccaattgctgaaatttgtcaatggatgcgcagaatttcaacaataaaaactcattttaaaatattaaattctgaattccacacagctcagtgtctcctgctgctgctgctgtccttgagcaataatcgcataaaacttttgtccactgaccgtaaaacatttctgccatttttcaccttcccccattaaccaatgcccccccccccccctctgatcactcgcaatttgcttccaaagaatgctttctttcctcccttttctccccgtcctccgcccgcttcgccaattcgcctcatttttcgtcccatcgctttccaatcaatcaaaatcatattattttgatgcttattatttgatagcgtgttcatgtgttcctcccttcctctcttaagccggcagcaggcgaagaatgaattcgcaattcattcgagtggaaacaatgggccgacggagggggggggggggggggcaaaaaattcccacgacaaattgccctcaattttcgcgacacaacggagaaatctttccgtttttgtcgttctgacataagaaaaaaaggaagatgacgacgatgaagatctaatctaatccctctcctcaacccaccattctcctcatattttcctcatttttttgcacaaattacgcaatttgaaacacaccatcaaaaggatgttgagaggggggggggggatggacacggagggacaattgggacacaacagatggaggagagggaacacaagagggaggaggggacattggcggaaagggtacaggggaatacaaaacattgggcgaggggacggaattccgaaggaccaaaaaacaaaggagaaaattggaatgaaacagcacacaccacaaagatatgaaaaaaggaaaaagattgggtcaaatgaggaggggggggggggggtaccataaaacgggatacgcttttaagtcgagatttaagcaaacggtgtttttcaaaaaaaggttcagtgcccgtctcattcaaaagagaaaagcctcccttatgatgggctccccaaggggctttataaacagtaatgttttaatatttcgcaacaattataactgttttaaaaacaacccacaatggatttgttgcgctccatgtgaccacttttggactgtttgtcagctgctgtctctgcgtctgtctgttgttggccgtcaaaagacaaaggcacgggggagggaagcaaaatgaaaggaagaggaagaaaagcggggaggagcagcggacgaaggc

SEQ ID NO: 29319 - DNA, 1314 bp, Heterodera glycines
aaaaatttctcgtaaaaaaagagatagccatttttctggcatagagaataaatttaaaatttccctgtagaatagaatggccattgctctccgccccccctctgcccatgctgggaacatttgtatggtacaaaatttctcgcaaaaaagaggatagccatttctctggcatagagaataaatttaaaaattccctgtagaatagaatggccattgctctccgcgcccctctgcccacgctgggaacatttgtatggtacaaaatttctcgcaaaaaagagagccatttttctggcatagagaataaatttaaaaattccctgtagaatagaatggccattgctctccgcgcccctctgcccatgctgggaacatttgtatggtacaaaatttctcgcaaaaaagagatagccatttttctgggcatagagaataaatttaaaaattccctgtagaatagaatggacattgctctccgcgcccctctgcccatgctgggaaaaatttctcgcaaaaaagagatagccatttttctggcatagagaataaatttaaaaattccctgtagaatagaatggccattgctctccgcgcccctctgcccatgctgggaacatttgtatggtacaaaatttctcgcaaaaaagagatagccatttttctggcatagagaataaatttaaaaattccctgtagaatagaatagccattgctctccgcgcccctctgcccatgctgggaacatttgtatggtacaaaatttctcgcaaaaaagagatagccatttttctggcatagagaataaatttaaaaattccctgtagaatagaatggccattgctctccgcgcccctctgcccatgctgggaacatttgtatggtacaaaatttctcgcaaaaaagagatagccatttttctggcatagagaataaattaaaaatatcagtgcccaaaacatggtatttagaccaacatgtccatctgaatgtggtcgaggttggatgaagtaatacctcacgcctgaaaacacatggattgcccactggaaaaggattcaccttctaaattcaaattcaaattcaatatttattgacaaaaagccccatgacttatggacataggctaactatatcaatgcacaatatctcttcatcgtctgagcacgcatgatgaaaatttaaatgggctccacacgaccaccacggagtgcatctttttcgtgggatcctatgggaaccgggagaaatactgcttccaaactctgtttgatgtccaatcccccatggaggcgttctttccactcacaaccccat

SEQ ID NO: 29320 - DNA, 1737 bp, Heterodera glycines
cttcatcaagacgagcacgggcaaggagcgtgtcaacgccactttggacgccgcttttgtcatgtgcttggccatccgtcgttactcgcaactgaccgctgttactgctgcggtgccggacggagctaacggcgggcggctcgtcggttttaaggcggcgggcagtgttcgcaacgcggagcaggcagcccactacgcgttgttgacaagtgaactgctcggggaacagtggacggagccggcactgttccgcatcggcgccagcgtgccattgttggacgacatttgcaatcgaatccaatcagtcaaataaaatgattgttcgcgcttggtgtgtaaatgtgccatatttaattgtctgcgattcaattgcattccataaatcttccaaggaaatttttaagaataaatgtgtcctttttcttttttttaatttcgagttttcggttaaatgtcaccagtttctccgctttttctcattctttcaccattttttctgataatttgccttgttttttgtccaattttttgttatggcattgcttaatcagccttcttcctccgctactcatttgaccattgtcacaaacagtgccatggaacttgcccgggtctgtgtcattcgctcttcccaattttcccattttaaatccgttttccctttctcaggagttgcgtgacaatcccgacaccattccgccgtacaatgggcgcactgttggccaaatggtgcgcagcaaatcaccgagttgtacaacgagaacatggccactctgatcgggtgttttttcatttccggcatagtccaacaaataagatttttttatttttgaaggccgaataattaggcggttcagttggatgtttcaaattaattttggaaagccatgatttatctgtcaaatagctttgccttttttagcttgaagaacggcactttgcatgaggaggaggaacaagcgattactatggtaaaagagcagcagatttactcgtcccggggattaacccattttgcaaaataatggacaaatcactccctaaaattaatccttcgccataccacccaatactccctaattttatgtgacgaagagagggatttgcatcgctaatattgccattagaagagtcatttttggtgctgctggagggagaccgacttaccatttatttaacaatgggtggttaaaaataagttttttcctaaaatcaaatgccataaacacgaactccgtctttcaggttcgcattcgacaggcagccattgaccagataaagcgctgctgtaagcaacttaaaaattgctttaataaatgcccggttttaatccctttttttgtatatcccttccttccaatggattgattacttatttcacattattattccaattcaaaattgttttttcttttgcattttaccgctttcccccgttttgccttccctcaggctgcacttacctcgtcgagcgaatgcagcgcctgcggcatctccgctggacctccggcggacaagtgcccgaggcaatcaaagaggcgctttcggcggaggagcgcacttggctggccacctacaaccagttggtgttcgacttccagaccaagtttggccaagatgatgaggacgaggaggagccaggacaagggcagggcgaaggacagcaccgaggcgacatgggcagcacctcgggggacggtcagtcagtcaagggagtagcgaagaaggggggggggg

SEQ ID NO: 29321 - DNA, 998 bp, Heterodera glycines
taaattagccctctcaattttccttcgggcctcagaaaatggctatctctttttcggccaattttgtaccgatcaaagggaaaatggcttaattcaggccccaatgtgcgcctgaatcgctaattagcttggcactttcgaatattacatataaattagccctctcaaattttccttcgggcctcagaaaatggctatctctttttcggtcaattttgtaccgatcaaagggaaaatggcttaattcaggccccaatgtgcgcctgaatcgctaattagcttggcactttcgaatattacatataaattagccctctcaaattttccttcgggcctcagaaaatggctatctctttttcggtcaattttgtaccgatcaaagggaaaatggcttaattcaggccccaatgtgcgcctgaatcgctaattagcttggcactttcgaatattacatataaattagccctctcaaattttccttcgggcctcagaaaatggctatctctttttcggccaattttgtaccgatcaaagggaaaatggcttaattcaggccccaatgtgcgcctgaatcgctaattagcttggcactttcgaatattacatataaattagccctctcaaatttttcttcgggctcagaaaatggctatctctttttcggccaattttgtaccgatcaaagggaaaatggcttaattcaggccccaatgtgcgcctgaatcgctaattagcttggcactttcgaatattacatataaattagccctctcaaattttccttcgggcctcagaaaatggctatcactttttcggccaattttgtaccgatcaaagggaaaatggcttaattcaggccccaatgtgcgcctgaatcgctaattagcttggcactttcgaatattacatataaattagccctctcaaattttccttcgggcctcagaaaatggctatctctttttcttgcaaatttgtaccgatcaaagggaaaatgg

SEQ ID NO: 29322 - DNA, 1108 bp, Heterodera glycines
  unsure (1)..(1108): unsure at all n locations
tgaattttgacaaataaacaattaattctttcatttatttttgtgcctttataaaacaattcgatgggattcggtgcgacggccaattcgtccaactgcgatttgggggaaatgaataggcaaactcaagaaactttctcggaagcgttttttacgagttccgccagccgttccctcgtcataatgtctccctcttcgaagactctccccgtttttttgtccacaaaaatgcgcctaaatccaattgaaaatggacaattaagtattgttattatttataattaagtccaaataatattctcagtgtgtccgtttcccacttcaaattttggtcctcttcgatgtcgtcctctttctgctgaagaaccattgccaaatttgaggagacctaaagcggaacaaaatgaatgccattggcagagattgcagcggacgggaaatccgaagcgggccaatttaattgccggttcgaacagccgtttccaagtgacgcggccgctgccgaactttgtgaaagcggtccaaaagccgtgcaattccccgggcacagcgatggacctaaatgaaaatgaaaaataaattaaataatttcacaaatgtttttgtgccctttcgacctgtatccgatgaccgagtcgcgtggcgtgccaacgtacatcgtcgaattggtgcccagcggcgcagtctctcgcgcgtcaattgtcgtgcacctctgaaaggcttaaaagcaattggcaatcaaatgagtgaacgctttgcctgcgtgctggtgttgtacaatgtcattatgaagccaccgccgaggcccgacgactgcggattgacgacgccaatgcacagcaaactggctgaaatggcacattgggaatggggaaaaggggggggaagagtgccaatgccaaccgatcatcgaatcaacagaatttccgccctccagcaaaacatcccttaaatgaagcaaaaattaaaacaaggaaatttctccgaaccttccgatttcgctacaaagacctaaacgaagtttgagttgccacacgccaatccgataggcaacaatggttaattacattcaattaattaattccagaccnntgcaggcnnatgcaag

SEQ ID NO: 29323 - DNA, 133 bp, Heterodera glycines
gggtatctccttggacgtctgtgaaagttttttcgggaataaaggtgaccaccacttcggtgccacctgattcacgacggcggacgcggcaatcgcctcgtaaactttgcgcacgatcgcgcattattatcat

SEQ ID NO: 29324 - DNA, 1829 bp, Heterodera glycines
  unsure (1)..(1829): unsure at all n locations
aatttttaaaaattatcagcgatttttaggccgcttccagtgattagaagaggtacaaaagtgattagaagtggtacaacagtgattagaagaggttcaacagtgattagaagtggtacaacagtgattagaagagtgattagaagaggttcaacagtgattagaagaggtacaaaagtgattagaagaggtgcaacagtgattgaagaggtgcaacagtgattagaagaggtacaaaagtgattagaagaggtgcaacagtgattgaagaggtgcaacagtgattagaagaggtacaaaagtgattagaagaggtccaacagtgattagaagaggtgcaacagtgattaaaagaggtacaaccgcgattagaagaggttcaacagtgattaaaagaggtacaaaagcgattagaagaggtacaaaagtgaattaaaaaaggtacaacagtgattagaagtggtacaaaaggattagaagaggttcaacagtgatcagaagaggtacaacagtgattagaagaggtacaacagtgattaaaagacgtcaaaagtgattaaaagaggtacaaaagtgaattaaaaaaggtacaacagtgatcagaagaggtacaacagtgattagaagaggtacaacagtgattaaaaaacgtcaaaagtgattaaaagaggtacaaaagtgaattaaaaaaggtacaacagtgatcagaagaggtacaacagcgattaaaataaaagtcataaaatgcgccgtatttttcctcattttttaattatttgattgtgaaaattcaccctccctaacccgagttacgaatttttgaaaattacaccaaatataatttttttgacaatttctaatttaaaaaacattaaattctttaatttaaaaaaataattatttttaaataaaattttcaccanaaaaataatttaattcaaatgaaaattttttatttattattaataaaataaaaatattttaaataaataaaaattaaaaataactcaaaaataaatagaaaaataatgttacaccgtccggattcgaacctgccccccccccccctcagaacatgtcccagaatccccaatcacacagggattctgaggtcttgacgatgtcaaaagtaaaatctgatcacgtattcgtgatcagcggcccaaataacccctaaagacatatttttggaagatttttgtgagaaaaatttttccactcaaaaatcctggtcacccccctttggtctcgaatctcaaaatcacttttatttttataaaaattcttaaaaaagtgataaaaatgccaaataaaatttataaaatagagctaaaaattgcggatttttgtagtattttacttttcccgaatagcttttcagaaccgagttatgaatttttttctgaaaatttgaatttttccagaaattctggaataacttttttcctttttaagatagaaattccaaataaagtccataaaattctcctgatttttctctatttttaaggctttattgctgtaaaattgatcaacccttcgatttgttatgaattttcaaatattaggccaaaatcccgagggccaaaaaattgccaaatattttcgaatttttaaaaaattccaaaaaatctgaaacgaaaaacaaaggtcatattcgtgctcagcacctcaaaataccccagaaaaatatttttcaccctctttttcaacccaaaaaaaatttttgaaaatttctagggggcctagctcgaaaatttttgaaaatttcccttcatatagtataccattagatagagctttaaaaagctctacaattttgcactaag

SEQ ID NO: 29325 - DNA, 1481 bp, Heterodera glycines
  unsure (1)..(1481): unsure at all n locations
ggggacctctagagtcctggtatcttttgaattcaaaatattatatggccttttgtttatttcttttattttgattttttccattttaaatgggttttggtgccatcgaatagtctttttcccattttgttttggttttcccaccctcaccctccacaattttcggcataatgtccgccgattgggtgcagtacaaacagcaattgttgcgtgcctatttcttctccagcagtcccattgctccccccgactcgcccttccacaaggaattcctcgcctttttggcgcgttgcgaggccaaagtcgtcgcttcatcagcgagtgttcagaggtggccatttaaacaaagaacaaaaaaaaggcagtggaaatgccgtgccaagatttttgaaattatttttaaaacattttattgcggtaaattccgtaaaaagtggcacttcgattgaattcatttgcatccgtttaataacaaaatgctttcctccaagggatgtcaaaaagtcggacgatgaccaattgtcttctgcctcggccgacccctccgattgggcggcggtgccgtgcaattccaacggcgtccccgccgggccttactccaaatatttcgcctcctccgtccgactgagtgacaaagcggtggaccgattccaactgatgcgaaatgtgagggcaaaaatagaaaaacgaaaaactataagaaatttgaaattgacaaatttaattggtatatttaaaagtcccaaattgggcattacgggggtttactccattcaaaaacagtcccatttattttcaaaaaaacggtggattttgtgctttttttcgcaggtgccggccgaagcggtgcgccaatttgagcatctcatcggcctttattaccgttttcggaacgcacgaaacttcaaaaagctgaagaaactgaagcagtcccaactcgaactgcccatttaccaaagtcggacggaaatcctcgaaaaattggaagaagtgggcggaaattaggggggaaatcaaaaataaataaatatgaatttccagaaccaaatcataatcattgcgggggacacgggctgcggcaaaagcacacaggtgaaagacatggacacaaatttggggtaaaagtgccaaatttttaaaaaagaaaggattccgccccctttaccttacgtttttctgtttttgctttattttcgtgtttagctgccccaatatttgttgaacgcgggttatgccaaaatcgcatgcactcagccgcgacggattgcatgcacaggtcgaaaatggggggggggggggagggagaaaaaaagcattttctcagagttcaaattgagactttgacaaaaacaaattgtggttttatcaaaaaaatgacttagaaagtctcgacaaatccgaaaaatcacgacactttttgttaggaatatagtcttacttttttctcgattgtcaanttttaaangtttttggcttttcct

SEQ ID NO: 29326 - DNA, 1341 bp, Heterodera glycines
ggtgtctctttgcgctaaaaacgaacaattttattttatttcaaaaatcagttcgtctccaaaattacgacctttttttcgcgtccgagcatttcgaggccggggaaggcgtttcgttcttctttcggttcttttcgcctctgtgctgcaaataaaatttgattgtctattgtcaaaaccacaaaaaaacgtctctcatcacatattttgctgtttggggtagtagggtaaaaaggtgcgaccttttcaaaaaatgaatccaaaaagttctcccccccctgaagaaatcgagaaaagcgagtaaattgcacattttgaacctaaattaaccctgaacaaaaccgtatgttgcagcaccggtggtggaggagtcggaggaacgtcgtaaaagacagaagagcgcttcgaaccatcggacgaggtcgacatgacagtatggtaaatgtgacccgggggaatgctcaactaaatataagcatgcatttgctgaaaaaaattcccatttaaaccttcttatgctgcgaatgggaatcatcggcggacgaggatgacgaaatagtgtcgtaaatgtgctccgggggagtttccgggccagcgatacctccaacaacctcctgaataaaagactacttaaattttgcaacgaccaaagttttagtcacaaaaacaacctgacgacacgtgaggcccgactgagaatggatggcggcggagaatggaaattgtgaggcctaaaagtgtaacaaaaaatgatttcgctaaaaaagagcaagcacgagagcaaactaatgctccatcataagaaacctgagaagtcccggcttgatgttgcaaaggggggttggccaactgagaattgggcggcgcagcagccggtggacaattcgtcggaggagcagaagttccctgaaatttgtggtcgttaatccgattaaaaagaatgcaaatctcgagtacttctgccgtgaggaaatccaacagtttgccaatgaatttggtcgtctcgttgtcgccctccgccgccacaaccaaaatacgccatgagtgtgcgttgactccaccgcaacggaaaaaggcagcccgaagcttaaaaaatataaatggaaaagaaaacattatccaattgctacagatgagcaacaacaattcacttcttcaggcgacactccagccttgtcctggtcgatttcctcatacggactctgaatattcacataaacatttaaacataacttttctttggactcggaaactcataaattttctgagtatcgaagaagaattgaaaagattcgacaaaaccggcttgggatatacgtaaagaaccgtctcatacaaaag

SEQ ID NO: 29327 - DNA, 1208 bp, Heterodera glycines
aaaaaaaattcgatttgttcgaatccctgtccggggttcggaattagtcgaaatggatgtcatattcgtgatcagcgaccccgaatacctctggaaacacaggccattttcggctccgaattcaaaagttgttaaaattaggttagggagttaaaatttatcagaaaagagccctttcaattaagtatgtaaaatatatattgctcatcgtctgcaactttaatcccacgaagcgacgtgcccggcgcaacaatggcaagagaggactactgcttcgatgcaacggcggcggagcagtctcgagcacgaatatgacatttacaaccaattcattttgaacaaaaataaaagttaattttggtttgcatattcttgaaaaaatgtttaacacagactagtgggtctggaccaatccacctaaaaacaaggttttaaccaattgggcaaaacagttccatatcattgtagagcatttgcgatccaacttaaatgaattgcgggcaaatttgctcttctctccttgctttcacgtgtttttctcaaaaatattttgtcttgctacaaaaaaggaaccaattcttttttgcctgttggtttaatttgtggttgggttgggacaagaggtccaaaatacaccatagtactttaaaatatttcccagcctaatgggtttgaaccataaccacaaaaacacaaatttaaccaacgagaccacttttcgctttaacattggaaactgactggcaatggggagggggcagagaagtggcgatagagtgtaggaaaaaaggagaacagattgttagaggaccgacgacagagatcgtttgcctccctccgttaatgggtcggtccaatgccaaattattttaaaaccgatttttttttccataattccgtcttccccgccttagggcacaccggacggatgaacgagcagagcagtcgttcccatgccattttcacggtgaccgtcgaatgtgcggagacagtgaaagccgctgacggacgccaactgctcacttagggaaaattgcacttggcgggtggtgattggaattacaattattgctgtaacttttatggaaattccaaaatttcagcgacattttcaaattgttttctttcccttagggtagtgaacgccaatccaaaaaaatgccactggcgaccgactaaaggagggggcgaaaaacaatttgtccctc

SEQ ID NO: 29328 - DNA, 1542 bp, Heterodera glycines
aaagcataaattcaaattttcgaatttctcgttgtttaaaatatggtttaggtttggtcttaggttcaaatcttccttatggtgtgtataatttaattcatttaagaaaaataaataaaataattaaatatagatcgtcaaacacatcaaaacatggatctgatactgttaatatatataattttatgaaaatttttaattcgcggccacagtcataacatttcctcataaatacttttgtcttttttttgtaggcaggtatgggcccggccgcttcgcggcctcgcacccttctacatttattagcattttactcttcttttttggcattttcttatggccaaccagcggcactcattctccaatttttagcatttccatctttgtaggcttaatcccaaaaatcttcggcatcccactcattgtgactcgattctctggcattccaaacaaaatcaaaaaccgcattttaactaacaaattcttttcaattatagtattaacaaattcaaatgaaaaaaaaacattaactaataaagaaaaaacttcataataaacaaaaacaggaatttgaaacaaacgttttcctctttcttttaccagatttttaaacaaataaaagatggggtataaaaaagggaagaatgagagacaaattttctattgtctctccctttcctttattttactctcgtttcttttctattgccatttactctccctttttccctcttccacacacacgcacgcttccaacatactgctgctgcacagcagtacgcgtctgcctttccctctctctacttttttcaaatcattttttaacgcaaaaacaatacaaaacgccacacaaattcaaaccgagacacatacaaacatacacacattcatctttttatataaggactgagagcccaaaatttactcgccgtgttaaatagtaccagtataacgaaaactttaaaacgtatttatagccttttctttagaatccctgagtcgtttaataattgtagtcagtaaagacaagatttatttaacgaaggacaatgccgcgccaaataactgatattaaggtaaagcgatacaagcaccgatttgtttatgctttaattaacgtcatttagcaatttctgctgactgctcgacgcaaagacgcgaagtcagtcaagatcaagaagaacaaagagaacaccaaatttaaggtgctaataattcacttttctcagtccttttttccggttaaggttcgctgtacgcgctttctttacactctcgtggtggatgacaaagagaaagctgagaaattgaagcagtctttgcccccagggcttcaggtcaaagaattgaagtgattgacgcacgaaaattgcatatggttttttgttttgtttttccattttattctcgataaactgttgtgttattaattgaaactgtttaattggttttcttctttgttaacaactcaatattttcaaattgtaagtcctttgagataacaaatccttttttctcgagtacgtccaaaatgaaaagctt

SEQ ID NO: 29329 - DNA, 1075 bp, Heterodera glycines
aaaatttcgaccgaattgccgcttaacattggcttttcgcccgccccgtcttcgcttcacttacacttcgcccaaagcaccggcaaaggccgggagagtgccgggaacgccggcgacgctggcggcactgagcggacacgaaaaaacggactgaacggcacggacagaaacggggagaaggaggggacaaaggaaaagcagcggaagaagcaaaaaagggacacggacggacataatgggaggagaaaaagcagcggaacaaagccaaaggaaaggaaacggcggaatttaattgacaaaaattggaatttaaaaaatgaaaaaacaaatttatgggaaagggaagggcaaatttgaattaacacatcacaaaaataaagtgttatacagagagagacaaataacaaatgaataatcatcgagagcagcgaatccccaaatatgaaggaaaaggggggggggggaattgcgcaacgcaacgcaacacaaccggacgaaacaatcggcgacggattttagggggggggggggaaattgggcaaaaacccccggggaattaaaaagaaaaaaattgtacagtgaataaatgagacaaataaactatacaaaaatacatggaagcacagaagttttttggaagattatatgaacatgacgcaaaaacatttaacaaaaatttgaaaattttaaatgataatttaatttaataattaaacatttaatattaaaaaaataatacaattaaatcctttctttaaaaaaaaattaattatcattttcataaccataaaaactcaataattgtcaaaatttaaacggttctgtccaattattttccatttcgtccgcccattcatttcatttttcgtcctaatattttattttcttctatttttttccgggaattccaatttctcaacttttcttcaacatttctttttttaaagcattcgcccatttcccccatccattaatctttaaattgacaaaagtttatttattttttattttcaataattttaaaatatttttaaaagccatcggtcgcaaaatttggtggacggacgaaaagaaa

SEQ ID NO: 29330 - DNA, 2242 bp, Heterodera glycines
  unsure (1)..(2242): unsure at all n locations
taaaaaaatattttgtcatttttataaaacataaaatgaaaaaatgtttaatttattttaaaataatatatattatttataattaattttttttattaatttatatattttttgtttttttctctcctgtctaacagttaaagttaatgattttttctttaattttttcctttcgatttgtacaaattgagcattttcattttccctcccccccccattcattcatttgctgctgcatttcatgtggtgtgatgatgacggacagcagcagaacatttcacattcatttaacttaatcattcattttgatcggaaaatgaaaataatctttgccccgctactaaaaaatcttaaaaattttctataaaaaagttgcaaaatttcagttaaaacaaatatttaaaatttctttaaaatgcatataataattattattaatttttcattagtaatttctttcaatctttcaaataaaaaacaaggatttttagggtccggcgctgccgagaggcgcaaccagcaagaaaaaaaaaattgaaattgttaccatttttaacagcttttcacccaaaaaaaaaatcgctaagttttgataaatttagcaaaattttcggataaatgatgagataggcctagaaatagtatcaacaaggaaaatcgaaattttcagctaaaatactattttcccttaaaaattaggggtgccgatgggtcttcttcatccatccctatttgttctattgccaccctaaaaattttctacacaatttttcgagaaaaaattatttttatttttttttgcagattcaaatgtcaatttcaagcggcatttctttttggcagaatgtcaccaaaccggtgccatttgaaaacgaaaaatttttggacatttgactgcgacaaatttccggaggccgaagcgaagcaatgggttgacggacgttttccattgaccattcaggtgaaaaattaattacgctttatcagcataaaatttaaaaatatntgactaattttacaattaatatttttggccgcttaaattttgaactttttcccggccctctccgatttggcaaatcccttttccccaaccttgggcctctagccttaataagacagatttttacaaatattattttaaagttaccaaaaagtactctcaactctttataattgaaaaaatcgaaaccgagactcaagaccaaaattctcgagaacattaatgaaatgaagtccaaataattgtcaaacagttaaagcaaattaaaaatagtggcaaaaatcagccaaaagcaaaaattaaaaataattaattagaccaaattttcatggctcttttatgaatcatccttgatcagattttgatctggattcatttatatttaatcggtaaatttcgtccaaatacttttcagttatgaggccgcactttatttcttttttcccttagacagtaaaaatgaagacgcaaatttctcttatgtacgatagtttagcctccctctaccgtagtattatcgttcaaccaaaattcacattcaggaaaatttgatttttaaagtttcaaaatgctgctccgaaaaagtattttcatccatttgaaatttatcacttatttgccagacagaaaatctgattacactaatcattttactctctaaaatttgccacaggtgtccattgcctatgtgctggtggtgttcggcactcgttttttgatgcgcaatcgtccacccttttcactgttcattccgttaaatgcgtggaatttgtttttggctgtattttccacaattggctcattgaaattgagccgagaattcttctccaccatttggtaccacggatttcagggtgagtagaaatatatatatatatatatatatatatatatatatatatatatatatatatataatacatttttttttcatttaaataaaatcatatttttcatcgttcgaacgagaatctatctaaattttgatatatttagattcaaaagaaaaatgcttatcataaaaaattgtctgcaagacctttagttttactgaggctttaaaaattttttgaaattttttgattagattataatcaaaaattaacaaattttttgatgttttagtttagtgaaaaactgttatgcaatttcgggaatttttcaaaggtataaaaaatttctatgaaaaaaacacaatcttcctaaaaaaaattattcagaaataattaaaattccaag

SEQ ID NO: 29331 - DNA, 828 bp, Heterodera glycines
  unsure (1)..(828): unsure at all n locations
cgttttgcaatttaaaaaacatatatttggaatgcaattttagaccgaagaactttcggaggaaatgctgcaaaatgtccgtgctgacgaagcgtcgaaaaaggcaactgaaaagaaaaaggctgttacgagggaaatctcttctcgtgagcagcaagttcagctcgacctcagcctgaaactgaacgaagtccatttccttactttgtgtccattgcaaatttgtggcattttttaggttggcgtcgtcgtcaaacatcgccacactgcctttttgaggtgccaatgcctcttttccccatccgttattattcgctttcagtgcccgaattcaacggttgggtttcaatatgtgcaaacggatgtacgaaatggaagtccgtgcccacatggattcggtggcggtgcgtgcctcccccgcggctgttactttgctgaccaaagtcaacgccaaactcgcggaacaacagcagggaaaggtcggtccgaacaaattcatacacttccaaattctaaaaatcaaacagaaccaaccaaatgaggaaaatgaccgtccggcattgcgcgaatacccaaactattgggaagagaaacggattgaccgttcagtctattggtggttcagaccgatgaagagcaccagcggaacggacgcgataaacatgacggaattgtcggacgatttgcgcgaagcggcggaattgaagcggaaattttcggaaaaggtttgtctgatcgctattgaaggcattcggttttctactgctttttaggccgagttttcaattcgtcattgtttgatcactgtggaagccnggggttcgtgat

SEQ ID NO: 29332 - DNA, 1731 bp, Heterodera glycines
  unsure (1)..(1731): unsure at all n locations
cgtgaccngtgaatcagggcacacctctaaaaaaacccatgccaacaataatcatttcttcagttgtttttgaatgattccattgcggccgtaaatttgcccgaattgtccaacgcgccccactggtaatggttccagcctggcgacgcctgcggctcccaatagaaaatgccaatgccgttgttccccaatgctttcacccgcttgaacatgtcgtcaagcatggatttgctggcacttggctcgttccatgataagccaatctcggccaccaccacctttttgccatatctgttaaaatggcaaagttcggcttttagaaagtggctatattgaggcctaccaaaaagggccgctgaaaattacataaatttttgataatttgttatgaaaatttgaaaaattgcctaattttatgttaaaatttttaaagctgtgggagttttgaatttctcttttaagaattacccatttttaaagagcaaactttaaatatcctagattacaaaaatttgaaccgaacctccaataaatctcagaattttttaaactacaaaacagtcgtctaccgtaccgactgatcatagttttcagcgttgtttctgcctgtccatttaaggtttgccaatttgacgaggtcggataatgtgagatgccaacaacatcaaaactgccaccagctttcttcagtccatcaaagaaccaggtgaaatcggcagtcttataaccattggccaagtgtataaccacctgaaaattagcaaaataaatttttttaattattatgaaaatattggagcttccccagccaccagggatggcattccgaggccccaaaaattttcgcaaatcggaattccggggatcaaaaaattttcggaaatcggaatttcgaccccaaaaacgtcggaaatcggaaatttttcaaaaaataaaaaatataataaaaaattttctaaatattttaataggctaaattttttaattattaccaagtaaaaggtgtttcaaaaaggtttttggttatttgaatattttgcttgaaaaattattcaatgattttatcaaaatctttttttatgtcattttgcattattttagaacatttttgggaaaaggagtgactaatttacacgttttttacggcgcgcttttttcaaaaattttttgggaacatggaggagggtccggcggtgccgacaggcgctgccgggaaaattttgtaatttttaatacgattttttaacagaatttgtccaaaatgacaaaattttgctcttttgagcaaattttcaagaaaataagtatttttagtgtccggcggtgccgataggcgtcgccgagaaatttttaaaaatttcagttcaatttattaacagaaattataccaaaattattaattttttgaaaaaaaatttaaaaaaaatttccgaaaatttccgacttttcatcaaaaatttcggaaggcggaattccgacgactaaaattttttcggaaatcggaattccgaccccaaaaatgtcggaaatcggaattccgtgccatccctgccagccaccatcttaaaaaaagagatgaagcaataaatagagagagagtacgttgaaggcgctttcatatgatgcttaaaatttccaaattgatctggaaaagccctcgaaaatanattttcaaaaaactgccattttggatcaaattaatcagaaaatataatgacatgaagcggatcc

SEQ ID NO: 29333 - DNA, 1371 bp, Heterodera glycines
gtgattgaaatgctggtggattgagtcccgttgatcggaatgttggtggattgagtccctgcgattgaaatgcttgagggttgagtcccagtgattgaaacgcaggagaattgagtcccagtaattgaaatgcagaagaattgagtcccagtgattgaatgctggtggattgagtcccgttgattgaaatgcttgagggttgagtcccagtgattgaaatgctggtggattgagtcccgttgatcggaatgttggtggattgagtccctgcgattgaaatgcttgagggttgagtcccagtgattgaaacgcaggagaattgagtcccagtaattgaaatgcagaagaattgagtcccagtgattgaatgctggtggattgagtcacgttgattgaaatgctggtgggttgagtcccagtgattgaaatgttggtggattgagtcccagtgattgaaatgctggtggattgagtcccgttgattggaatgttggtgggttgagtcccactgattgaaatgctggtggattgagtcccgttgatcggaatgttggtggattgagtcccagtgatttgaatgttggtgggttgagtaccagtgattaaatgatggtggattgagtcccagtgattggaatgttggtgggttgagtcccagtgattgaaatgctggtggattgagtcccgttgattggaatgttggtgggttgagtcccactgattgaaatgctggtggattgagtcccagtgattggaatgttggtggattgagtcccagtgattgaaatgctggtggattgagtcccgttgattggaatgttggtgggttgagtcccagtgattgaaacgcaggagaattgagtcccagtgattgaatgctggtggattgagtcccgttgattggaatgttggtggattgagtcccagtgattgaaatgctggtggattgagtcccagtgattgaatgctggtggattgagtcccgttgattggaatgttggtgggttgagtcccagtgattgaaatgctggtggattgagtcccgttgatcggaatgttggtggattgagtccctgcgattgaaatgcttgagggttgagtcccagtgattgaaacgcaggagaattgagtcccagtaattgaaatgcagaagaattgagtcccagtgattgaatgctggtggattgagtcccgttgattgaaatgctggtggattgagtcccgttgattggaatgttggtgggttgagtcccactgattgaaatgctggtggattaagtcccgttgatcggaatgttggtggattgagtcccagtgatttgaatgtaaggggattgagtccccagtgattgaaatgttggtggattgagt

SEQ ID NO: 29334 - DNA, 1775 bp, Heterodera glycines
actcaacccaacagcattcaaacactgggactcaacccaccaacatttcaatcactgggactcaacccaacagcatttcaaacactgggactcaacccaccagcattccaatcactgggactcaacccaacagcatttcaatcactgggactcaacccaccaacatttcaatcactgggactcaacccaccaacatttcaatcactgggactcaacccaacagcatttcaatcactgggactcaacccaccaacatttcaatcactgggactcaagccaccaacatttcaatcactgggactcaacccaacagcatttcaatcactgggactcaacccaacagcatttcaatcactgggactcaatagctttttacactaaactgaccaaacaaaaaagcaaaacaaacatttcattttaaaaatcattattcaacaatgtgctatctctaaaacatgaaagacacagtagtgtgcatctcaaaccaatacattttttaaaaaacttgacaaatttcagttctgtgtctcatggatgagaggcacaatagtgtacatctcaaacaatatattttaaaaacttggacaaaatttcacacttctgtgggtttacaaaacttttagtgtacatcgcaaaacaattcactatcaaagaattcttttgacaaaagttcacactctgtgggtttctaaaacttggtaggcacattagtgtggatctcaaaacaattctaataattacatataacaggtaatgtgattgactaacataagccacacaccacactaatgaattttctaaccaataataacaaataattcatttaataaattcaacatttttctgacaaatcaacaatttaaagcggaattacaaaatgaaaattatatccgtatttgataatgtgtgaggatcacaaatataattaaataacaataacgaacaaaatatcaaaaatcaaacataaactacgtaatcgaaaaggtatgagtcacaaatcaaatctaagcaacggacaacaaacgaaatactacccatttttttgagacttcttaattggctccaaagtttccgaactacgacgtttaattggtgtcgtcaaaatcgcctcaagattaacgcgcccagcatcaattttaacggatgaaatctcgcaatgtagctgaaggcattcatctatgataataaaaaaacttgaaaactcaaattaaaaccaaaggtaatgccgacacaattacaattaccttcaactttcacaaaaaaattttgaagttcgatctgtgtgttcttaacgcatgaaccaagacgttctaccaattcttcgccattgacgtacaaatcagccctcattcctttcttgtccgcaacgactgcagcgaaatgtttcccgaatggcgaaaacgatgaagcgagagcacaattcattgctttaaaaaattaaaagtcaaaaacatttatttatctctcacacaaaagtcacagaacaaaccactaatgttttatcaaaagcatgacccacattattgtgtcacacgaaagtcacacaacaaacactaatgttttatcaaaaacatgacgcacattattgtgtcacacgaaagtcacacaacaaacactaatgttttatcaaaaacatgacgcacattattgtgtcacacgaaagtcacacaacaaacactaatgttttatcaaaaacatgacgcacattattgtgtcacacgaaagtcacacaaaaaagactaatgttttatcaaaaacatgacgcacattattgt

SEQ ID NO: 29335 - DNA, 1132 bp, Heterodera glycines
tcatcaaagacaattaaggaagtactttatccgcagcattcaaattttttttattttgtgtacatataatgtaagttgccctactttatcccgacccaatcccgtcataaacatgtctgtccgttcgtctcatcccaaccaaatcatatccctctcatttccaatgttatcatgacttctttatcccattcacctcttgcatatgtcatccatttatctcttatttcctttgtgtttatgccgtcattacccctcatcatatccaaagtccattcccattgtgccagtatataaatcctggcaattccccctcgggggctgtgagagatgtctgcggcaaagcaatttccttgacaaattgaataaaatttctcaaaaaattttcccggcgaccctaacggaaccgccggaccccattttaccatatttaaaaagaagtagaccaaatttagaaaaagtcaatatttttggtaaaaaacagctaaaattttgtaaaaatacacccctaattcgggatttcaaacccattgaactgacccactcaagctctgctggtgttgctgttgacccaaaaatattcccggtttttaacacataaatattttgtaaatgccccgcagcgaggggttaggttacccggataaccttacccccaactcggggttgctcttttactacgggtaacgggtaaggttacccgcagctgagagtaaccttacccgtaactcgttctttttctaagggcccaggaagtaattaaattaaaacaattatgaaatagaatgtgaatttttttaatgcattagtttttgttcgcaccatcttgcccaattattattttttaaatgtgcagccataaatcaaaaaataagtgaaattttactaaataattgtgctaattgatgagaaataggaaagaaagaaaacgaatttgtcaataacagaatgactaatgtaaaataagtttaaaaattcatttcccatccattaattacatttaattttccattaactaattactagggctgccaattttatgtaaatacatatttttttcctggcttctccttgctctaaatagaaggaaaaacacttttttttgtgtttgtgaacaaaaaccgggacttttatt

SEQ ID NO: 29336 - DNA, 2165 bp, Heterodera glycines
tgctggtgacgactcgcagcggaaacaccgcagaacaaacaaaaggacgtttgacttcggacttcttcaaagatagccgtcgtgctaccgtcgcgttgtccagagcaagagatggaatgttcctcattggtgacttcaggacccttcaggaagggccggtgtggcaacgatttctcaccaaagcgcaagaatttgtgcccatcttcaccgatgaatatcttggcttaatggaaagcacgaagataagaagagtgaatggcatccttgcaaatgttcatggctactcgccaattgaacgacttgaagagccaaggcgaaaaagagacttccgcaacccgcgagaagagacgacatgggagacgcagccaagaggaagtcgtgccccgccaaacaaaagcttcggctttgatcgaggacaagggcaatctgtgcaaaggaatccgaatgagaagccattgattagaaagatgagaatgcgaacgtgtcacaagtgtggagaacaaggacacattgcgaagaattgccggcaatgagaaagagtaagtccgtggaaatgaatggttaagtatgagtgtgaggcccggggacggtccctaaggggtattggaggagagtagaccgttaagccgtgttcaaaaacttttggcagtgggctatagcccaatacgtattttgaggtctcctgcgttgtctttcttttctcaaaatcttatttttgtccactattgtacctaactgtcttcttccgctttattttctattgtaaaataatacatttaacttttcttaatatgaaataatgactagtgagctacggcccaaaagtattaaaaatgacgtcaaatatttcagcaatggaaaattacttaattcctggaatcccttttcttcttgacggccaaatcgccataaaattcttcactttgcgatatttcactagcaatcatcatccagcaccgtttgagatggatttcgatgactggggagtgagacacatgcactcgtccgagcaagggtatttcgccttgcgtgcggttgagttcggcgaccaacaacagttcgaatatgttcttaatttggcttcggccagagatgtgaagaaccgaggaaaaagggtccgcggctataattatgggcattggcagacggtcaagagagaacacatgctgcgcgtggtcttggaaaaatttcggcagaatgaaccgctgtgtgaagccttgctccggacgggctttgtccgactcgtggaagccagcactgaccgttattgggccgccggattgctgataactgatgaagctatacgcagttcaaataattggatgggtctgaatgagcttggctgggtgttgatgcacgtcagagaccaacttcgaccattgccgcaacaagtccacctgatccacaagcactacatcgtatgccaggcggcagcgcctgactacgttgtggcactcgcagctgagccacatgttcagccgtatgctgttcggattaacaacgaaactgtcaatgctgcccgacaactgcaaattggcgatactttggtgatagaaagtgtggagtggagagaaggttttgagcagcttggggccgaaggaatgaacgacagaccgtgttgggtacaccaggccagactcaactggcaagctacggcttcggccgtgtacagtgtgtgtatgcaccagtgggttcctgccagagccaagatcttgcgttgcgtccgcggagggccaagacacaaccgagctgtctgttccatacgcatccaattagacggcattgaatttgtagtgacacagcgaaacgtcaatggcaacatcggcttggcacgacagggccaatggattgatgtttgggcgattgtggtggcagagcattggcacgcagattggggattcattttgcccccggacgctgtgtttagagggagacaccagattgtgtcggatgggcgtgtcagaatcccggtgtttgtggggtgatgcagggacgaagagaaagagcgtacgttaactgaaaatgtatgaaacaggctagactagaccgcttgagaaatagccattttagtgggctaggttcgagaaacaaatagaaaatgacatgcaggcttcggcctgaaccataaaattgcagaaaagagtcagcaggccatggcctgaatt

SEQ ID NO: 29337 - DNA, 1644 bp, Heterodera glycines
tcaacagatcgcagtgtaaaagctgctctactgctaacaaccccctgaccagtagtcaagtcgtatacaagtgattttgcgccccgacgttccaccatggcacacgagtgctacggctttggcaatgtgcgagcaattaagcacgcacatcgggccagatgctggggcatttgtgctgcaccgcaagcggcgcataagtagtgcctcccgacaccggggagcaagaatattgctatcttgcctaggcgggattctgacttagaggcgttcagtcataatccctcagatggtagcttcgcaccattggtctatcgaccaagcacatgaaccaaatgtctgaacctgcggttcctctcgtactaagcaggattactatcatagcaacaggtctttagtagggtaaaactaacctgtctcacgacggtctaaacccagctcacgttccctattggtgggtgaacaatccaacgcttggcgaattctgcttcgcaatgataggaagagccgacatcgaaggatcaaaaagcgacgtcgctatggacgcttggccgccacaagccagttatccctgtggtaacttttctgacacctcttgctggaaactttacacattcaaaaggatcgataagccacgctttcgcggtccgtattcgtactgaaaatcaggatcaagtaagcatttgcctttttgctctacgagaggtttccgtcctctctgagctcgccttaggacacctgcgttacgctttgacagatgtaccgccccagtcaaactccccgcctgacactgtcatcggcgcgggtcgccgggccaccgggtggcccgacttaacaccaaaatggacaccctttcgggcgcactcccgttttaccgattaagtaaggaatcgatgaaagtagtggtatttcactggcgccttgcggctcccacttatgctacacctctcatgattcttcacaaagtcagactagagtcaagctcaacagggtcttctttccccgctaaatttgccaagcccgttcccttggctgtggtttcgctagatagtagatagggacagtgggaatctcgttgatccattcgtgcgcgtcggtagttagccgacgaggcatttggctaccttaagagagtcatagttactcccgccgtttacccgcgcttaatcaagtttccttggcttaacattcagagcactgggcagaaatcagacacggtcaacgtccacaaggaccatccgtctcctctgttttaattagacagtcggattccccgagttcgtgccagttctaaactggtcgttcagcgccaaccgaagtgcataccctgacgagcatacacgcagctgaagcgctccacaagcagctctcaccactagtccacgcaccatccccgaaagaacagcacgcagccacgggcaaaagccgcctgtttcacgcaacagcccggctgacccgacctttagagccaattcttttcccgaagttacgaatctaatttgccgacttcccttacctacattattctatcgactagaggctgttcaccttggagacctgctgcggatatcggtacgatcaggcaggagattcaaatagcttccctcgcattttcagggggcgtgtggagcgcacgagacaccacag

SEQ ID NO: 29338 - DNA, 1339 bp, Heterodera glycines
gaaaattctctttaatttacaattattttatttttattttttcattatgaaatttcctacattaatacttcttttttgttttagtcaacaaaacgtattcggaaaaagacaaggaaatgttgatgaaaaaatattccgaaattaaaagtgacaatccaaaaattagcgattctaaaatagctaagaaactgaagatgggccaaagcacattgaaggaatggaaatcggagaaaattagcaaaaatgacagcattttctgtaagttaaatcaaaataattcaagcattttaagaatttctcaatcaaacggtctcattaaatatataaggctgtaaaaaccgtttttcttactgtaaaaaagcgccggactgacgccgagctacatgactaatttgagtcgatcctaactgttgggtttcgattcagttcagttttcattttggatttttcggacattttcccttttctcatttttgcccaaaacatttcctttgccattcatccacaaatccatcactctatttgacccattttcccatttctctttggccaaccattttgtaatgtcactcgcttggcccctcccattatgtcagtatttaagctccccaattgcctcttgcttttaaccattcttttcccattctcatcctgacccttactcatctcacactaaaccaatttactttacttttcatcctttttcctttgcttaattcttaaacacaaataaaccaatcgcattcccccttttgtggacatttggaaaagttaatatttggtgaaagttggaattaaataaggcacatcggagtctaagcttagtcaaatacacaacaatttttggtgccacgacccgggagaaggtcaaaaggctaagcaagactagctgaagcagttcagctgtggtaaaggctctgtgcccaaaccaaatccatcaaatgagctggtcttagttgtgtactaccagccgggctgtttgtgccaatcaccaaatttaaaggagctggtcaagtgtgttttccagccgagctgttgtgctgaaaaaaggactaagtgtcttcaaaaaaaaaattgtttaaaaaaaaagaattttggaaaatggctgagcaaaattcttttaattctcaaaagggcgaaaatgtggagggaccaattggttcggatttcgatccaattttgtttacccctgaggagaaccaaaatctgaacaatgtactgactcgaatgcgaacattcgaatccgctatttgccgtcaatttcgtaaattggagcgagaatttgcagagttgaaaattgtggctcacccaattagatgataccgatcgaatggtcaaa

SEQ ID NO: 29339 - DNA, 1353 bp, Heterodera glycines
ctggacaatgacaggctgatgaatgatgatgatgagcatcttgagaagtcggcattgcccaaaaggctatgtcagtgccgtggcggtttggtgccgatggacaatcgtcgagaatgcactttccctctgctcgacagtgccgttctcgtccacgcgtggctttttctcgcttccaattgtgccattttcggcgtcctcctcttcctcgtcttcgtcatcatccaaaatgacatcgctaaattgattaactcatatatccccctataatctccctccactcacatattctcctcctccgcgtccccctcgttgctcgtctgttccgtctcgctcattagtcttaatcgtctcccatcatttgtgttaattagttaattaatccccctccccccgccaatttacaattcgtattcggacagacagaacatttcccagtcgctgagttctttgtcctcgtttgtcttaattggcactttggtctaagcttatccctaattggcaccttcacagacgctctttccccgtccgacgattcttgatccacgtattttatccaattgacaaaagtgttgaagaagcgatgggccagcccggacctaaaatggcagacaaacaaaaagtcccaaatgatcgatgtgatcggatcaacacccaaaaggaaaggccaacctcttcaagtccattctcgtgacggaatgaccatttgcgggtgaaatggaatcgaggagctgaagcagttcgattaagcgattaattttggaaaagtgtctcactgacattacaaattacgtcgcgaagggccaacgtttccattcccttaagcgcaaagttataggaactatgaaaagcccaaactttggccagcagcttctgttctatcgcttcataaaagtattccatttcatagagcgaaatttggccgtctccgtccaaatcgacgcatcggaaccaatattcaatgcttaagggacatttggatggaaaagtcggcacaaatgccaacaaaaacctggtcaggtgccttttgtcttcctcggcaagcaaaaaacagacgaaatctgaacattcggtccaattacaaaactgtcgccaaatggacggaccttcgaagccaatggtttcgatgggctgttgcctaattggccccgtcggttgcggcaccgtccgttgttcgggcggagttcgaatgacggcggcggagaatatgcgatcgatgatccgatcggtcagagccctgaaaagccgaaatgcttcttcattttttggcggataacgtgcccattgcaatgtcggcgcatgtcgtcacgcgaaatgatcatgtcgtggtctgaaattggccactgatttgggttt

SEQ ID NO: 29340 - DNA, 1214 bp, Heterodera glycines
ataagggttaattagagagaaatgattatgaaatggggctaataaattaggaggaggaaagttgtgtcaatttgagacattattagctatttcaactggcgaaaatgtccctaactttcggagtgggaatgtcaattcacccgcctttgtgacaattgttgtgaaattgctctcagacaaagacacaagcacacattcaaaacatacgctgttcaattggacaaattttgccgtaatacatcaatgcgaaccaaatttgtgcaaaaaagattcaatgatctctgacatatatgtgaaagagccgaagaagaagaagaagaagcggataaacagatgaaaggggggggaatttaacaaaacaggggggggggataaattgggggcgggaattgatcaaagtggggggggggttccttttgctttacttattgacgccgaattgcaccatttcacagggcaaaataacggggatcagaagacggtaccaccagcggaagatgcgttggcgacgcaaataattcatccaagtgcaatttcgttcttccatttcggaaagcgctaaaataaaagtaattaataataattatacaattaattggcccaatttaaatttgtccatttttcgccccgtgttcaattagtctcacatttaagaatggtgttcggcaacggaactgaggagaaacgaggcggaccggcacggtcgacatgttcaaagcagcgattgcactcgttccgcctgattgtgggggtaattaagcgataattttgaattgcatttcgccgttgcctttcccttgcaaattgtgcctaattgacttttgtcgatcatttgcttttccccttctcacaaattgctcattctgctcactgacgccgtctttcgccaccgcttttcctcctccgtctgccatttgttcgcccgaattgctctgcttctgatcggcttttcctcctccttttgctgctgctgtgtcactgggatggcattcgattggaccgtcaaacatttcacacacggagccatgccttggcaaagtcattggaggaggaaacattttgaaaaatattaacatttttggtcagaaaacgaagagtgtcctccaaggcctggcgacaaattcgggagcaaatttccgggcgaggcggaaaaagagtgacgaccattccggaacaaattcttgaggggtgaattgaatggacgggccggaaaa

SEQ ID NO: 29341 - DNA, 1044 bp, Heterodera glycines
agcctttgtgaggatgagttagagtgggaagaagatttttatatgtgctaaatatattgaaaaaaagcagcgagatagctaagaaaaaagaagaaaagaaaggggaggagaaagttgccagaggaataataagaaggaaacttacggtgaaagagaaagaggaaaaagccaagaaagacagtagcgaggcagcaaaaaaagcggaagataaggcaatggatgaaggaagagaagaaattcggaaaatcgtgagagaagcagaagaagaagaaaaagaaagaatgagaaagtagctttgaaagggccgctgatagggcaggactcaaaaaaattgattttggacacaatggaagaagaatatgtgccagggaaagtggtcggctacatagaagacccgcgagaggaaaaggaaggggaatgggacatggccaaagcgttgcagaaccgttcaaaagaagacgaagtgcgaataaaaaagagagagcaaagagaagaggggtggaaagagctaataagcggagaaagaaaagcgaagggaagagaaagaccgaaattggtggaaaaattcgtgaaaaatgtgttgggcccagctgaaaacgacgtcagccgaaatcccggccccccccccgaaggtagccgcagaggcccgacaccgattccttgttggaaccgctacaaaaaaaggcctcgcttcgtcagtccaattcgaaacatcagtccggtccgaacacgccaaagcacagttggaacgcagacgacaaacgcatggcccagctgcataggagacgtggtggaacaaatgcaactgatgaagacgaagctggacgaactgatcgccgctctcaagaaaaaggaggaagaaaaaaacaatggaaacaacgagcaaattggcgagaaggaagaacaacagaaagaaaatggaaaatagaaaaaaattaattcttttatctcttatttaaaccattttactcaaaattcaaaaaatagataaatcccttttcgcatgtccaaataacatcatactcatttaaacaattattttgt

SEQ ID NO: 29342 - DNA, 1505 bp, Heterodera glycines
  unsure (1)..(1505): unsure at all n locations
tcccatttttagtactttgaaccaggtcggtctggcctgctatcactccccggccctttagtccaatctgtgcccagcccctaccgatacggaatttccaatcccgcctactttggtcttgagtagtccgttttttttttaaaattttgatcgctcccaaataacaaaaatttattgaaatntcaaaataagaaattattttaaaaaatccgagccatccctcagcttctcagtgttctgctccatgctactatgaaccaggtggggcctgttatcacaacccaggatttttgtcgaatctgtgcccaggtcatagaccgatacggaatgtccaatcccgtctactttgatcttgatcagattttgatcaatcttagtctcgatttatttgtttttaaattttgatcgttacctactctttcaagaagttatttttttataacaaatttgttaaaaagtgtattacgaaatccattgtccatatgtccgttcaacttggcaatgccgttgttgtccacgccgtgaagaacactttccgcccgttttcgcttcgaagtttccgataatggtgcgcatgcgcaaagttggatcagtgccagcacaaaaatgagttttgatgacaaaattttgttgaacatggccaagacgtccagctaaatgcaatgcaaatgtttttgcgtttataccgcaaaaaagtgggataaaggacatgggagaacccataaaaacaggatcgggatcccgcgaattttctcgggatcctgcgggattaaacacgagaacacgacctcgggatcccacccgattttccaaagtcttcgggacttatgaggtattaatcgaaatttttataccggtggttgccgttttatgcttcttaaaatgatgcagttgaaatcaatgcgattttccaaatttttgttcagccgaaagaaagactgattcctaaggtcgatgagaatagttgtttaatgatgctaaaatagaatattaggtaaaacaatttttaaaaaattattaaaagtagattggcatttgtcgagatggaataatattagttaaaataattttttaaaaataataattattaaaaaatgatttactgccaagagtgtgtccatgtccttcctacccaaatgtttatatacaaatctcatcatattacacatcagcatggatatgagctatcatcatcattagctaatttttacactaataagtgtagggtggaagagaagctcgagagtttccgtctttccgtgtctgatgaaagaaatgtcactaaaatccatccgtacagaaatcacatttttttcattttttggcaaggccaaaacattaattaaacaaacaaaaattgattggagcgaggaattaaatcaatgaaaacattgaaataaaattttatttcaatcaacttcttaggtatgggatgatttaagattttttttatatattattaaatatgtattttttgtggcaactttttaacagaaataaagcca

SEQ ID NO: 29343 - DNA, 865 bp, Heterodera glycines
ttgaatttcgtgaaagttttaccgaaatgcaattcaaaatcgtaaaaatttcgagtttttggcacaaattttgattttttttatgaaatttcaaaatttctaggccccccccccctcgtcggaaagacctggaaaaattttgtctgaaatgggatgaacgcgcagccaattcgtaggtccaactcctgccgggcgtccgccgacagcgactcgttcacatttggccgaccaagcgaagccatcgcatttttaatttctttttcggtgatggccgagaagcgggccctgggcaattagggaaaagtaattagttaattttgagggcgaggagggggttaaatgggcgatgaaccatcgcccagccaattgaagattaaaaacccgtaaattttgagaaatttttgcagacggcgggggctaaaatgggcggcagtgcgagtccctgtccctctccaaagaatgccatccgggaaaaagtagggaaattgggggaaatgaattgaaagaaaaaattaatttaattgaaaaataatggaaattaaaaaattaacttaaattaaattggacgattttccgaaattacatttaaagaggtaaaaatggaaaaatttttttttcaatttggttaaaattggaaacaaattaagatttataaatgaaaaaataaggggaatttttgagctttttaaagggggtggaaaaacgggaaaaaaatttaaacactcgaaaatttgaagatttttattaaaagtttaaaaagaaaaacaggaaattaaatgcatttttcggcactggtgcagttttgtggtttctgcgtaaaattaatttaaaaatttaagaaccattttttctaggataaaaaaat

SEQ ID NO: 29344 - DNA, 1788 bp, Heterodera glycines
tagggttgcaaccccgacgtcggggttggaaaattcggggttcggggttggaagtgtcggggttcggggtcggggtttttcaatttttgccttatgccaaatagtcaaaatttttttaatattttttcggaaataatatttattaatttccataataatatttgtattgtttttatatttttttatttcttttttatcagaaattttgtatagaataaattttttttcttgaaattttaaaattttttattacttttttgttttccaaaacatcttttttcacgtcgctcttttctaaagacttaaggagaaaggtacggcgtccggcggtgccgataggcgccgccgggaaaattttgaaaatttggttagatctgttaacagattttgtccaaaatatgctaaatttttgcgattttgagccaatttttttaataaggtttatgactttttgggccctgtatgccgataggcagcgctaaattttggaattaagctctattttctaagatttttcaccaaaaaaatttatgaatttcggtaaatttttgtttttcttcgatatgtattttgtcaaaatatgccaagattgtcgatttctatgagtatttaatttaaaaaaaacaatttgtaataaagaaaatgactaaagaagaaaacgtcaaacggtatcgaactcaggacagaaagtaatgtcaatgtggtgcattaacctctacaccacattccaaatgtccaaatcgagcaaattttctttatttaataaaaatttggcaaatggttaaaaaaattcaaattttgtctaacttttttgcattttctcccacgaaaatgccattcttaggggtgtatatttaaccccgaccccgatcggggttaagggtcggggtatgaagcgtcggggttcggggttttccccgaaaatggccaaaaatgtcgggggcggggtcggggacgcaaccctatttttattttaagattggcaactcatctttcgctggcttttattctctacggcattttcctttggaacggactttctcatctttttacgccaaataatgtaattgttacgccaataactaattgtagaccagctcttccaattatagcatagcaaatctccggccattaaaaaattccgagggatggtacacggcaacaaactgatgatttttatgactatcataatcggttccattcatttatttgtagaaatatattcacgcgttctttgattttgctcattgtcaggtgccttcgttgctggtctcgacgctggactcgtttataattcatggccaaaatacgccgatcggtggattcccgagggagttttgtcccatacgccgaattggaaaaattttatagaaaaccctgccactgtgcaatttttgcatcggaacatggtgaaaatgctatgtgtctttgtaattagaccggaaagatttaggcctatttgacactgattttggccactttgacatggattaagggcatccgaactccgctggggtttcgttcccgtttagcacttcattcgcttttagtgactgcatggctgcaacttgcgcttggaatctcaacactggtatgaatgtattggaaaatattttcacctaattcttttttagttacaccatgtccccgtttcgttggcatcgatgcatcaaaatggggcgttgctcctttatagctcagttatttggctgtcaaatgagctcagaaagataccaaaataaatgaaatgtattttaaaatgaaatttcttaaagtacaatttttgtt

SEQ ID NO: 29345 - DNA, 1048 bp, Heterodera glycines
ccgggcattcgggtctaagtccaaccagaaattagtacacgtctaacattacgtttaaaagaattaactaaaatatatgattgccaggttcccatacttaaattttttaatttacaagaaaaaaaatttaagcacaggggtgttaaaattaactaaattttaattgttttttataacattttacagacttatttattttaattttttgaaattcctccctctggtgcccaaacttcccggtgcccaagcgtttttagacattggacggttcagtcccaaagccatttggacacttcagtgccgggtctttaactctgtttgaatcgccgccgacacctaaaaataacaccattcgtctcgtctcatcgagacaaatcgaattttctgtcaatagcacctattttggcatttttcgagttttagcacctgttttggcctttttccagaaatttcatagcaaaaatgcaataaaaacgaaaaatacacccataagaatggggccgggccgttttcgcgtggagtacgttttcgcgtggctgggggtcgttttcgcgtgagtgcctatttaagactgaaattggcggatagtgccgaatatcgatttcgacttatttcgaatcccgaacccgaattcaaataattttcttaactttttttttgtttttttctttcttgcggcttgtaccttctataataatttgtcagtttgttcgaatgtgcatcagacggaaaaaataaataaaattttataaaaattcaaaaatttaacaaaaaataacaaaattcgggaacaatctaaggtcgaatctcatagtttcgggaaatatcaacggggaaattgataatgttctaaattaagtcagaaaacaatttaatgatctgaaaaattcaaactgacaaaatgaagcccagggctttcatttgatgggcccaatccgccatagaagattttccataaatgagaatccttaatacagtgtcatgatcaaaatccgaaagaaaaataagatcaaaacaaattttgctaaaatataatagagtaatgaat

SEQ ID NO: 29346 - DNA, 892 bp, Heterodera glycines
  unsure (1)..(892): unsure at all n locations
cattcatgtccaaatatnttggaaaggcagtttggcgtgttgcccagcaaagcgacacttttcatggggtattttattatttattcaatcaattattttaacaccatgtctggcgaaggtgggggggggggtggagaaatatagtacatccattaggattacagaaattctagaaatcataatcttaaaaattgaaaatttgtttatttagtgccgtcatggtgccaatggccggctttggcacaatgttttccgggctgatcattcatcattttcgcttgagttgtgtgcgaactttgcagtattgcattgcgtaattcctaatcattaaaaaaatattttttcctaatttttaatccattttatataatttacaatacacgtgatgattgcatttagcctggtactgtgctcgcttttgctttcaccgatgtacttcatctactgtgaccatgaccagttggttggcattgaacgccattatccagttgatgagtgagtcattttggagcagctcgttcttcccctttcaaattttttttaaaattcttacaattagtaggttttcaaaattattcctttcaactagttttaattttttttatgaatatctaaaaataatcgaacatcatgaaataaaagaacgttttttttcgaaacaaaatttttttaatcttttcgttagtaacgcaaatttttatttttaaccatttaaaaaaaagtgctcctggcaaccattaacacgcaaaaacggacacatttgtctacccatttggacgccgttgcaacgcgcaatgccactgttctccaactgagtatcaccccgtgtgcgctgagcacatttgacgctcacaaatggcctactattcgccctgctatgccggctgcccat

SEQ ID NO: 29347 - DNA, 1029 bp, Heterodera glycines
  unsure (1)..(1029): unsure at all n locations
ggaatgccggagatttgagtcccagcgtttggaatgccggagaattgagtcccaaagaattgaattgcttgtgggttgagtcccagagattggagaaaaagccaagaaaatgatgcgaggccgcgaagcggccgagccaggtcgattttatcattcataattctataacacaatcgtactgcctagcgggggatgcgccgaaggcgctgaccccngctagtgcataaaaaaaagaaatggacaattatttgacatcggaacatggtaagaatgggaaccggccactttggcgccagccattttggcgccaaacgctataacatttttatttctcattcaaattaaataagcttgatatcattttaaagcgctagatattccctaatagcctgcaaactttcaaaaaatttaattgaaacacaaaaaagttatggccaaaaaacctcaaaaaactgactttttctggccattttggcgcggcacgctatatcttttgtcaaacagaatttattttttctaatattttgcaggctaataaagaacacttaggcctatttaatggtatcaaaattattttatttggttggataagaaaaaagttataacactttaaagttcgcggcgccaaaatggcccgcgccaaagtgaccccgacccaaaaaataattgaagaaattgttggagaaggcaaaatttttgaaaattataaaaaaaaacatccaagtttgaaatgtctttttttaaacaggcaaaaaatccaaaatcaaaattcctagtgaccgggacacccaaaatacactgaaaattggggaaattttcgaaatccctaaggggctgggaatttttttctagagaaaatgggcaagcccactggaaagggcacaaaattctctactgatttatcttttgaataatggggctatgacttttacataaaagctatacttggttgaatatttgatcaccataaaaatgatcaatttttgatcagcgccataactttttctagacgcattcaattaaacaata

SEQ ID NO: 29348 - DNA, 1320 bp, Heterodera glycines
  unsure (1)..(1320): unsure at all n locations
tcaagtgcgtttgntgctatatcatcgcttatcctctttcagtgtccaccggcttcacttatttcatctttcttttcacttgcaattcgctttgtctgtcctttttaaattattttaattgtttttttctatttttattttttttagtttatatgcttttttcgctggcggaatatgtggtcgtggggacgaattgtttgttctattttttgatgatttgggagatgaacggctgcaaattggagctgtatgtgaagagatgaggggaaaacaaagacacttttgttggactgttgagatttatttgaaaagaaacaaaagtgaaacaacgaaaagggaaattcgcctcggggacaatcggaaaaatcagtggaaaaatagcgaaacggacgaaagggcgaaaaataaaatgaaaataaattgggtaattaatggaggaaggaaaattgattacaaaacaatcaaaaaaagagatgatttatattattttattgtgggagaagatacggaacggaagaaacggacccgaaaaaatacggaaaaaacggacattccctcggggcttttcttttgaaaggccccgggacggtcacaaagaagaagctcatgccaacaggagaacaacaaaagcacgaaagatgctcaaaatgggagaatgagtacaagaaaagcggaaagaaagaggtgaatggcggtgaattcaaagcgaacactgactaattaattaattaatggtcggaataatcgttaattaattaattgattaatatttgtggaggaggaggggactaagcttaataagcccaattttgaagaagtaactcccttattttctgatgatatgttcgcctgtttcttgggtatgatgaaatattgaaaatgcaataataccaattacttaattaattagcaaattaatttgttaattaattatccgtctgccccctgtcccccccccccacttaaatggccctccgccgttcatagatttgtccttttttgtgtccccaaatttttctcgtcgatctctttcccccttatttcagcctttggcccgtctctctgtactgcttcccgttgatgttccgcgtcttcgcatttctctccgcctgcgccgatcggccgaaacagcacagtctttttttgtaacaaagggcgactgagaaaagaacggcgattgtaagcagcgaaatgagcaacacattgcgtagcaattgccaatcttcttcctccgcttcgtcctcacttccgtttgggcccaatcgcttctctgtccgatcgtccgactctccgccgtccctcggcgaagacggactcggc

SEQ ID NO: 29349 - DNA, 1583 bp, Heterodera glycines
tgctgaggaaccttctattaaggggcagaattgaaggcgcaaccagtgctatactacatgtatagtgcaaagaaaaatattgttaaatcagctgcagaaaactattttcattagaggggatgaatggctaaatgactttcatgatgaaaagaagaaaaatacaaaaataaccaaatcattacttatcatgtaaaagcaaacataaattttcggacattggaaaaattccaaaaagccaaaatatatggcaaaatcaaaaaatattaaaaacataagcaacagatgcgattcaatcatttgaaaatatagattaatatattaggcaaacatttattttccttcccctttagaaattgtccataaatttttgtcgtaaatattcacaaaacaatattttattttactgtaatcttgttccaaggtaagtgaaatgcaataaataacgcttggagataaaagaaactggcgaaaataattgactcaattaactgtcgtgaaacagttcgggaaaaaacttgcaagaaaaggcgaaaatatttccaacggctcatgtgcggttcaacaagtgagcaacaaaacatgaaataaaagattctaaaaattacttgacttcctttttcgaaattgtcattaattttttgatgtaaatattcattaaaaaaactttgtttttattgacaatttttttcgataaggccttgagcttaaacaaataatgcatatgcgtagagataaaagaaatcagtgaaaaaaattatcacaaaaatctgccgtgaaacattacaagaattctggagcagtgcttcgtgattatgcgtcacactctgctttgattggccatatctcgcctgagagtggcgataggcccttagttgatacgtctgaatatgaagagcgcgccgagctctttcgaacctgcaaaactccatatttttatggccagcatagtaaaataagcactgaatgaaacgggcaatataaattgagatgaatggagttttcaaatttaaaaaccttctgcattttctgggaaaatagttgagaattttttattcgagatttatcacaatactaaggggtgggcgcagcgaattcatttgttgagaaagtattattttttgctgaggaacctactattaaggggcagaattgaaggcgcaaccagtgctatactatatgtatagtgcaaagaaaaatattgttaaatcagctgcagaaaactattttcattagaggggatgaatggctaaatgactttcatgatgaaaagaagaaaaatacaaaaataaccaaatcattacttatcatgtaaaagcaaacataaattttcggacattggaaaaattccaaaaagcccaaaatatatgggaaaatcaaaaaaatattaaaaacataagcaacagatgcggttcaatccatttgaaaaaatataaatttaatatatttaggcaaacattttattttccttcccctttacaaaattggccataaaatttttgtcgtaaatattcccaaaacaaatattttattttacctgtaatcttggttcccaagggtaagtgaaaatgcaaaaaataacgctt

SEQ ID NO: 29350 - DNA, 1852 bp, Heterodera glycines
aagtacaccttttgaaaaaatagaaaatttcgtcatagaaccgtccaattcgttgccgactgtttcatcgccaatgtcataacgtttaaatccaaaaccagtaatttgatagattcggtttcgaaatctcgtgagaagttggttgttagccttgtaaattccaaaattttgatggattttattgtaaattatggccaaaattgccaaagtgaagttgactctttttgtccattttttattcgttttcattcattagaaattgaaaaaaaaacaatatgctaagcgatagcgttaattatgaccaaatctaatactattcgactttcgaatgctatcaaaaacaatttgtgattcggtttctttcgagaaaaatagaaaaactaaaatttttttgtcggcagttaaaaatgtgtcgtaaaattgcccaaaatataggaccaacgatgccggcattggcttcgtactcgacaaaattcgcccctttttgtccccgtcggtctacgaacgcatggaatgggcgcaacaatttgtgcaaagcaaattgagtgccattggcgtcggagtggcggccaccaccgccgctgcggggaatgcgacagcgataaatggcacggcgaatgcgaccgccagcgcagtgaatgccacgattttctccgggcttttgcaaaaggtttttgtttgagttcaggattggcatcagaccggcacatgtgccgggattcaaaacccggttttgtcaaggttccaatcccggccctttaaaaaaagcgggatcgtgatcccgtgaaaatcccagcgagatcccgacaactacgctggctcttttgaccaacacaaagtagaaaattcacaaaaatatctttttagcatgaatggcatggaatttcgacccgattttcgacattattgcggtcggaattccgatttccaaaaaaattttgtgatgccactgattgctgaaacttacgctttttgtggtaccttataagaaaaaagaaatgcatttttttagatttttttccgtttgtcctccattttccgggaatatttcccaatttttaaacgcatttcattttgaggtgtccgactttcatccaattggtgccaaggctgttttgtggatgcccgaaatcagcaaaaccaacctgctctattttctgctgcttctgctttgctgggaaggtgctgtgcaaaattttacgatttttttacgaaaattctttttttttaatatttttttgcaaaattttgtcaggttgcattgcattggccaccattctgaagccgttcctgtcctttttcctctcccggcttccaattggcgaccgttggccccgtcggaatgtgccatggcttttggtgatgaagcgaggcaaacgcgaaatgaaggagggacagttggagagggcggccaaaaaggatgcggtccgtctttaaattttatacatttttcctgaccctcgggactgaattagtcaatttcttgtaaatatcgttacattttatgaatgtgctcagtttttggaatagatttgccattttcccgaaaatttgccgcaattttattgaacttcgtgactgaaataggtagtatactataaatttacggtttcatttttggaacaacataattttgaagagtatattggccgatatatcgtaaattttcctgcaaaattcaatgcaaaagctgaataattggactgaatggccgattccttatgaaacaattcttcgtccatttaggactattttctgttttccgaatgggactcgcattttgccatcgcatttttgttctgttcatcggtaggcatttcgcatttgtaccgtcggcattggatcaccaacg

SEQ ID NO: 29351 - DNA, 1131 bp, Heterodera glycines
ttgtgccgtttgagaaggccacgcaatctcccatcgcgacgacattggatttgtcaagcgccccaacaaaagtcaacacaattgatgaacgtccccgtcatttcaaaatcggtgacactgttcgtgtgttgaactatggaaaatctggcaagtcaaattggtttgaaggcaaagtcgtcgctggtaaaggtctgatttggaaagtcaaaattccacttttaaatattactgtcaacagacatgtcaaccaaatgcgttcttttgtcccttatcaatcagaaacgacgtttctgaatgatacagttgaccaagttccgcaacaaaaagtccttgccacagcactgtcacgactactccgccgaccaacttgccagttcaaccaacgcaacgtcctcagagacaacgccgtccgccgatacgttactcgccgtgacgacaacattatttaagaagggatatgttggattttaatttaagaagggagatgttggatatgatggattttaattattatttgaattagcgccaatacagtagaaatgatgctcctgttgtttttggtcgccatattcttcagtcaatattctcccccgctgttttgttttcattcattattattttcattatttttatcatcatttttcggttctaaattaaatctgttttgctccttccatttttgccttcctctgactccgtcgtcatcattattttatttgttttgttttattatttatttctttgttatcatttgtcttccaacaataaatttaattctgttgttccttgcggacacaacaatggcgacgcccgagtgcatattttgtgcattaccgtgaacttaccaaaaagctactctgacggccacctcacataacccataacactaaagttgttccccatctgacgcaagcctgaagagtttctcagtatcttgactgagtaaagctaagtgtgtgttcggtatttgccaaatattgcaagtggcataaatttaattttatatttgttattgtcactttgaattcattctctctataatggcgacgaaggaagagctcaaaattattttggaagcgcagcaaaaacagtttttggatttaatttcaaaaattttgcctcaaaattcgg

SEQ ID NO: 29352 - DNA, 1175 bp, Heterodera glycines
  unsure (1)..(1175): unsure at all n locations
ctcagggaccatttggtattttatgtaaaagaatttttagtttagaatttaagttgttagtttttccttgcatttaatgttgggttttcgtgtagagagctacaataataaatgtataaatagtagcttcaactcagaatttagttaagaaattattttgtttaaattaagtataaattttcttaatttatttattctctatatgaaaaatcactttcttgtttatttttaattgtttttatattatggattttcaattaaatttaatctaattattttagtataattctttagatattaattgttttatttaaaaatgatatattaagttattttaaattatcattgaatctatgttttattataaataaatatttttattttttgtgtgttcattggaaaaaacacaaaattactatttctactttcagcctatttataccatgtcatcttcatcgatgattgcgaaaatttttggcttttcttaattaaaaaaacactatatggcaaatcgctcattttaattttcaaaaattgtttattattttgttaaattatttatgtatgttttggtggtaaactaattaaaatgattgaaacactgaagatgatggccctgagcatctaggactaaaactaaagactagagaccggacaactggggtcggagggatcccgagtcgggatcccgacttaataccgatcaatcccgaacatttcgtaaaaacgatcgggacggatcccgactcgggattccgaccgaatcccgatcccgatcaatcccgagattttttttcgggatccctgcgggattatcgggatttgcaaaagctcaatttttttacgttttgtgtcaaagttttgttataatgtttctttaatatttataattgatcaattttattgaagaaaaataggaatgggaattatatcagatttttagaaaattttcaaaattcgaatatcatacataaaaaatcagattttaggattagaacatttaacaacatagctttaaattgttttttacaattcaattaatataaatttttatattttcgcctcctatgatcagttttaacaatttgaggaaaattagcaaatcgttaagtgcatcggagccaaaaaatcagatttttatgatttttttgctgtttttttttcanaaaacttta

SEQ ID NO: 29353 - DNA, 1379 bp, Heterodera glycines
tttgaatttgaattttataccgactgaaggcaaaacaaactaataaatattttcgtcggaaagaaacatcaaattaacgagaagagatcaattgtccattcaataatctccaaaagggcgatcaatccgtcactggttctcccacatcttttcgcacgtccagcatctggtctttggagatgttaatgtccctgagcctttttgagtccgcgaggagtctacctgaacgggtgggtgtttattgttaaaagcaatttatgaaatcaaccatacgtgcgaagtaaagcaacatttgagccggcactggcgtcactggccacgcacgatggatcttctcttttaccacggctattgaatcgtccatgtcaaaaatgagctcgcgcgcattggtgccaaattgaacgttcaaattgataggcgtaggcgctccctcaacttgttccttgtacacctaaacaattgaaattttggccaattctgtctaaccccaaccaaacaataagtcaaaacaacttagtttttcaattttgaagaccagcgacctcaaaaccccatatttttatcatccacccaactgggagcagttcgtttcccaccccacccctctccggacagttttttaaggggggaccgcgatgggtaaagggtgtaatgcacaccaaccaccttcgtcctcggcatttgaattcatcgcgctgatgttcacagcgccaaaattttacgtcacggtcagcattgaacatatggaagacatagaggcatccttcatgttcgagttttttgttgtttcgtttcgttattatttgattgttttccattttcgggctatattaaaagatttaaaacaaatgaaatgtataaaaatgcaaaaacaattttctgatatgggtgcactatgtttccaccccgcacaatttcagtccgaattagttaaccccgtattgagacgcaaccggccccataagtactaagacgcaaccggccagacgcaattggccagacgcaactggtcaagacgcaactggccagacgcaattggccagacgcaactgacccgtttcgccatatctacccgaaaaccccctagaaaatttaaaaacaatttttatttttatggtctgtttgcagttttttaactaaattttgcgaaattaatttgcatttatatcgaacgattcgtcgaccactacctgcgcaccagggatgttgcgaatcgaaaaataaaatacgaataatacgaaactaaaataaaatacgaaacacgaacacgaaacgtcctaaaaacacgaaaatacaaatatacgaacacgaaacgcgaaatttttttctaaaaattattcataatgaaaatcgtaaattttgagattgtggtgcaaaaa

SEQ ID NO: 29354 - DNA, 1254 bp, Heterodera glycines
  unsure (1)..(1254): unsure at all n locations
attaaaaaatttagaaatttttttattatattgtatattttttgaaaaatttccgatttcttgcaccgcaaaaaagtggttttgaaaagaaaaaaatagtcaaatttatgaaccgttaataatttgatttccgatcaactttttaccgtcggatccaatcgaaaaatcttagtcgacccatcagccccttttaatgcatcccgccagcccctaaaaatttatttttcagcattttttgatttttggaaattttttgaatttaattgaaattttttcgaattttccaaaatcccgcaatcccgcacgggatcccgcaaattttaaatgcgggacttgcgggattaatcccgcgggatcccgtcccgcaaaaaattttgagttccagtcccgcagcgggatccgcaaatttgaaatttccggtctctactacaaaccacgtaaatagtgtttttagctttgtttgatgcttctaggatcctgttttacttccatatttttccatatttcagatttttgtccatatttccatatttgacaatgtgttggactcataaagtttaatagagttaaaatatttgttttaattaacccttattttcctaaataccaatattttaagtgaagaaatattgtaaattttcaactttcaacttcaaacgtcaaaaaccattgccagaaaatgaggaaggagaacaacaaaagcagtgccgcctcagcagattctgatgccaatgccaacagtggtggcgatgcttctctcaccgcccccactgaagaggagggcgaagaaatcagtgccaatgagcaacagaaggagcagcgcaagtcgctggacgcactgtacgctgcggcacgcgaggagttcgatttggacatgagccctttggacagtgcgatgaaaacgctgcgggagggccgcgagatacaaaagttgtccgtgctgcgcaacctgtggtcgagctggtggagggcgagccggacgaggcgttacaccgcctgttgcccatgatgcaggcaatgttttggacctgggccgggcggattggactttcagtttgtttccgtatatctaaataaagtatgaacaaaagcatgagtacatcaaaaatttcgtcgcagaaataaaaaaaaatttcaaacaaatttttcaaggaaaaaattctttgaaaattttttatgagaaaatttagtgaaacgtgnggggcccttcccaggatcgctgtagtccaatattatccagaaatactttattgt

SEQ ID NO: 29355 - DNA, 1524 bp, Heterodera glycines
attttatgtcgctttccgcgacattctccgggcctcgaggatggcgacaattctgttgtcgtcatctgtttcttttttgttgtcgacatccatcggttcttttcaccatcggttcattggacgtcgttggaccacacgttgaggacggttctccaggtgtccatccggtgattgggctcggtaacgtgcaggaggatgaagttcatcctcctctggtgctctccaagcagctctgactcgatgtctgatgctgataagctcgatcgggtaaagatcgactaacatccctccctcgtgagggctgaagcccacatattcttgtgtgcacggtattaatgggtctacttggagacccaaccgcacaaaatggtcaaagactgttaaacccggagaaaggtagagaccctccggaccataacaggtgagtccatcgaaatgaatatcgacagctctgccaaaatgttcgccaattagagtggctccttcacgaagcactctgcaaaggtcctcatcgacagcacggcgatcccgtgttgtctcataccagtgcggtccataagaccgctcaatccatgaactcaatgactcactttggcgatgagcgcgtggttcacgtcggataggaactctctcctcctcctcttctctttctgggtcgccaaactcaaaaaagcgatcgttgaaaatctgcattctcgggtatgttcacccgacgagccgagaagaaaggaccttctcgaaagggaataggcatttcccttatgtttgaaaaaaaagtggttgggtgggaaggctcccacccttttatacaatcatccatcacgtaaatcacgtgatcagactttgaattgaaatttttcgatgaatcattcgtgtgagttggataggctcgtgccaacccaaacatgcagaaaatagtgagacagctaagaactgtcaccactttggctttgctgcgagtaatcattccatgttggttttggttgaccgtttcatcaaccgagtgagaatttttgtcctcatttttcttctcatttggcaatttattttcccaaggaaggaattgttttttcttttgaactatttgtagttttttcttcgtttcctttcaagtcttctttgccattattgggaggattttctaatcctacctctaatgggaagattttgttgactggtcgtgtaataatgacttttcgaggcatcgttccatacctctttgatttaatgccaagaattggcatttccaattgaacgcttctaatggcacctggactgccattgagctcaattatttttcccaaagtccactgattccaaggagtaaattcctcatggatcaggactatcattccttcttttggctctcctgtgtcttgtagatgagaacctttatgatcaccacttagacctttctctaaagaggagaagggactcattatgccatttattccagaagatttcatgggcttcttaggtgctttgaataaagagccaatttctccgaggaagaaatttgcttat

SEQ ID NO: 29356 - DNA, 2254 bp, Heterodera glycines
  unsure (1)..(2254): unsure at all n locations
tacacataccccnggtggcatcccgacgccatgccgttgtttttgttgtgctgcagttgttacagcgagacacggacggggacacgcagccttcactgtcataatcctgaaaattttttttaaaattttaattaaaaatttagttacttaacacacctgactatgaccattttagaaataaggatcagagtttcgatatggagtcgggattttcaaactactagtaattcaaaaagctcacaatgaaaaatctaaaaaaaacatctcaaaaaatttccgctcctggccttacaatttacgggcaacaaaacatgccaaaaatcccccagctttgccaactgagcgccaaccgggattttcaaaattggattttctccattaaaacttgtttaaaattatcggattttgttcacttttggatgtgtcgaagactataaaacacgcgaatatcgagagtagttctaccaacacaatcacaaacatgacgacattattccttttttgttcccacctgttgattctcacgtgagcccggcgggcttgcctccatcaccatggcattatgatgatcactggcgtccagcttgatactgttgttattgttgttgttgttggtgtgcttgaacagttggaagtcgtcgccaaaaaagattccgccgcccccgtcgggtggactcgtcgcgttggcaccgccgcagccaatcataacaatgccgccaccatcattggcattgctaccattcttcaacagcaacggttgttgtgccaccgctgttgcagttattatgtgctgcgattcagcagcagcagcactaagcaagttgggcgaggttgtggcatctgttgaattgctactaacaccatcacaatttgttgcaccgctgccgttcagttcggcaccgacaccggtgacgccgccgtcagcagcaattgtgccaatgccaccaatgtccattgccgtcgtcgtttccgtggtcggtgtcgccgccgcgttgttgttgttcagctgatgctgcaacagaatggaatagagagcggccgcctgctgtgttgatgccgccgtcgcagcagcaactgatgaagcggcggaggatgaagcggatgaggcagcgctgcacgtcgacggagcagcggcatgaacagaggacgacgagacggcagttggcacaatgccaaacaggttggccaacaacagctcatccgtcgtggttacggtggtcgtcgataacgccggcggcgatgcttcaacacggtagccgccatgcgtcgttgtactcgttgccgtcgtcgtccacggcaaactgttgttgctgttgttggccgtccgtgccggcttccgcttcctgctgccaaccgcggttgtcgttgccgatgttgttggcattgtggtgccgccggtgccagtcgacgacgcaaaagttcccgccgccacggtattgatggcaccaccgctgccgccgccattgtcaccgctgatgttgtgccgctgctgttggtgatagtaatggtcgttactaccgatgatgccaccatcgttggatgccactacaatttcctcctttaccgtaatccctcgcggcgatggcgacgatttggcaccaccgtcaccgttcgttgtgatggcggcgccattccacgtggcggatgatgtgtaactgaaattatttacacatttatcaagccctaagtttgagttcaatcgaaattttcggaagttctagtgactaaaaaaatgctcgttttgtcgtgggactcccggcgggtgccatccgagtctctaaagaaaccaagttggcacggctcaagattggaacccaagactttatctcaggtcgagactctcgattatgtcgggacttttctttttgcgcttgtccttttggcgcttccacctcggtgtcggcattgttggcatttccttgacgcccatccgtttggaaaattgaccatttgtccttgttggaatgccttttgtctcctgctgttgctgctccgttctctcctccgcctcttcagcggttggcaccaccaccatcccggcaccattattcgttttccggccaacaacaacagctgcttcaacgcgagccatttgctgtgccaatctgtccattttgccgttcagttgggcgaccgcgtgacgcatttctgtggcacaatgaatggaaattggtaaaaaaaaaattacaaaaaattttaattccggaattctgttaaggtctattcaggaaattcgagtcctggtccggatttt

SEQ ID NO: 29357 - DNA, 1113 bp, Heterodera glycines
aataaaaataaacatcttgttgcaatttcgtttgaaaatttagtatttatgatgtgattagggtgggtggaattgcatttccggtctaatggaaacaacggaaatttttctgaagcaatggagaaaaaagacaaaatttaatggaaagtggaattccacccatctccgccaatttgctgtgccacttccaaatcactgctttcccactcccccattggttcattcgcttttctccggcaattccgcttgtgccacacttttgaaggacgagcgcaccaaacgcgagttcaacggctgcaccgcacggatgggctgcattgtttcctcaacttcgtcctccgcccgactctttcgcagttggcgcagcctttccaattgtgccgtcgaaatgggcaccgccgatcggcacacgacccatttgacctgtcatccgttggcattttcattggcacttttccgcttttgcctaccgtttcgcggaaaggctccgccgtttcggagccgtcgtacagccaaaactctttgctcttctccacgggcatcagttgggagaggcgaagcgaatgcattgggcactcggcgccgcggaaagtgacgcgggccaaagcgtcgtccagcggcgccagcgtcgcgttgtcctcgaggttttcgttgaaaaacaccgccacggccaacactccgtccggctgcttcaacgcttccccaatgttcggccatttcacgctgcggtgcacaaaatgcaattcgccggcgtagccgacgccgccgacggtgtgctcagacccattcattggctctgacaaagcgatggcaacggaaaatcaaatgaacggagggggcgggggggggggagggacggcacctgtgccccatcgaaacacattgctctccatgtggaactctatcggaaatgcatatttttgtactggactgtggaaggcctggaccgtccgtgaaagatgcctttaacgtggttcgaagcttctacggatggatttctatatccatattttgcatatttttctcatatttcgcgatttatgtccatatttcgatatttttccatattttggcattttggtccatattatatgtccatattttgggattttt

SEQ ID NO: 29358 - DNA, 676 bp, Heterodera glycines
gcttgctttttaaaattaaactactgaaatcctccgttaatgctataaaaatttctcacattcatcagaaaatgttatcgagaaacacatcatttactatgtagcaatagatttcaataataaatttttttattgttttattttttattatttgcgtagcgtgccaaaaatacattaattcttgaatatatttccataataatcgtagaagaatgaaatatgcttgataaaatttacaataatgcctgtggtatgactctctatttattttctgcgattctctaatccttctcacgagcaattttgatgctttcattttgtaatgaattaaaaaggaaaaataaaatattcttttatgctgattaatttatcagaatcgaaattatatatgcttgctttttaaaattaaactactgaaatcctctgaaaatgctataaaaatttctcacattcatcagaaaatgttaacgagaaacacagcatttactatgtagcaatagatttcaataataaatttttttattgttttattttttattatttgcggagcgtgccaaaaatacattaattcttgaatatatttccataataatcgtagaagaatgaaatatgcttgataaaatttacaataatgcctgtggtatgactctctatttattttctgcgattctctaat

SEQ ID NO: 29359 - DNA, 1792 bp, Heterodera glycines
tagtttttctttacatttttgtaattgaaatttcaattaaaaaataatatatcccaagtttatttttatttaattttcaaacaggctaaaaaataaattaaccaaatattggtcattttttgacaaattctgttaacatatttcactcaaaatttcaaaaattttccggcggcgcctatcggcacagccggaccctgccgccccctcactaatgttcccaaaagtttttttggaaaacagcgccacaaaaacagcgattaaaagcaaaaaatttaagaaattttaattcattaaaaaatccagaattttgggacccagaaaattgaaacagagaataatagaaaattcttcgaattcctccccaaaagaaaattttaaaatcttctgggcacatttttgaatttaggaaattttcgtaacaaagtgcactcaaattttcaaaattttttcaaaaaattttttcttgggaaaattcccggttggtcccggcttttctcgcggtcccggtcgaaaaacttggtcccggtcccgacttttctggtcccggttgttgtcaaattcccggtcccgaccagccctagtgtccccgaccctgaatcatttaaaaaaaaagatttcgctaaaggggcccatcgacaaaattacctcaaatttcttaagcataagaattttatttagattacaaattattctatgggcatataagtctgaaaagctcaagtttttttcatcaaatcaggcctccagcaatttctcaatttccttctcaatgttcttcggttctttggtcggcgcataacgctccaccactttgccgtttttatcgatcaaaaactgaaagacaaaaaaaatttaatgcaaaattttattattgtgttgccttggtaaagttccatttgatcgcatcaaagccgaggatgccgccttggacgctcttgagataggcgtagatcggatgctcattgggcccgttgacgtcaattttgtcgtagagatccggctcgaagttgtactttttggtcacaaagtctttgatgtcaatggcgcagcccgattcctaaacgaagaatgtaaaattcaaacagatataacaatacggctctattgcactttaggcacccaatcgaattagttggtaatttattttttaatcttattctttaatcgtttgttaattcagtgattaattaatatagtgcaaattagttaaatatcgaatgggttttcaattcacatccatttggcaacgtgcaatgaaaaatggattacgtcaccttcatactaataacctcaaactcttgcagtatcaaatacatgttccgtctctatcacaataaaaatactatcatattcttgatgaaatgcggtcatataatgctgtgaatcaaaaatttttaaactaaattttttaaaattattttcatcaaaaattactcgtaaaaaaagctttatcggacgcctgaagtgcagtagagtcagaatacaacctggttgttgaattggttgcacgggaaggccgcgatttcgagtcccttcgacttgtatttgtccagcaactgcttcagctgactgtagttggagtcggtgaagccgcagttcgacgctacgttgaccaccaacagcactttgccacggtatttgccaaagctggtctcattgccgtcaatgtctttggccgaaaattcataaatgcttttttgctgcgggtccgatggggcggcagaagacgaagaactcattgcacccataaacttgatgttgagtggtgacaagaatttaaaggcaatacgaa

SEQ ID NO: 29360 - DNA, 847 bp, Heterodera glycines
acaagggaaccacccgaactgtaactgctcaaatcaattttaaaccacttctatcgggtagagcataggcgatttattattgtaaattttaaatcagtaaaaatgaaaaattttttaaaaatttctaaaaaattcaaacattttgataaagtcatcaaactttttttaaaataatcagaaaacaaattctctatcaaatagaatctaaaataaaatacctgaataaaagtatgctaggtgaaataacactgaaaaaattcaaaaaaattaatcatctgcccagcggatccgaacccatgacaaatggtgaagaggaaaaaatgaatcaaataaacaattttttgctggatttttcatttgatcacttttttctgatcatttagcgactgcaccaaaaatgccgaaattttacaatagtaaatcgcctatgctctacacgatagaagtagtttaaaattgatttgagcagttacagttcgggtggttcccttgtgagatcaaaatattggccagattttttaagttttaaaaatttgcttgtttcctttatttatttttatggatttaattgttttcgctctcttttagcaatgcttcgaccgtcgtcacttccaacaattcatcctccgccaaccctccggcggtttcttcgtcaagcactgccaatagcatagcacagcaaatggtaaaaagaagcgtgagcagtttgttccacaaaaaatatataaaatagaaaatttttcgttttaaattttaatttgtaatagagggttttttctagtaaaaaaataaattgattcatttttattaggtaattgaaaaaaagagtttagaaattatttttatt

SEQ ID NO: 29361 - DNA, 926 bp, Heterodera glycines
  unsure (1)..(926): unsure at all n locations
tttccctttgatcggtactaaattgggccgaaaaagtgatagccattttctgaggcccgaaggaaaatttgagagggctaatttatatgtaatattcgaaagtgccaagctaattagcgattcaggcgcacattggggcctgaattaagccattttccctttgatcggtacaaaattggccgaaaaagagatagccattttctgaggcccgaaggaaaatttgagagggctaatttatatgtaatattcgaaagtgccaagctaattagcgattcaggcgcacattggggcctgaattaagccattttccctttgatcagtacaaaattggccgaaaaagagatagccattttctgaggcccgaaggaaaatttgagagggctaatttatatgtaatattcgaaagtgccaagctaattagcgattcaggcgcacattggggcctgaattaagccattttccctttgatcggtacaaaattggccgaaaaagagatagccattttctgaggcccgaaggaaaatttgagagggctaatttatatgtaatattcgaaagtgccaagctaattagcgattcaggcgcacattggggcctgaattaagccattttccctttgatcggtacaaaattggccgaaaaagagatagccattttctgaggcccgaaggaaaatttgagagggctaatttatatgtaatattcgaaagtgccaagctaattagcgattcaggcgcacattggggcctgaattaagccattttccctttgatcggtacaaaattggccgaaaaagagatagccatttttctgaggcccgaaggaaaatttgagagggctaatttatatgtaatattcgaaagtgccaagctaattagcgattcaggcgcacattggggcctgaattaagccattntccctttgat

SEQ ID NO: 29362 - DNA, 1087 bp, Heterodera glycines
tttaagcagaagtgggaaaaagcggtgatcactcattaatttgctaatttggttattaattttggcatttaagcgcaacatttcctcctcctccaccgccaatgcgtctctgatcgattttgaacgcattcggatgatcggcacgggctcatttggccaagttttgctggtcaaacacaggcggacgggcaaatattatgccatgaaaatgttggagaagcaaaaagtgctcaaactgaaacaggtggccaaattgaaaatgggagcagaaattccacaataaaaagcattttaaacatttcaaccaaaataaaaatatttcaaaaatacctgtaaaaaatttttcgaaattaatttcattaattggcaaagttttttcttaggtggaacacaccatcagcgaaaagcgcattttacaggccaccgaatttccatttctcgtaaaaatgcactactcattcaaagtaaatgacataaaattttgaacaaataaattaaattgtatcatttaattaattatttcgggaaataaattgtcgctttttaggacaccgccaatttgtacatggttttggagtttgtcagtggtggcgaaatgttctcccacctccgtcgcattggccgcttctccgagtgccattcgcgtttttatgccacccaaattgtgctggccttcgaatatttgcactctttggacgtggtctaccgggacttgaagccggagaatctgctcattgacgtcaatggatatttgaaggtgcggagcattgggttgagaaattggggacaaagacttatgccagagagtgaattttttaatttgaaaatattttatattttcaattataaattaaactgattagcaatcttatatttttcaaataatcagtagctttcgagaaacaaattgctcggaaataagccattaaaatagaattgtgtagtagcaaatgccaagaagcccgcgaaatgactttttaatttcactttttatacaaaaatagaaaaaaacatctgcagtaaaaaaaaaatataaattacgctttattccatttccttgtcaattacttaattgattttacatttt

SEQ ID NO: 29363 - DNA, 982 bp, Heterodera glycines
ctacatagatttcgcaaaaataaacacgattaagacgaggattatgtgaaaatattgtcttggatatcgaatcagcagaaaaatttatttgacttaaattcccatccctaattatcaggtttgccaactgaaaattttcaaaataagcatttggtcgacaaaaaaccttatcataaatatttaaatgtaatatatgcgttgtatgtttacagagagaaaaaggctaaatatggtctaattaagcataataaaactccaccaaatgattttttaaaaatatttggtagcaaaaatgccatcatttaaatttaaaatattttcaacttattttaattcccattggattgtttagtgattttccattgtctaatccatctattaacattttcaaatttacccattttcaaaatcaccaggcgacaaaaaatcattgaatcaaattcagcattatggaaaattttattccaagtctaaaaccaaaaaaaaattaataaaatttgtcaaaatattgattacatttaaatttttttaaactttttggtttatgtcaaaaataaccaaaaagtttatgtcaatattttatggccatattttgccattttatatccatattttttatgccctaaacataagcaataaaaatttctaaagaataaaaagttacacacagaaaaaaacaaccccccccccctctctctctttctctctctctctctatctctctctctatcttctcctctttctcccctctctctctctctctcttctgcttgtgtcctatctctctccttttctctctcaatctctctctttctctgtctctctctccttgtgtcttatctctctccttttctctctttctctctcttcccctttctttctatttctctcgctctctctcgctcttatcctctctttgtcgctctcaccttttctcctttctctctccttttgtctctcaccatttccttcatcactaatt

SEQ ID NO: 29364 - DNA, 981 bp, Heterodera glycines
aaattgagattattaaagaccggaattttgaaaaatgcaggactcgaggacggggttggtgaaagtgctagggcccatttgaaatccccctttttaggggcaccgtccccggaatttggtgcgaactttcaaaaattaggaaaaaattatttttaaaaaatttatttaattcaattggaaatgcccaatcaaaattctaattaatttcaaatcttgattattttttgctcataaattcaaaacatggattaaagtaattcatgttgttttttaataaattaatgattcatacgcaatgtccagtcaaaattaaaccaaattaaaaattcttcgattaattttttgctatttaatacgcggattgataaagtagtaattcattttaaataatataaaaaaattaaaattactgaaaaacagttaaaatctgacaaataataataaaatatttaaatgagtaacaaaaatatttatttaaaaaaatgattgaatttcccaaaacgacattataaacattcattttaaatattttggcaatgccagaattgtgatctctgttggtcagaaaaaagatcgagaaggttcttttattcacctaatgcattatcaagatcaaacttataaaaatatcgatgcaataaaaaataagagtgacagattcctatatttaaaatcaaaatttccaaagaacaactttaaatttaaaaatttgtactgaaaaataataaaaattaaaaaatgcctatcaaaaacaacattgtacaaactctttattaaaaaatcaaataaatggcaaaagaattataatttaaattgaaaatttttaaggcaatgcaaaattttttgccggattatttctcttaaactttcaatggatcacgggacaaaagggaaaaagattttataaaaacgtagtaatattatttgtgattggccgacacttgcgccgcgacagttgcgccgcagacacttgcgccgccc

SEQ ID NO: 29365 - DNA, 1797 bp, Heterodera glycines
  unsure (1)..(1797): unsure at all n locations
caaaataaaatntaacatttatttcttaaattttattaatttacttctttatatttctaagtctcgtattttcaatntaatataataaattaccaatttttattttaaatcttatttctctttattgcgtataatttttgaattattattttgatttttttattatttggtctgcatttttttccaatttggttattatgcaggcaggcagtttattgtaatttgatcaaatatttactgcgaaatttcgtagtcttgttgggtacttctttctgttatcacctttaaatgactttacatgtttactatttttgaatttataatatatgtttgacatttttgtaaattaatttaaaatcaatttatgttgattttgaatatttttataaaaaatgatttaaaaatattatttatattatagaataaattgtaattattacgaataatttcttataatttttgttttcaaataaaaatatttatttatatacttcttcatttcttaatcaagggaatgtacatacatgttgtggttggaatttttggatattaatttaaaattaatttttgtagatttttaatattttattttttacaataaaataattaattgaaattaaaatttatttaaaatttctatttgttttcctttttgtctttaatttcgtcaggttcttcgttaatctaacaaaagtcatatttacgtataaaattaaataatttataatacaatttgtacaatttaatacccaattattcgttttcccattaattccggtataaaatttgtttttttaagaattaataaattaagtttttagtacgttcacagtaatatcataaacaaaatttaatattaattatattaaatttgattttttacaataaaattttacttcattttcattatcatttataagaaatgattcgtatgatattaattcttcttttaaagttcggttttgttattatagaaaattttatataaatgtttggtaaagttttagcggaattaggtttttaatatctaatggttttatacaaaaattgtttagaaaattttaattctatcaaataaaattctttttgcaattattgtcattattaacataccatttaatacattttgtagatcactattataaactaaatcgtccacgacccccgcattttgtaaaaatccttactcttttttgagttaaataaatcatccgagttcgtttttacattaattcttaagtaacgttaaatcgaattataaaaatacatctttctattccataccttttttacccttctgtttttgtttttttttagaaaaaaaatcatttgaggagctttggaagtaaaatttgaaatttaaacaaaagatttgcctaatattttgattatccctttactttggggtaaatttatttatttgttagtaacaaaatgtttgtttgatttttgttcagattattacttcatcggatattttgtactaattttactgcgataatttttgataaagtttataatcgtttctcattcttatactaaatttaagaaaaataaaatttaaaaaaaaaatttctaaagagagcaaaataaaacaaaaaactttattcaaataccttatttaaccaaaaaataaattcttcaaagacaaaaaaaatacggaaaaaagttaataataataaacaaaatttttatatataagaaatttctagtagttaaaaaattaataaacaaacaaataaaaaaatgttacggaggcacatctgcgtaaaaattgatggcacgcttgagcatttt

SEQ ID NO: 29366 - DNA, 973 bp, Heterodera glycines
taaattgtttcttttagtttttttatgaggtaatttaatacgatacgtccttcagagttcgagagtgctgtccagctccatttttggttgaagagagatgagatcactgcacaaataaagcgttgggctgatgaatggagaagccaggctaagcaggacaaacgattcgcgtcatcagccaacgaattggaggtggaattttataggctattttgaattaaaagttagtccaatttgtggtgtagtttcttccataatacttgaattaaaccaggcatttaataaccctaattgattatataaaaaaaaattcagaaattgctgaagcaagtgagcgaagaattggagaagcttaagaaattgaacctgcccgaatgaatcgcggccttgcgattgacatcttattgttagggcagaagcgaatatattctttcttttattgttttataataatcgcggaccttcttaccatttaatgggttttaccactgatctgaaattttggcaattgttttgttcttttgctgctataaatgaatgtctttaaattagagatcggtattttgtaaaaagcctgtacctgtacctgtacctgtattccaaaaatggcctgtacctgtattttctgtacaaaaatacaggaaaatacaggtacaggaaaaatacaggccactcgaggcctggatccaggctgtacctgtattttttaatttttttataaaaaacctttttaattaataaaataacgtaaaaatacctaaaagtatttattattaattaaacaataaatattgcttaataataatgtatttaaactttttttgtacatattttcatttttttaaatattttgagaatttttgaaaatttttgaaatttttcttgagaaaaaaaacaaatatttttttgaaaatttaccccattaaaaaatactaaaaattaatttttcccaattactaaaagaagattataa

SEQ ID NO: 29367 - DNA, 1798 bp, Heterodera glycines
tgaaaatgtggagtgtggtgtttttttttaaattccgtttggatgagaattcccaacctctctctgcttcaccagcagcaccatgttccggccattggcttgtcgtccgtctctcattcgagttgcatacatacaatttgggcaaaaggccataaataataggacagaagcgaaagagcaaacattggcgggggaggggggggggcaggggacgggggaggaattgtctgatgggcaaaatggaataaattgcacttcgaccgcaccgccgatgtgaggggactgggcaggaggggaggcgaagatgacaaatttattgttttgttcgacggtttgatggtgcaaaagtgccaaaattgggagggactgctcccccctccctcccccgaagggcaaatgccctcggggaatattgcctaagtgcaaaatgaaaaaaaaattaattctttttttttgccattggtgctgctaccgaccgattggaatgtatgctaaaaagttcgaatgccaatgttttttaaaaaagaaattattagtgtcgacatccggctcaaatatattgggttgggaaatgtcttaaaaatggtgcaagattttcaaggactaggttagagcatcactcctaaatgaaataatatgtatcacaacacacgctaaatatccttggttggcatcacaaaatgcaaacaaagttagaagcgagcacttttagccattctaactttttgccatgtttggaatgtcaaaaatggcaatttttattaccagtgctcgaatggcagaaaattcccgagactcgagaccaaaacgtgtggcctcgagactatcgaacagcactaacaatcacttccactgcagggaagctgttcaacgactgcacaatgagcgcaacaccgtgttggacgagttgcgagtgttggcgggcgagggaaagctcattgagcaagccgagaagacgaaaaaagagttggaggaagagcgacgcatgcatgccgaagcaattcagcaaatcaacaaggtcaatggacgaacattaattagtatttcatctaacatatacctaagacaaatctcgagagattttcctaatttccggcacgtgaaaaaatcaggcataattacgtggatggcatggcatggcttaaaaaatgagacaactctattagagaaaaattgaaaaatgcctaagatttgataagcaaacccaataaggggagacattttcaaatgttacggtatcacagtatatttttgcaaaaaaaaaaaaaaaaattatggcaaaatcttaatttcaggataaggatgaattggaacccgtgctggccgaagtgcgccaaaaaaggcgtcgaacggaaaccgagttgggccaacgatatgccaaagtgccatttctgtgggaccaactgagcaaacgagcgcgtgagctggaagtgccgtgcgcactgatgacaccggagggactgttgccaaaaactttgctgtccgagtgagcagtcgtgctttactttcgcttgatgaaatttcttagaaaattttattattcggggccggggcctggacatgtcggcaatatgggtcatgaaaagattcccaaaaatgggacaaagtaatcatcattaataattcttttaaatccatggattttgttagcgtgtaataaaacacaaaaaattttttgtttttcgctatgccaaatttatggcgctattattcagtggccgtgaactgttcatccgatcaacaacatttgaagaagcggcaccaactgttgtcagtagtgatcagcagcagcacaatg

SEQ ID NO: 29368 - DNA, 639 bp, Heterodera glycines
aaacaaaatatagcgtgtgaagaaatatattttcgccatttctttatgtggagcattcgattgattatgatgtgggggggtggaagaactggtgcacacctcagttgaaggagttgaatggtacggatgactgtttgtgcagaggggagagcggggggggggcattgacgggcgaaaaaaaagaagaaatggatcaatgatatgtggataatgagaatatatgaaaagattcggaaaatgaaagaagaattggggaggggggattttggaggaaggaagggaagtgggggggggggttacaacggattaaggtgccatacactactctcgtcgcctttggcgtctaccaaatttggcagtgccttgtcgaggaagtgccggaggcccgcgccggcgtgtgccgaattcggtgcgcatttgcgggagggagggacaaacgacttgggggaggggaatccaaatcggtgcagaatgaaatctctaactaaaacgccgcggggaaaaatgccaaacattttctagtcagcttacttattagcatttcccattgattctaacgctatctgtctgttaacgtttttttgcttccatttttcaattttctcctctcttttagcataggcggcggtgtgtcgcgca

SEQ ID NO: 29369 - DNA, 989 bp, Heterodera glycines
tgcaagtataagcgcagaagtgaatgaatgggaagaacaaataccaaggaaaaatgacagaaaataattcagatgaaaaaacaattggaaggaaagacgaaagagtgcgacagtttgaagggaagtgtcaacgagttacaaaaacaactgatgaccatgggcacaacgacaatgccaagggaattaaacgaactgaagaacgaaaggaaggacctcatgaagaagaacaaagaaaaggacgaaatgattgcgaagttgaagaagaaaatggatgaagactcacgaaaaatggccaatttgttgggacaggaaaagaaaaaggaagaggaacacagaaaaacagtgaacgccttaaaggatgagtaccagcgaaagatagaggaagtgaccaagaaaaaggaccaatcgatagagaaacagcgaacagagaacgatcgattgaaggcggagttgagtaagaatgagaagacgatccaggaacagaagcaacagttggtgaaagaccagcagcagaagacggacagagtgggcagagaggaggcactccgcgagcagaagagacaattgacggagcaacaccggacagagaccgaaaagctgaagactgagatgcgcaaaacggaggaggaggcaataactcagcaaaggaaccaaatgatggaagaacagcgtgaaaagaacgacaaactgaggacggaactgttcaggaagaaggaggaagcactgctcagacagaaggaacaatttgaggaggaaagtcagcagaaaatggacgagttggaggcgaaactgcgcaacgaatacaaactgaaacttgaacagagcgagaagcaattgaggagcgaattcgaagctgaaattggccaattgaagcggcactgcaaccaaggcggcagagactgacaatgagcaggtcgctttgaaatcgcacgttttcccccttatgccattggcattttgtaaactgcaaaaaagctactgatgcaaat

SEQ ID NO: 29370 - DNA, 1064 bp, Heterodera glycines
  unsure (1)..(1064): unsure at all n locations
attaattggcgattattcattaatgaaattaaagcataaaattgttttagaatttagcaaagccaaaatataaaagggcaaaaatttcttctttttttactataattttaagataaaaatcccttctcaaaaaagttttcgtcattttattatgaaagtgcgggaaatccattttaagatgaaaatgggcttcccattctgccgctgaatgaatgcgtgccaatgccaatgccattttccatttacgcccctcccacacgctcaatttccgtcccgcgactttgtgactttttggaacaaaacctatcaaaaagtattagagacattttgaggacaatgaacgaatgggcacgaataaatatttaatttagacaatgaaaaaagggggaaatgaattttgaaggaaccaacgaaatgattaatttgctaaaattaaaagcaaaattacggtatgaaaagcggaatatggtaataagtaaggagtccaaaaatatgcacataaaaagtgaaaaatatgtacataacattttcaaattgatggtgtaatttctcaaaatttctttaaattcgctaaatgcaaagtaaaacttacaaaaatggctaaaatatggtaataaaaatcattttagaaaaaaaaacacgataccagcttaaaatttactcattttagcgaaaaatcaacctgaaaagcaaaatttcgctttttatcttattttggacataaaacgatcaatttttaagaaattttaatttagtcaatattttcgacaaaattttgctaaaaaatgactttttcggaaattttttcggtcaataggggtcaaaaaggccaatttacctgatagggccgttctaataggggtatcttgaaaaaatgcccaaatatgcacataaaatatgcatgaaatgccaaaatatgcacaaatatgcacataaatcgcgaaatatgcacaaatatgcaaaatatgcatatggaagtacggcctagaagcgtcnaaccagctaaaacatgtttttcgtgtgttcaggcctcccagatcccagaacaaatatgcatgtgcata

SEQ ID NO: 29371 - DNA, 1254 bp, Heterodera glycines
  unsure (1)..(1254): unsure at all n locations
ctcacacagctccattcaattgcattttacacgtccaaattgattttgagccaattgttcgatcaaaacggggaggggagagggaatgaatcggggaggggagggggggggaaaggaaaataaaaaacattggataggtggtggccatgggcgtcgattttcaatggaaaacttgtccaacaaaacaacaataattacattatattgtacaataatatgtataaattttacagcatttgttggtcctctctttacattttttttcaaaaaactcctcagtgatgacgattttctgatcacaaccaaaaatttttttcaatgatgcatttaaaatttcattaggctgttccgctacaaaattttttaaatttaaacgaaatcctctccaaataagatcttttaaggatttctaagcgttagtggcactatttcaaataagggcaaaatcagaaaccaaatttcccagtttttttaacctcaaagaacccaatgatgaaaggtgctggatcattttacttgtcaaggaaaacgagacccccccccccccccgatcgatcaatctttttttttctgacggcacggattgacgccacagcagcccactgactgactctattcatttcatagcagcggttcatcatcatcagcagatctcattaaaacaaatgagcttaaatgtgcgcgcgttcattccgatcaatatgtagactatgaccacaaaaatttaaaattaggctattttttcattataaattctattagcaggggtgtaaatttagtggtaaaaaaatttttattgcactttacgagtcctattaattttatgagtccaatcaaatattttgaatccatcgatcaaatatttatgagtcaataaattttgcgattaactgacacttatttttcattttcatttttacgcttaaaaatggtttacgacaataaaaaataattggactcaaaatttgatttaattaattaaataactcataaacctgattggattcaaaaaatgcaattattctcataaatatttgatcggaatcataaattccgattggactcataaactcgtaaagtgcaatagaacccaaaaaagaaaactagattaataaatgagcatttttatatcggtggatagagagaggagagctctctaatgatccctcattgctgcattttattttatttatttactttttgcattttggagggtaattttttttcaaaaaatggaaaaatanngcgctagaa

SEQ ID NO: 29372 - DNA, 700 bp, Heterodera glycines
aaaactggtcatcattggcataatttattgacaaattaaatccaatcttcctttcgttgaaattaaaaaattaaattttcctttagtaaatcatgaaaagttaatatttttcaaattattttttacaaaatataaaaaattacacggaaattcacaaattttgggtgaaaaactattagaaaatataccttaaatttcaaaattcgcccggcgctgcctatcggcaccgccggacccctttctcctaaaagtttttagaaaaagagcgccgcgaaaaaagatgatttgaaaaacaaaaaaggtgatcagaaatttttgggcattttttgaataaaatccactatttttatttgggggccggcgctttaggaaaaatttgaaattttgactattttttacagattttgactgaaaattggccattttaaaaatgccttatgcatttttaattaattctatacaaaaatatttatgataaaaagaaataaaaaagcacataaaataattattatgaataataaaaaaaaatgaaactaaaacaatataaaattttttgattatatggtataaggcaaaaattgaaaaaccccgaccccgaccccgaacgatttggcaaccccgacccgaaccccgacgctgctaacccccgacaccccgaaccccgaattttccaaccccgacgtcggggttgcaaccctaa

SEQ ID NO: 29373 - DNA, 1047 bp, Heterodera glycines
aaaagataaaatatgcgaaaatgcgaaagcgaaattttttctacaactttttaatagttaaaagcataaagcaaaaatcattttttaaattttattccaaatttaaaaatcaataaaaattagggggtgtgtattttacaaaatttttagccgttttcgccaaaaaattactatttttgttattttgttctctatttttcaaaatatggtaaaataggggtccggcggtgccggcaggcgccgccgggaaaatttttgaaaatttgattaaaatttgttgacagattttcactaaaaaatgatcaaattttgtgatttttatcatttttctaatgagaaataagagttttggggcgccgctgaaaacagtttttcatcaaattaccaaattttgcgattttgggccattttctaagaaaaaataggagttttgggggcgcggcggtgccgataggcgccgccggggaaaaaaattggaaattttgatcatttataaacagtttttcactgaaaattagccaatttataggtaaaattttgaaaaattttatgggaatttaatccaattcttaggggtgtaaaagtcgcatttcgcgccaaaaagcgaaatgcgaaaagcgaaatgcgaaacgccaaaaaatgcgaataatgcgaaaggcgaaatgcgaaaagcgaaacctaggcacatccctggtttatatggttgccaagtgagaaaaatgattgtgtaaatcagtagtaatctgtgaattttgttaaaaattgcatttttttttttactttttgttcgggttcgtggtcagaatgattgtgtcataatttgattatccaatcgtgaacagcccaaaagtcaacttcaactcgaaaatgattttagttttttttctaaaaacagggaccgaccaccaccttaactattacccagatttttaactatttttagaaacaggaggccaatgatttgtctggcacttcattctccaaacaacaaaatgagtgcgacactcaaaatcagcaaatcaaaatgggaaacgaatttgtcccatg

SEQ ID NO: 29374 - DNA, 2106 bp, Heterodera glycines
  unsure (1)..(2106): unsure at all n locations
tccccccccccccccaaaaaaaaattatttatcgttagcataacgattaataagcaggtatttgactgatgggtttttcttgtttaaattgggctctcaaaccaaaatttccttatttttctttgtgggtaaattcggacaatgccgtggtattggtcggatcgcacaaaataccggccctatccagagaaccgttttccccggtacacgcaaaggctggccattacagaaaatcaaaccgctgtttttcacgaccacaactacaaccagcagcaaccacaacatcaacaacatgcggaattcgggccatgggggacacaaaacattccgccatggcaatattatcaacaacaacaacaataataataaatgtcacacttttcgccatggcaacaagcatttctatctgatttggtccatcatcagcaacaacaacaacaacaacaacaacaatccgtacaaccgcatcaacaacctgggccagtacagccccatcctctacagcaacaaaatcaaccagcagcagcatcagcagcagtacaaccccaacaacatcagctccatcaacaacaacaacaaataactgcttggctccaaagacagcagcagcagccagtctatcatcaacttcaaaacgttcagggggcgcatcatcaacttacctcccactcagtgccagacgaaatttttatctacgatgactttgtaaattaaaattaaaaattaaaaaaaataaaataataaatntaaaaaaggatgcgcaccccacgacgagtacggcccccagcggtggcgatgtggcacttttcaatgccgcacctgggtccagcagtgcccaagcaagtgccacgcggcgaacggtataggtataatgaaatttgcatttcactgataaattttttcgaaaattaagcgcaaaactactagtcgtggaggtggtagtcgtgccagtcgaggacgaactacaacagcaacaacaacatcaccagcagatgaggcggttgaaaataatttaaaaaatttaatacttataatggatggttaaaaatttaaaaaaatgaaatattttaaaattgttaatgtaagtcttttaattgtatttttttctctaatcatttttaaaaatatgctaaaaaatttattattcacaaatatttatatcaatgtttttttctgattaaagtaacataaaatattattttatatttaaaaaaatcatttcatataatttcaattttaaaaattcattttttattctttcattgtttggcattatgttttagattactatatatgattgtgtttttttggtctattcaaatttaaaaaaatcagagtcgcttgattttttaaaaaaagtcaacgcaaaattgaccaataaatatgatcattacattttttaattgattaattcgaaatttcgttgtttcattgtttgacattatgttttttttattacaatatatgtgtgcgcgtttggcaattcgattttaatggtggagtcggttgaaatttgttaaaatcttctttaaaaaatggtcaaggcaaaaataattgattaattcgcaatttctttaatttaaaaattcattttcattgtatatgtgtttggcaattcaatttaaatgggatattcggttgaaacggtttaaatttttgaaaaaaaacaacgcgaaatgcccaataaatgtttttccccctctattttaggagaaaaaataaaaacaattatatgaaaataatgctataactggttgggttattggtggccgaatggttagtaacctccaatctaaataaaaattggtcgttcaagtacctgactgaaaagttaaattactatgattattgaaaatatctataattgccacgaaaacaatgtaaaatgcaataaatgcatgaagtaattaatgcgcaataaaacatctgtaatggtcacaaattgctatgtgcnaaggctanaaaaggtctaaaaaaagtataattaaggatttataaagccattanaaaagtgaaataatgaaagcaaaacccagnccgtataaatattatgtaattagtacgcgatagccagaaatgaaatatagcgttaaattattttaaaaa

SEQ ID NO: 29375 - DNA, 1470 bp, Heterodera glycines
tctttatttatttatttatttttataaatgaataattaattttccaaggccggaaatgcgttgggattaatttccggcccgtcagtatccagcagatatcatttaaaagaggaggaaaatcgtcgtaaaaacagttaaattgttggggcgaatattttttctgcataaatcattaccaaataaaaattttacaaatttttaaagagttcaaaaaatgtttaaattgccatgcattttacttccattttttgcactttttctcagtgattttattgtgggacaaccgatgaagagtaaacaatttgattttttaataaattaaagcgaaatttattattatttttaaatttgcagatgccgcagaaactgctgatcaaggaaaacagaaagaagaacatttggtgtgtccgcattgtaatggccacataaaacctggagaattgaaaatgcaattaaagggtaaacaatcgccagccgaacaacaaaaagtgaataattaattaaatattatttttaaaaaatataaataaatttaacaggaaaagccgaaagtggcacgagagcgccacccttggcacgtgatggacgatgtgcaaattggggaggaacatttgccgatgaataaaggggacgacgatgcccatttgagaatggaaaaaaagttgactcgcgaaacgatcggcgaacaaccaaagttttggacggaatcttctgattattgaaatttatgaaaaagcgatcaaataaaaatattaatgtaatttcattttcaattgtattgtatgggtttatttttttaaacttctttggttattattagggcacggatttttatgtatatccatattttttttcaacttatttcggcctaaaaatgaagtaaatagtatttttagcttggtttgatgcattggatgtctttttatttccatatttttccatctttcatattttgttcatatttccatatttcacttcattatttaggcatttccacaaaaaattcgaaaaaggaactcctaacgatggaaattttggaacgtccctaaaatcaaaaatttttgaaataaataccaaaaattaggaaaatttttgagaaaatatcgcgaaaatttttttttttttttttttacaaaaattacgtcaattttttctccgtacttaagaaataagaggtctcaattatctaattctatattcctgttttaaaattttttttcttgacagaaattttatgggtttggaatttttttttcaaaaattcaaacctattttcagaattttttgtccattttttcgtattttttgtccatatttcaacgttttggtccatatttcgtccatattttggatgtccagcatataaatccgggccctagttattatccttatctcatttaaaaaaaaaatttccattaaaacttcaataagcagcgaaataaaagcacatttcattttagcagaatttct

SEQ ID NO: 29376 - DNA, 875 bp, Heterodera glycines
aaactcttgagtaaattgacttgtagaaaatgctaaatttaataaggaaatgagagattttaaaaaatgccaagatttaagctgaatttttttaaaattccgctaaaatttgtttaaaaatgcatttgtacaacaaaaaatgccaaagcgttgcataatgctaataaaaatgggaatcaaatgccaaattaaaacacacaatgccaatgcttttgcatttaaaaattgcccacccgacgcgctgctgtgcatactgcgcatgcttttgcccgtctcgctgttcaactcctccgcgctgcgcaactccttcatgttgcgcagttccgcgaacggaatcaggcactctcgggtgaggcgatcgcgctcaagaaatttggcacttaaaattgtcgttaaattgatcaaaattttcatctaacaaagcgcttaaatgcaatttgatcaaaaatatttccaatgcccaaatgaacccgatcagagaatcccgacatttttcacgttccgaattacgagtcccgacccgaaaaatttgagccatcccaaccagaagaaacatgacatttttcacgccctgaatccgtagtcccgacccgaaaaatagcattcctgactcgaattcggcattttacgttcccgaaaaagttagccgccccaatccaaaaaattttgcctgacagaatcccgtttccgaatttatcccgggtcccgttttttctcatcccgcggcaaaattgttcggcgaggcgcgtttgcgattttccggcaacaggaaaaagcaattcccattgggtttctcagtttttccttgatcaaaaaaaaatgacaaaccttgaatgatcattttgtgataaatcccgaccggatactgataaatg

SEQ ID NO: 29377 - DNA, 920 bp, Heterodera glycines
accccccccccccctcggttctccaaactcaaaaagtttttggaaaaagaaagcgcgccgcaaaaaaaagcggatctgaaaaaaaagcaccgcgaaattgtttctggttgcgttgcctgaagaggacttagtaaattttcgtctccgaccccccccccctggacttcgttcgtatgaagtcgggtagaccccccccccctactatttcatgtatgtgctgaccgacccgatattaatattcaaaacaattgtaaacggattacgtcacccctccttagtttttcgctgtgttaattcatttgaattccttttctgtgttagtctgcgtcctctcctcttttccttctcctctttttccccatttctcctttttttgtgttagtacaattcttactctctgctgatattcaaattattattattgttttttctattaagcttctgttattcctttttccctcatttacaagaaaatttaaattgggaaaactgatttgaccaaatcaacaaattttgtaaaattaattctaattaaatctcaaaaagaaaggcaccaacaaaaagcattactttcaaatagccattatccaagcttattatattatactcattaatgtttttgttttattattgtatgtataactctaattgtaaaacaattaatgtaataaagcagcattttcaatagaggacaaagacaatttgataataaacagctaaaataaagggcgggggagtctaagaaaggctaatgaccaaacgaacgaaatgggagggaatgtgggacaattgttggaggaaacgaaaaacgatggggaaacaaaagaaatattaatactttatttggcggtggagagaaaaaaaatgaatggacagcattataaataaacaaaaataaatagcgacgaataatttggaaa

SEQ ID NO: 29378 - DNA, 945 bp, Heterodera glycines
tatttttttatcaagaagaaagaaaaaatagtacaaaactaataaacacattaatatgctaataactaacggatttatcaaatgtaataaaccattaagaaaagaagatgtttttaataataaatgaattatagagaatacaactattcatcaaaaaagtaaataattaatataaataatttaatcgccaataatttttcaagggcggacaagtacaacgcgacattgcgcttttgaaatatcatttttttcaaattaatttcttattttatgataaaaatttaaatgttattaaaattaaagaaaaaatttaaaaaaaattcaactattataaaaataaccattttaattgatgcataatttattaaatattaaaaaatatgaaaatcaaatatttaattattgattttaccaaaaacataatcaaacaaaaattcagaacaccatacattcacttagattatctacaacatcagagcaagataattaataaattaaattttaaattaaataggcaaagcacaaaagatagagaccgatataatctgaaggattataaggacttcacactttttatgttagttaaacaaaagagttttcgcaaatcttgcaaaattggcagcaaataattaccgcaaaaaggaaaattaaattaaaaaaattataaataatacaatattaaaagtttttttaggaaaataattattttattaataatttgaagattattaaataaaaacaataaagtaaaacacaaaaaacaaatatcagaatttttatttaaagaataagagcaatcaatgatggaaatgtaacgatattgttatatcctatcaattgatattctgatacagaaaatcataattaatttatttttttcggaattaaaaaaagtaattttcaaaagccgacatgaataaataatgaaccttctcaaacaaaaaa

SEQ ID NO: 29379 - DNA, 1263 bp, Heterodera glycines
  unsure (1)..(1263): unsure at all n locations
caaaagcagaacgatgaggacgatgatgaccaccaccgnaagtgaatgagtcggacggagggcaaaattagcacaatttggcggacggccaaggaacacattttggcatcagtggaaaagaacgaacacgcggaacaacggggagggacaaaacgggagaagaagcccaaaacggggggggggggggtgccatgggccaggattcgcaagagaagatgccttttaaatacatcactcctttttcttcacccatttttggccaatcatttgcactctttctttgtcagttcagttttttgacttttccttttggtcactctgctgtatttgttgaacttctcaagtgccttccaccggccgccgattgtcgcttatttttccgtgaaggacacttttcgtaatgtaatgggaaatggaaagagagggggggggggggagaggacggaacgggccagttccgtctgagccaagtttagagcatcacaacttttttaaaatatgcaaaaattctgactttttggtagtattcatgttgcaacttttttataagttgttcattcgcttagaaatagcttatcaaaagcttctaaacatgtagatctttcgaatgatgccaaatttataaatttggtcaacaacgaaaagaagttatgatcttttatgcttggctcagacggaactgacccctaccggcgggggaggaagagacgaaacgaatgaaatatttggctaaagagaatttataagattaaaattattttttatcttttttcgactttcagaaataaaaacaataaaaatgggtccattctatgcaggttctaacgaaattgagaattttagacttttgttcgaattcgggtccgggattcgaaattggtcaaaatgagtttcagattcgtgctcagcgaccccgaaaacccttagaaacgtactttcagtgacttttaaaaagttatatttaaaagaaggggggttttgaaaattttttcactttttttttggctttaattttttttttgttttttacagcaataatgaatattaagtattaatagcataattatggtgaataaaaagtatattcacgatgcatgctcccttttgcgaaattttgcttttaaattgttatttcccgtttattatttttcggtactgaaatatccattttcactgggactcagttatcccggtgcttagatggcgtcagttcgacttttttctttggtttttagacttaacaagccaagagctttcgaatga

SEQ ID NO: 29380 - DNA, 1404 bp, Heterodera glycines
  unsure (1)..(1404): unsure at all n locations
aaaaaaaagttttgcattttaaaattatgggaaaatggcaattcgcgaaggaaccccccctcccccccccnccccctcctacaaagccaaaaccatatctacaagattataggcttaccaaagcataccttggcctttttggctattgacttcgattaattcagcttcaacttttagtggtatccatttacaacaatgtgatcagtaaacatgccaaagaagcgacatgcggctttttcgagcctattctcttcggtcccaacattattcaacgggcacaacattcgcatattgagctgagactgaggttatgttctttttgtcctttttactgaattttcttattttctgtttcgttttagtgccattttttctccgaccaatgatccctcgccaattccgatccaatccgtctcttcaaacactgaaaatacttccgaggcctttgttgcgggccttagaatggcggcgattgattctcttaatgacgcgcaagggacagtggacgagataagccggagggatggcgaaaaccaatcgacgggtcaaatgccttgtgccagcgaagcccaagcgggcgaagagcgacctccttctctcgaggtatttaattccaatgaaatggtgagaccgaaaacgggagaaaggttttcgtgattattttcattctttttttctaaactatttgatttgtgcactaattttttattttgatttagcgaagtgatagtgtggcgaacagtcttccttctgtcaacttcaatcagagtccgcaagatcattttgaagaaaccaagcaacagacaagagaaaaaattgcgcaggaaatgggttcattttttttttttgattttgtcatagaaaaatatttaggcttaagcccggatgaccctgtagtggaaattagagttcagcgggaaatggccatttacaataagagggcagtccaacagcaaaatgtttcggctactccgccgcctcttacggctgacatttcccccgctaccgaccaaaacagacaaaacattccaatggacacggtcagcagggaaatggacgaactgcgccaattgtgcgccgttagtcaaacgagacgacaaattccaacaaacgtggccagcaaggaaatggaggagttgcgccagcgattggaaagcgcaggcaatgcccaacagcagcagcagcaactccattcggctaacattcgtcaaaatgcactctcaacaaactcacaatcgtcaaatccagatacgctttctaagctgaaacggaaattggggagaagttcgtcaggggatcagttgtcagtgggcgtggagcagaaacaaccgcggatgaatgtgcagcagcagaatcagccaatgcttacggttcacaatccgaacattcaaatttcaatgcaac

SEQ ID NO: 29381 - DNA, 1162 bp, Heterodera glycines
ccacttcgtgcattgcggaaatgggcagccacccgtgcttccgctgggccaagtccaacacgggaatgagagcagctcctttatgtccctccgggaaattgttcaacagcaccgtaattttggccaaattggcttccgtaaattggaaaggcgtgttcggattgttccgctcgttgtccctgtgcacctgcagtccatgggcttaatgaaaggaatacgtatgaagaaacaattaatgaacgaaatgctccacctgagtatcgcctcaagggacgcgcagcaaaagaacagccaaaagggaaattgcgcaaatgcttagcaaacataataagcaaaaaaaaaagggaaacacactttaacagtgaagggaagtgaagtaaaaatgaacaaaacataaattgggagaaacgcatttgaataatttaccttttttttattcataattgctttttaacgataacaattgagttggacaattaacgcgggagaattcacatggagatcaaagggtaaacaattaaaagcacaaaattatggacccttattaatgttaaaagaaacgcacgaacaaagaaaaataaataaataaattctaaaatgaataggccagttttgaatgagttgccatgcacaaacagtcagtgtaaattgttgccaaagttttagcactcttttcaaattttcgccgactgctgctgactttgagcggctttttgacaactttctaaatcatacaaaaagcattaaaattagttttttaaaaaggcacgaccattccacaactgctcttcagcagggtcggggttgtcagagcaaaaatcgtttgagtcggcggtgtcgtgatcggaaacagggtaatccgagccttaatgatgggggggggggaagcggttaatgtgccaataagtagtcaattaggttaatgtgcaaatagtagtcgtaaaagccatccaaccttcgctggttgtctcctcctcttcctccttcactttttcctttccttcctccattccgttttgcccctcacttccgttggtgccgctattcccctccgagccattaatttcgttctcctttcccattgcaaattcggtccttcctcccccctcattcggctggtaaagggcacagttctgtggagaatgaacaccatctgaagaaa

SEQ ID NO: 29382 - DNA, 945 bp, Heterodera glycines
taattatgggcaattaagcaattgatggaccggcgcaatggtttttacaacaaaaaagaggacaaagtgaaattggccattgatgtgtcaccctgaaagaagcaaaaatggaggacaaatcataaatacaaaatacgatctgcgaaaagcctcttcattggattatcatcagggctcccagatcccaagaccaaatcctgggaccgtccctgatggacaattaaaaatataatagttgaacattttaagcgtgttttgaataaattttgtcaaaaatgcggcttttttgcccacctgaggcctttgaaaattttaatctgggagtcctgattatcatcctatggacctatatttgcatatttcttattgtttatcttttggcttttaccaatattgatttatggatttgttgaaactgctttttgttcagcatcttcttcttgagtgccggcttataaaaattattttcagagtccatggactaaatcacttttcctgcttaggtcaatgtttttgaatttttttggacgaagtttaggcctgtcgttaccacattatattttctttgcagcgaaggggaacatttttgagattttgctcaatttgttagtcgggtttgtacctaaaaattaattgtttattatttttagtgctaacaaaattcaattattaaaatttgaaaatgctttgtttgttttaagaagtgtctacaaatatgaaaatgaaattttatttcgtgtgttgagatggaacaggggtaaaagtgaaaactcgagaaatggttggacattttcatttcgcgcatcgcctcaaaagaaggttattttggccacttattttcattttaaatagttagtaaaaataataaaagctattaaactcgcgcggactcgaaccatcagctcagtcgctgtgactacagctatttttattttatacattttt

SEQ ID NO: 29383 - DNA, 1270 bp, Heterodera glycines
ttcgtttcccgccggcgtttggtccgatgcgattaacattactaagatcggacgaaagacaaagagagagcggcgccttccttccgttctccactccgtccgtcgtccgttaattcattcattcattaacatgcatttgttcgcccgccgttcagctcatccgttcccatttgatggccgcttgaatttgtgcgatttggcgccctttggcgttccgttccgtccgttcaattagcgacgcaataaattttacgccctcccccctaaggcgatggatgtgatttggcggcgatgacgcgccccgcgggcgatcgctcgcccatttaaattcgcgcgtttttcacagtgcgaagggagttttttgaggaaagaagacaaaaaacggaacggacgaaataacgggcggaaaaaccttcaaaaataattgacacttttcgtcagaattttttgacggcgtttttctcccaatttaaaatttaaaaaaaggagaaaatgcaattttcaagcaaaaatcataatttttttattaaaatgacagtctatttttgattttttcccataaaattccttcagccctcgggggattattttctgcccctttccctgccatttccaccgattatttgaatattttagtcgctgtcattccgcccaaatcccatcaaacgcattttcaattctttatgtattatcaaaatttaaaccctttgcgtaggggagcaagcagcacatttttcgccactctctgctgcgcctgctctgatcagcagaattttctatttaaaatattttataaaatatattaaaaaaattaaatattaataaaccaaaaacaaatatccctgtcttttctgatcactttggtcgttcattttcatttgtctgatcattctttcattgatcagtctctccctctttcattttggtgattttgagttttcattttcccccattttcagtgttctactgatcactttgccatttctctctaagtttctttctttttgatcagtgatcacttccttttttgcgcttgccatgatcaatcagtccattcattccgttcacttctcccccccctttccgttgccctttccaatcagtgaatgaatggaatatattctcccttttttggtgttttgtcatccgatcatcatcacaacactttttctccatttactttttcattcgaatttgggcgtggagagaaaggaaaaaagggggaggggaggggtaacaaatgatttggggggggggaatgtaacaaaaa

SEQ ID NO: 29384 - DNA, 1049 bp, Heterodera glycines
  unsure (1)..(1049): unsure at all n locations
cgaccatccgccgagtttgaggaaaacgcaaatgaattaaaatcgctaaagagcaattccaaaaatatcgaagtcgaattggtttccttctcatttttgcgaagagaaaacgcggaggcgagaagatgtttgtcttgagaaaacaaatggaaaacgaagacaaaagcgaaccaactttgatccccaagtaattccttcagagagtgacgcgcaagaactttgccattcaaaaggtccctcaaatcgaatggggtcaatgggaaaattattatataattcagagttcccatccgtactgtatttgaaaattaaaaatattttaaattggaattttgctcattatatatttcatggaaaattttgactttttggtgttctattaaataattctaaatttttacaaggtgccgtctgtgcatcgtcgggtttttccatttaaaaatttacacaaaaattcttaaaaactggcggcgctaccgccactatcggatccttcgtgttaatttcttccttaaatgttttgaaattggttttacccacattttcaaattgaatttggtcgatgagaaccacttatttttttaattttacaaaagagagagaaattgttatcaaaatttcaaaacactcaccacagtgcaaatgaacccgcaattccaactgacaaacagagattttgctcgagttcaaggactgcaagaggttcgtcaaggcaaagttcaaattgaagccgtccagtttgagtactgagcacgtaaaaatgtgcgtcgaaagaactgaacaccgtccaacgactgtcaaagaattattgaaatgattatagagataataactggttattaatacttatgaaaattgaatccacttttgatattctttttttgtcactgataanntattagttgtttttgggacttgttacctattggccgagagaaatgctactgggaatgaaacaaaaaattcccaaatatttggttgattttggccgcggacattgagccaaatttggaggtcgactcactaccgaaacaacagttgagcacttc

SEQ ID NO: 29385 - DNA, 1875 bp, Heterodera glycines
  unsure (1)..(1875): unsure at all n locations
tttatgggggagaccgaatccttcgggaatagcttccctatagcctgtactttaattctgcgttggatttttgctccccataattgtttgagtaccccaaacggacacttgaaaaaatcgatttttttgttttcggggcagtccccccgaaccgatgcgcccagatttatggggagaccgaatccttcgggaatagcttccctatagcctgtactttaattctgcgttggatttttgctccccataattgtttgagtaccccaaacggacacttgaaaaaatcgatttttttgttttcggggcagtccccccgagccgatgcgcccagatttatggggagaccgaatccttccggaatagcttccctatagcctgtactttaattctgcgttggatttttgctccccataattgtttgagtaccccaaacggacacttgaaaaaatcgatttttttgttttcggggcagtccccccgaaccgatgcgcccagatttatggggagaccgaatccttccggaatagcttccctatagcctgtactttaattctgcgttggatttttgctccccataattgtttgagtaccccaaacggacacttgaaaaaatcgatttttttgttttcggggcagtccccccgaaccgatgcgcccagatttatggggagaccgaatccttcgggaatagcttccctatagcctgtactttaattctgcgttggatttttgctccccataaatgtttgagtaccccanacggacacttgaaaaaatcgatttttttgtttcataaatatttttttcagaaagtcatgcgcacccgtccgatctgcaagttaagcaacgattgctgactagccaaaaggttcggtgccgtgatgaaacgaaccagcactgcttaccccgcggcacccggcacggtcccccgaaggaatggatttaattaaattctctccttcggggatttttttccattaggtcgtccgttagcgttcgattgctctagtcaatttttcaaaatttttgttgaaatatttgtcgtgctctgaagggcgtgggagggggggggggcgaagggccccccacgaggccgcgaagaggccgagtgagtaccttcggtgcaggaaaattattaaattttaaaaattttttaattgctttttaaatatgccaaaaaatgtaggcttaacttttttagtgaaaattcgatcactcatattttttgctaattgagcagaagcgtaccaaactttgcagggatactccccggtaaaggactaacttacactgaaatgagcgccgagctagctggctcaaaaaaatttttcgaaaatctgagtctttcgtttttatttatttgcaaaattaattcataaatattttttcagaaagggttctgaaacgcaccaaattttatttacatgttagtttaggcactctgatgctttttctatcaataatggaggtgaataaaattttaattgctttttaactttgggaaaaagtttaggcttaactttttagtgaaagtttgatcactcatatttttttagtctaatctactcaaaacggttcagaattcaataaaaataacattcacggtgcgaaaaatggggtttgacaagtttattggggaaaaaaagactttacaaaataatacccctgggagaagggagtgggaaacatgatttcaaaattttcaattttttctagtctaatctactcaaaccggttcagaattcaataaaaataacattcacggtgcgaaaaatggggtttgaaaagtttattggggaaaaaaagacttttacaaaataatacccctgggagaagggagagggaaacatgatttcaaaaatttcaattttttctagt

SEQ ID NO: 29386 - DNA, 863 bp, Heterodera glycines
  unsure (1)..(863): unsure at all n locations
tcggggtcgctttccacgaatcccacaccaattttgacgaaatcctaacccaaattcgaaaaaggcaaattttcggtttttgttcaaatccgggtttggggttcggaataagttgagatgggtgtcagaattgtaatcaacgacctccacaaaaacccttgaaaagaagctttcacggttttttttatttaaaaatttttgaaacaaaagctctccctttcggtttttaataaaattacaacgccaagcgaagaagtgtaaaaatgtataaaaatgctaaaatatgtatgaaatatgtacaaaaacccccatgaactaatcaaaaagccataaaaggaccaaaaaagacttagaatcactttagtattttaaaaactaatttttgatatctgatttttggaaaaaacccgattttttaggggtacaaaaaattgtacatatgtaacagggaagtcgttcgtttcgtattttcgtgtttttagggcgtttcgtatttcgtattttggcacgaaacacgaaattttgagcactggtaagaagggagggataagtgaaaaattaaaggaggaaattttggataggagaaatttttgagaaaaattaagctatttatttcttttaaagtacattttcatgtgcttatgtggtctagtggataagccttgtgactttcattacaaattttatttttctttctttttaaacagcctaaaaacccacaaattaacaaagatttgatcacttttttgacaatttcttttaacaaatctcactcaaaatttcaaaatttttccggcggcgcctatcggcaccgccgtaccccacccacccccaatgtcctannaaagtttttgaaaaaaaca

SEQ ID NO: 29387 - DNA, 1352 bp, Heterodera glycines
aataaataaatcagttcctgtcatgacagaacttacttttcaggtaatataaatttgcatagttaggtctgcggtatctatgaacgcggaaaaaaatcagtgaaatttccgcctcgagaagaggatcgatgttcaaagaagcaactcgaagatcccgaagttcagaataaaattcaacaatatgttgatgaagcactcaaacgagttcaagatgactttcaaagggaagaggtcacaaatgttatcaaagcggtaaagcgcatcgcatttcatttgcaaaaaagtctattttagcttgtcagcaaaatcctcgaatctgacttattgactttgacaaaacctgaaatttacaggtaaaagaaatcattagagcctggattttaatgtacatgttttttactgtcttgctatggcctaatacgcatgaaaaacgcgtttttaacttggttgcgtttataacttggcttgaagatttctagcttgaaatttattgatacctaatccggcacgtaattttggtgccttttttaagtttcatgcatttttcgtgcatttttttctaaaaaacaattagtagtaaaaccagcgaaaagactacattaaacattcttggtatcattagatagcccttgaaatcctcatcttaatgaaaataaatataagaaaatttattcggtttcaaaaaagatatgaccaaaattgcaaaaaaattaaggctatgaaaattaacttttttcattccagaaaaccttgtggtatttatttatttatcagtacaaaggaaaatagagaattttttttggttgatatgataaaaaaactttgtcaaaaatttttatttttttgctgtctttttccagttttttttgtgcgttttcgctttttttacgcattttccatctttttcgtgcctgcctatgttaggtgcttatttgaaaatttttcgtacctaatagtccaggctctagcaatcgcatactaaatactcagatacctttttcctagcgttttcgacaaacttccacctcggtgaaaaatgctctacatctctctctactttaagatgagttttcccctttataggcatgcaagcatattttggtttttgaacccatttagtaaaagaatagtttcaacattgtaactaatgaagaatttttgataaaaattgtaactgcattttttcagaaattattttgtatgatcatttgaattattaaatacatatccttttattgcttagatttaataattttgaagcctacattttttgcggaaaaaactagggttcgagccccgtgggcgagggtggcttttcgcgggggcgggggtcagagtcgcgggggcggggg

SEQ ID NO: 29388 - DNA, 1793 bp, Heterodera glycines
  unsure (1)..(1793): unsure at all n locations
caataggcttgggttatgccgtcaccacctcttggcactctgccagccgccacatgacaccacacccctccaataggctttggcttctcatccccgaccccccaataggcttgggtttcacccaataggttttggttttctcttacccactccttgctactgataccggagcccagcccttactactaacgtatttcttatttttattaaaacttatatttattttaaaatttatatgctatctaaaatatattcatttcgggtttttcttcagctcatttttcgacttttagaggttcgtttatgattaaaattgtaattttcaaattaacttcattcattcttgcggtggcggttgttacaccttctctttttcacttgatgagttaaattatactatttcataatggcatcttgaaacttagtacaacacgcattcataataaaaggacattttttatgaaataattcacaaaaattatattaaattattaaaattctttcacaaattataatagataattttcatttgcttttctcattccaatttaatttatgtgttaaatattttgaatacccgcgtcaattgattaatgctgctcatgcggtttcgatcacaattagaaacatttgaacttttagcatttttttaaaaatattaaatcggatattttattaatttttatttttagaagtgctaatttaatatattaatttattnaaaaaaatatttttttattcagatttaatctattttatatatccaatatgataaatctatgtatgaataatttggtaaaatatttatttaaaattttatgttttnncatacaaaggtcagatntagttataaatatcgtgtttttatcattaagtttatttttgtatgggttttgtattagatttatattttttaaattataattaaataatatttaattacttttcacctccgcactaataccctaagaaggatataaaaagattttttcacagtaatcattataatattttaaattaaaaattaagatattatctataaataacttttagcatttattttttctttgctttattttgtatattggcgcaaaaatataagaaaatgtataatgacttctttcttgaatatggtatacttaaaatataagtcataattatttggatttattaattatttactcttttttatttataaataataatcacctatcatgaagccttgcccatgatctccacttatttttagaatgctcgctgttgaatagaattacttatttaatttttgattctaatttaatcttttatttaaatgttttctaattttgggtttttcatttaattgtgtttagcttatgctttttttaatatttttttaatttcataaatttcttattcgtcggtcgaccaaccacggtattatacatgtcggccaaagcagttttttatatttactaatatttcaacaatatatttgccaaaatttttcatctattttacaagtaaaaataattaattaattagtaaatggccaacttctcaaacatttttaaattattatgcgatttatttgaattttattttttatgtcgttaaaatatttataatatgatttaaaatgttctaaatttcaattttaaggttttaatttttttgttatttttagtcaagattctaactgcgtataattaatataatttttgattaaattatcagtcaaaaattatataatagtcaatttattaaatgaatttcaatttgttatttttgcatttttttttgataatttatag

SEQ ID NO: 29389 - DNA, 1879 bp, Heterodera glycines
  unsure (1)..(1879): unsure at all n locations
tggcgcttaanttgttcgcataggaaatttagttcaccgtttttatggctgacattttattcagcggtataacataatgttactttttttaataataaattaaattttaatttttttttcttaggctaccgcacatggctgtggctgatgttgccctccatttatgggctgtactggtaattttttttgggtaccatttgcagcatactgtacataaatgattacagtatgaccggtctttccgtaataccgcccccgccgctcaaaaaatgtcatgattccgacaaatactcaattttctaggatatttttagacatagtctacataaaatttctatttttttcaagaaaaaattagaaaatatatctaggatttagggaaaagccaataaaagtctaaagcatagacaaaatcttgagtttttcgacttttgctctatttattaatataattgaggattagcgcctaaactctccctgatcagtattttgatttgtcgtgccgggcgactgtataacgaaaagtaccgtatggaggggaacatataaagggaaagtaccatatgatacatgggttttttttctcaggttcctctttaccatgccgcatccgttcagcggaatttatgtttcgtggttcttcaacccgcacatgggataccaggaagatttggacaaaattgtttgtcatactgttttttttcattattttaaatgttaattccattacagtactacaacaatgtgcacgactttcacaattacgttgtggttactgtaattatgggcacatacctggcgttcagcatcttactgtaattatcagcaaaaaaatttataaacaaaaataattaaaataattttagcatcatgaaaacgtacaagtttaaatcgtccacccagcaaagttattcccaaaaaatggtaaaaattccaaaattaaaaataaaaataaaaatgcattttaaaatttcagacattcatccaagttgtgctgatcagctcaatcaacgcatttgctgctggaatttatgtgtacatgcaatacttcaaaatcagcaaagcactgattgtgattggccaactttcatggtaaaaagcaaagaattacgaaaattgttcaaaaaaaattttttttcaagctaatttaggcaattagattagcaaagtataattgttgtcattttctttacttatataatgaagaaaaattttttggtaaattaattgccgagcaataaacaatagtagaggctgcagaaaaaacatttaaattgttgtcgatgaaaaatgatttctgctgatcacctgcgctagaatttatcatttcttccaaaaaaatcaatttcataaatatcaaaaaacataattcaccgattgggatcattttcaattagtgattgaattcatttaggccttagaaagtccaaaatcataaaatataagataaatcaaaacattattcttcctatcgaaaccatcgggaatgatgatcatttttaaaggctgttcgcccatggcattccgtcactgatctatctgtgcttgaacaaaacaattcgcaaggactgcttgaagatgaccaccggattgatcagtcaaatcactggcaaaagcatcatgcaaacgaacacaacccgaatgcttaacactatcaatgtgctcacaattggtggtggacgcataaacatggcgaccgcgtcacggcacggcggtatgagccgagttgtgccgacaaattcaaccatgaacacaacgccaacaaacaatggtgaacgccaagtgaatgaagggcaagaaaaaatttgaatttcgtcctaaatggcgtacgggagaacgatataatgtggtttttgatcggcctaatgtgccgtgctaa

SEQ ID NO: 29390 - DNA, 1085 bp, Heterodera glycines
  unsure (1)..(1085): unsure at all n locations
ccaaaaaaggaaaatctagattaataaatgatcatttttaatatcggtggatagagagaggagagctctctaatgatccctcattgctgcattttattttatttatttactttttgcatttttaataataatttttttcaaaaaatggaaaaatagcgctagaatgattttattttattttaaaatcccaaaaatgattttacatatttcaaatttcatttattttgttttacaaaatttgccaaaaaggcgcattttggatggcaatcccccatcatcatcatcccaccactcacccaacacaccaacactatgccaacgctttacctccacatacatccacatatttttttatttttttgcgatgccataccaatgcaaaaactctaagaaaattgtgcattttaaattgtttgtaatattttaaaaattttcgggtcccaacgccgtccgtcccccgtcggatacgcgttgtgtcggccaccagcagcagcaggagccgtgccggagaataatgactttgctcagtcatccgccgtcgtccaacaaaaatgccaccaaaaatccgtcctcgtcttccgctgttgttggcaccgccaccacagcggcgccggcggcggcatttccaatcgcgcaaataatcccgggatgcctttatttcacttcttacaacattcgaactaatgaggcctccaccaccacctacagcagcgataaaaattttgttgtgcctccgaaaaacgacgcaaaaaccatttacattgacattgacagccacgtgcactatggtctcggggaaaacaggggattgatggactaattaggcgaaattaggctaattaatggacttacaaaaaaaattccagcggatggacggactaattaggcaaaattaggctaattaatggacttacaaaaaaaaatccagaaaattacgctttttacaaattagaaaacataaaaagggtgatttgctcgggaatattgcatcatgctgagtttcngncgaatattnttaaaaattaggtgaaatttggctaatttaaagatttacaagaaaaaaaaattcagaaaataaacttttt

SEQ ID NO: 29391 - DNA, 1718 bp, Heterodera glycines
ctccaaagcacgtaaaacaaaatcattcgtcacattcatttttcccacaattaattctaatagattttaatgataaagaaatagttcttggtatttcgaagttagttagcacttattctgatttttcttctaatcaacgcatttttaaaggcaaaaaataaaataatttaacatgaacggaaagaaaaattggtttacctcacgaatcatgacttttcttgttttcaaccaaatctatcaaataaaaaagctctcattttaaaagtttttatccaaatgtaaaatcagcaaaaaatgctaaaatatgatattatcattttttcaataattttgtgaagttcatttctttaattcgcaaaaaatgttctttaggctctccaattggttacttttttttcaatcaatggatgctaaaccaaaaaaattacccgaacaaataaaaatgctgttcaatacgcttcatggagcggacgtccattttttggtcgggaaaggcagcaaaaaaacggcaagattgacgaattgatgtttccattaattaacaattcataattttcaataaaccctttcaccacagtgtgtagagaaatgggggactaattgtaatttaaccatattaagggcttaatggcacacaaaaccattctgatgggggcatctgaggtttttgaggcaatgttcaaacatgatgagcaaaacgagacgaaggccggagattgtgcgaaaaacaaattgtgaatttcaattggaaattttcgtttcagtgccctccaacccaattgtggtcattgacattgaggcgattacgttcaagaagatgttacgatttatttacacaaatgatttaagttccattgacggagacggaattgacattctttatgctggtaaaaaatattttaaaaatattaaaatttaaaaaaagaaatatttatttatatacagtttttaattttatttttatttacagccgaatatatttaaattctttattttaaaaaagaaaattacaaggaatatttaatcttatatattttttcacaaatttaaatgattttccgtttttacgaaaatttaaacccgatttttccgtattttcggatccgttcacaaatatcggttgaccgtatgatctgtaccgccttttctcaccactaagctcttcaaatttgaccaaaaattggtcatcttttatgaaaatctgttaaccgatcaaactaattttcaaaacttttagccaacaaatatcacctttctggactgatcgatgcgtgccgcaattttccaattcagaaattacccaatgttttctacgcgtttcggcaagcttcatttcttgaagagacggtattttaaaatttaatttcatatacatatatggccaattctttttttccactgcctttttccgtgaaactgatgaaaagccaagaaaagattttcaaaagtttgacatattttgactggcccaatattttcaaaggcaaagaaatcgtttccagatttagaaccagggaacggatttatatgtgataaaacgccaaatatgtacatatatatgtgtcaaaaaacccccaaaatatgtactaaacccaaaatatgtgtcaaaaatttaaaaaactgctcaaaataagtgaatttctcaaaaaaaagtctcattttttatcaatttcgctagcacaatgctaacctaaaaatatgaaaaaagtcatgaaaag

SEQ ID NO: 29392 - DNA, 1767 bp, Heterodera glycines
cattctaatttctgtcctttttgaggtgttaaactcttcagctgtgtgccgttactgtcgttttcaagtaaaacatatttgtttacgcattttaattataatattattatgataatcaacaaatgttaagaaatgcataatggttggaatgcgaccagaaggtcagttgaaaaacatttaaataaaattataaaaattaaaataaaataaaacaaaaaaagaacaaaaattaattgttttaagaagtgcaaacgaaaagaagccaaaaaagaaaggcatctgttaatacggcattatcagaagcggaaattcaaacaaatgcaaaaaagaagaagcagcagaaaattggaacgaaaattgaaaatgagaaacaaatggtaaaattaacgggaagaaatttaaacgatggaattaaaaattaggcaaaaaatgaaaggtggataaataaaaatcaaactatttaattaaaaataaaaatgttttgaataagaaaaagaatttggcattggcaaaggatgagccaattgcttcagtcttatcatctcaacaatcactgatcacacttgtaaaaagcgtgagaaaaaggatcgaatttttgcgcttaaaacgacaaaaggcatttaaatatttaaatttaaattaaaacaaaaaatatttaaaagggcgaccaatgtcttgtcaaaaagttggacatttgccaattgtgtgagatatttgagcaagaaaaggcactgtttgaggaatgccttttgaacgacgcgacggtggacggagaacgattgtttatggtgagcatcaaataaaatatttttgattaatttaaaaaagtggaaaataattaattaattaatttcaaataaattatttgtttcaatttgttttctctcttagcaatgccaaatttcgctggatgaccgacagcaaattgtgctgagctggcttattttggaaagtgccttttgcacattaaactgtggaggaattcagacaaatcgtgcgtatttgccagaaaagggatttgtggagctccacgtggacggattaacggaattttacaaatctaaattcgccctcgaagcaaaaagtttggccaggtgtttgcgaattcagcagaactgaaatagttttatttgcctttaaatggagtgcctttgtttcagctttgctcttcccattggcaaattctttttggaaagtctgtgccggtcgctccaaatgagccattttaaagggcgggtatattctatttatttaagccttgcatcgcaatttaattgggcaattaattaaggagtgtacatttttcaggaaaaagatgcaattttcgcacttttactgctcaatgcccaacccaattttgcgagcacttctgatccaaaagtcgtttcgtgccgagaacaattgaaacggcaaattttcaaagaagttttgctggacgaaacggtatcgcaaaacggcggcatttcgagtggacaaacggtgcaaaatgagcagaaaaagaaaatgaaaacggaaaaagaggcgaaaaaattaacggaaaaaacgcagaaacaaaatggggagggaaaaaggaggagagatggcacaggaggagaagaagaagcggaaattggcaaagggaagaaggagaaggaaaagcaaatggaagagcaaaaggaaaaggtgggggcaattagtaattgtgaaaagaaagaccatcactaatggaccaaattagggttaacgagggaaaagccgggactggaaaaatggtaagcataagcatta

SEQ ID NO: 29393 - DNA, 940 bp, Heterodera glycines
tgctgatttaaggcttgattcaaaaaactaattgagaagagaaatattttttgcttttatgaaatttggtagaagattttgtccaccaaaaagtggacatccgaatgctcagctgtgctcagtatcaactttatcccatcaatcactgatttggacatgagaactgaaatatttgttagattatgataaataaaatgatgacaattatgtcatcatttattgtctcctcgaaaatctccatttttttaataaaaataaaatttttaaaaatggtaaatatacaaataaaagtacatactaaaaaagtgtatttggaaaaagagacaaaaatggagacatttttttaggggagggcacacataaaaaattacggcaaaatgatgacctaaaaaagaggctaagaccagaaaagaatttgatggattgaattaatctcttttttttctaataaaatgaattgaaaattaattcccttcatttttaacagtgtaaaaaacaacatttgcttcttctctccaattaacttttttaccatcaataccaatttgtaaacaaattttgcatataaatagaaactagcgggtgcgtgaaccgtcggctatttagctgggataaagcgctgcgcgctttgggagcttcgctacctaggctgtaaagcgattcaaattgattgaattggttggagattttttttgaatttttaaaaaattttataggtttttagtcaacatcgaggctcaagacgggcgcttcgcgcccgtttttaaatttgttggccttggacgggcgcttcgcgcccgttattcaaattttgttggccttacagagattagaagagatacaacagtgattaaaagacgtacaaaagtgattaaaagaagtacaacagtgattaaaagacgtcaaaagtgattaaaagaggtacaacagtgataaaaga

SEQ ID NO: 29394 - DNA, 1023 bp, Heterodera glycines
ctccgcgccatcagggctttttcatgattcataaagaatcaagaccattttcgagtatttcaaaaaccatatacaaaatcatatactcaaaaacttatgaaaaagttagaaaaaattgactaaaataatccaatcattttgataatattgctttatcagttgatttgtaatgattttcaaataaaatttgggcagagacttcgagcgccgcaatttttgtcggtttggttaaatttattttcccttccgaattttcccgccccttttggtctttctttgctcctttctctcatcacttttctcacttctcactgttcccatccttcccttttcttctgcccattggccatatgaattcattcatttttcgcttccttcgcttggatttgtctttccggacggaatcaatcattccgagggatcatccgggggaagggggggggagactgaagacacttccattcatcagagcagctgctgctcggatacgaagaaataggtaaactggcaaatggagagaagcggaagagggacaagcgggaaaaggggagaaagagagggaggggagtgaaggaggggaacgagaaaaggggatagagagagagcggaagagagagagagagagacaaagcgggagggagagagagagggagagagaggggagacgacataatgttgaatcgatcgggtcgatcagtgtggcagttaggtgtccccaagaaaagctaatgcaccgacctcgaagccgtagtgccaagcacccgcgtattcgccttgtccgtccggcccagtgcaaatggcgtggccatgcgcttttctaaaacacagcgaaaattttagacaacataccaaatttgcatagattaaatttgtgaaaatgcttaataattgctctgcttgtgagcttattcacccctcttcccatcctccgcagtacgttccgccatcatcgaagacaaatcggcccccgatcattttcagcccgaaattaatgctcaatccgcgatgggatcacttggaaaa

SEQ ID NO: 29395 - DNA, 1410 bp, Heterodera glycines
taggctaatagagggcggagggaggccctctcgactttcttttaccgtttgttctctcattttcacgcaaacattggccgttctgatctttctttctttggggataatgccgattggtcttaaaacttctttgatgaactgttttggttttcagtttttggtcgaccgaaatggcaatgttgtgcagcgttactcgcccaacacagagccaagggacatcgaagcggacattgagaagttggtggctgccgcagcctaatcgcaaaaaccatttgaaagaaaacgaaatacgacgatcgacgagaccaaaaattaaatgatgttcatttaagcaaatttctaatttactttggaataaaaaaattatgatttagtttaaaatgacgggttaatgtaaatgcaaattaagttggaaaattttttgggcactgaattatttcctagggatttgaaaattcattaattttattcaaaatggatacccaattaattataattaaaataattcgaatgatgatgcaaattaagttggaaaattttttgggcattgaattatttcctagggatttgaaaattcattaattttattccaaatggatacccaattaattataattaaaataattcgaatgatgtcattgaaaaagaacaaggaaaaggaacctgaggtgatgtcattttaacttttctattttgtgtgctgtgctgggcattttattattcattcgttcctccgcctttgccttatcattttgttcatttcattccttttcgcgtaaacaaaaattttcaatttattattgctgagcaagtgggtatttaagcggggtttccttttgcaattaattaattgtaattaattgatcgtctccccaatggcttcttcactcaccattgaaaaacgctgcaaacttttcaacacaaaacaaatggaatgccaattcggtaataactagtaaacattttaggggctaaattaattatttatcagatttaaatttgattaaatttaacccaattatttgttaaattatattttgattaaattttacttttagatggaactgaagccggaaaatgtgctttttgtgtaaagcttccgtgtaaatttggagcagttaattgtgcagaggaagtgagcatctcttgtgtaaatccgcaagaattggaaaaatgctgcaagggtaatttacatgtttaatgtctaaattaaaaccaaaaataaaacggaataaaaatgaatttgaattttcgaaaataattaaattgcgagattttgaaaaaagcctgttgacaaaaaaccaggaaaatccaggcctaggaaaaatctagattgcccaaaaatggcctgcacctggattcaggtaaatccaggcctggatccaagtccaggtcgaactctaataataa

SEQ ID NO: 29396 - DNA, 1261 bp, Heterodera glycines
  unsure (1)..(1261): unsure at all n locations
agtcatttgcattcgctttaaggcatgcctaacancggctctttttttctcacataagaaatttcttcttcagtcattttagccctttttagtccaattctaaatctattttcaaaaagttctttttttttcatcgttatccattagctttctttgttttgcttttctttgcgccacatatgatttcatagtatgttcttcatcagaagtgtaagaaaaataattcatttcatcgagatttatgctttctttgttaccatttttttcatttgttaagttcgtttctgaccgcttttgtttaccggagctttgaaccggttcaatccgcttttgtttaccagagctttgaaccggttcaatccgcttttgttttccggagctttgaaccggttcggcgtctaaatcctggagagaagaagagcaacagggagaatcttttggaaaattttgtttagtgcggaccattattatctgtgttaaaaattaaataaataggacaatataattgataattaattaaattgaacaattacaaataattttttttgattttattgcactttaggtctgtgtttaacgaccgataaggggatataatgatttggttctacatgacaatcaattttagacaatccaccaaataaacaattaaccagtggataatccgttattaatggaaaaatgccaacaattttttaaaagataacatttttcgttttagagagcccgaaaaaataataaaaacttttctaagttgtaaaattttttgtgatgatgaaaatagtctattactaaacccttatttgattaaaaaccaatttcatggtatcttggaaggttttaaatgaatttgaatttaattcctattaccattttcggaaaagttttcttatttcctaaaactcagctataaattatgtgttcgaaaaattattgattaattcaccaaaaaaaaataaaattactgttgaattgtccattgaaggtttttccgctgacggattagccactggtaaatgtcgacggattatcattgaaaattgtccgaatattatggattgtccattaacattaacaataacaatatcaataaatttaattgttattgaaataattaataagtaaaaaaaattattaaaacttttctaaaaggggtaatatgataaaggcgcaacaatcaactgtttttaaaaaaaatgtaattaaattaaatgttgaaaaaactaaaaagtttatatgggaatttaaaacaaaagggatt

SEQ ID NO: 29397 - DNA, 966 bp, Heterodera glycines
cggcgcctatcggcaccgccgtacccactcaccaaccgccgttctcgtaaatttcttggaaaaatgcgccgcaaaaaaaatttgttaataatctgatttttcagatcaaacttgcacttaaacataatctgctaatttcctccccaaaattgttaaatcctataatgggagatgaaaaatataatttgatacatatttgatagaatgaattgtaaaaaaactgattctaagcaatttagcaaaatgttctgattttggaccccaaaatctgattttttggacttgatgttctgattttgaaaatttctcgatcacacccctgattttactggtccaactctctgctgcatgtaacaactcactgttagccgagatcagcaaagatgccaaaacaacaacaaccaaaaatagggacgatgaagtcgacattttaaatttttaaaaacactagaataaaaacaaaattaaaaagaggaaatttaaaatgaaatttttttgttatttttgctttttcactgtagagcaaaagtgagaaataatttttttttcaaaaatttataatgatttgttaccgttcaaatgtttctatgtttaaagccttccattttttaattaaaaaagcacaacaaaagccattttctttcgaaaacctccgtaaacattgttttcaattgaaataaaaattgttgctgttttttatattgcttttttcatttcctttgttaaaaaaatgatttcatctcatagctagaagcaaaaaaaaaaagtgaaaatcaaaattatggcttcaattagggccaatcaattaggggacctgctgagcgagaattttcagaacaagaaatttcttgctgttttatgatgtcatttcttggtctcgatcctcttgtaacttttcaattcaatcactgttgggtctatgtcagttgggccccagccaagtttctggactttaacttttttctt

SEQ ID NO: 29398 - DNA, 981 bp, Heterodera glycines
  unsure (1)..(981): unsure at all n locations
gggggcctagctcgaaaaatttgnaaaattttcgaacatgtaatataccattcaatagagcttaaaaagctctacaattttctctaaggcaattttttgctaaaaccgacccctgacgagttatgggcccgggactcaaatgtcccgcttaggccaaaaaaaatttctatttccggaaaaaaaccgaaatttttccaaaaatcccaccaatcgatagagctcgaaaaacggttgtttgaaagtggtctccgttttccccggaaaaatcggcaaaaaatcataaaattcaaaaaccccaaaacctcttagggggcctagctcgagaaatttagaaaattttcgaaattttaaaatttgaaaaaatcgggcttacaaaactctacaataagtccgctggccaccccccgctcagttcaaaccctggcgagttattcgcccggtactgaagtggacaaagttggtactgaatttctagccaagtctacaagctttcctattataggtagaggcctggatttttttttgttttttagaaaacacttcaacttaggttcctaccagcagacattttttggttcaggttttaggaaaaaagttatgggcgttcaaacgcacgcaaaaataggaaaaaagtccctggtactcagttgggcctcggaccaaaaaacctatagttttcccagatgcgccgtctcgagctacccctcggtgcaaaatttcagccctgtacgcttagccgttcccgagattttgtttttgaagatgagttgcctaatcgatataacatatatataatcataggattcatcactatacgcagggattctgaggctttcccgatacgtcttttttttccatttttcatatagggatggaccatccctttagtcaatgttaaagggatggatcaatcactttaacattaactaaagggatggctacatccctttaatattgactaaagggatggctactatccct

SEQ ID NO: 29399 - DNA, 672 bp, Heterodera glycines
  unsure (1)..(672): unsure at all n locations
ttccagcaaggtacttcccaattttttgtttggaaaccgttgatgtgcagctgaagtggcggcgttggcaccgctggtcgttccgcccaaacggcggtgccgttggtggtgatgggtgttgtgactgtcaccgccacccgcactgcgtcgatgttgcagatttgatgatgacgaggaggcatggcgcacggacgtggacggtgcagacgaagccgcatcgccgttctgctgctgcggttgggctagcccacctgaacctgacggactcgtcgacgtgccgccaatcagaatttctgtatgggggggggggttgattattgacaaaaattgaaatgacaatgagcggtgaaatatacccatcaacaaaattgactcatttttgaatgaaaaataaatatcggtcaaataaggacaaaaccaaatcgctgaaagagaggtgaaaaaagagtgcatttttttcaagacgagaaagaagactaagcttttccttcaaaaatggattcaattttaaaatattggctgtccaaatcagtgcaaaacactttcacttttcaaaattgatggcccgaaaaaatataactttgatctgaatgtgccatctaaacaaaaagcaacgattcgcctattctaaaaatgagcaatcatttcccnaaatatgcctttgccaaattg

SEQ ID NO: 29400 - DNA, 1860 bp, Heterodera glycines
agtggcggcgcaaaagtggaggcgcaaaagtggaggcgcaaaagtggcggagcaaaagtggcggcgcaaaagtggaggcgcaaaagtggaggcgcaaaagtggaggcgcaaaagtggcggagcaaaagtggcggcgcaaaagtggcggagcaaaagtggcggcgcaaaagtggaggcgcaaaagtggaggcgcaaaagtggcggagcaaaagtggcggcgcaaaagtggcggagcaaaagtggcggcgcaaaagtggaggcgcaaaagtggaggcgcaaaagtggaggcgcaaaagtggaggcgcaaaagtggcggcgcaaaagtggaggcgcaaaagtggaggcgcaaaagtggaggcgcaaaagtggcggagcaaaagtggcggcgcaaaagtggcggagcaaaagtggcggcgcaaaagtggaggcgcaaaagtggaggcgcaaaagtggcggagcaaaagtggcggcgcaaaagtggcggagcaaaagtggcggcgcaaaagtggaggcgcaaaagtggaggcgcaaaagtggaggcgcaaaagtggcggagcaaaagtggcggcgcaaaagtggaggcgcaaaagtggaggcgcaaaagtggaggcgcaaaagtggcggagcaaaagtggcggcgcaaaagtggcggagcaaaagttgcggcgcaaaagtggcggagcaaaagtggcggcgcaaaagtggcggagcaaaagtggcggcgcaaaagtggaggcgcaaaagtggaggcgcaaatgttccaggcgcaaatgttggaagcgcaaatatggaggcgcaaatgtggcagttcacctcgagcacccatacggacattgccgcgaagggggagaatggtacatctacatcacaacattaatgggccgggttcgtcatcgctatttcctatttgtagggaatgcagaaagtcgatgatgtgcactaaaactgtcagtttgcattttcaggtggactcttcgcgtgatgaccttgaacttgtcaacagaaccgcacgtgtccaccttgcagttgttttcgtcacttccatccatacagtcactgtccccatcacagcgccaacttttgtaaatgcattgaccagaatcgcaccttgagaatcaattggagtaaaagaattgattaatgagtgattcaccgaaactcagagtccttttcacattcaggcttcgtttctttagctgtacagtttgcttcgtccttcatgtccaaacaatcagcctaaatgaaagcagaacaattgaccctattcctctaatattagtcgagaattacctgcccatcgcatacccattcgattggaatgcacgaagtcgcagaatgcaagtcaaagcctttgcactcaaagtgtttctcgtcacatttaagctctgaaatatcaaaaacagaaacctgacaaatttgaaaaagtcatgagcagaaagcctgatcagagcaaagaatacacaaaaaagatctgtaatgggagcatcagtgtcagcttaactaagccttagcattcaatctcatcatccttaaacacgcagtcgcaatcccctaggcaaattcatttctttggaatcctcgcgtaagagacaacggtgtaggttacaagtgaatgagaccagacatgtcatatgcatcatgcaaccagggtcaagaaaaagcgcagaagagaaattcattagaacaggattggcggggggttgttgctcgaataaaaagaaaagtctcctgaacacactacgtagtaaacaatttccagcgattctctcccccctcacccataataatatttcgttggccgcactccgcacgatgtgagggaattatgatcagagaacaagtcaagcgcacgtacgtacg

SEQ ID NO: 29401 - DNA, 1088 bp, Heterodera glycines
accgatgacagtgtcaggcggggagtttgactgggggcggttcatctgtcaaagcgtaacgcaggtgtcctaaggcgagctcagagaggacggaaacctctcgtagagcaaaaaggcaaatgcttacttgatcctgattttcagtacgaatacggaccgcgaaagcgtggcttatcgatccttttgaatgtgtaaagtttccagcaagaggtgtcagaaaagttaccacagggataactggcttgtggcggccaagcgtccatagcgacgtcgctttttgatccttcgatgtcggctcttcctatcattgcgaagcagaattcgccaagcgttggattgttcacccaccaatagggaacgtgagctgggtttagaccgtcgtgagacaggttagttttaccctactaaagacctgttgctatgatagtaatcctgcttagtacgagaggaaccgcaggttcagacatttggttcatgtgcttggtcgatagaccaatggtgcgaagctaccatctgagggattatgactgaacgcctctaagtcagaatcccgcctaggcaagatagcaatattcttgctccccggtgtcgggaggcactacttatgcgccgcttgcggtgcagcacaaatgccccagcatctggcccgatgtgcgtgcttaattgctcgcacattgccaaagccgtagcactcgtgtgccatggtggaacgtcggggcgcaaaatcacttgtatacgacttgactactggtcagggggttgttagcagtagagcagcttttacactgcgatctgttgagacttagcccttgatcggatgatttgtcttctttttccccctttactttttgtgccaacaacattttaggtaaaggtacatgagaagagaagggtctctcttaagggagtcaaatgcctcgttaccaccgttaagtcaggtaggcaaatgcctcgtcaccattaagtcaggtagccaaatgcctcgttgccaccattaagtcaggtaggcaaatgcctcgtcaccattaagtcaggtagccaaatacctcgttgccaccgttaagtcaggtaggcaaatgcctcttcac

SEQ ID NO: 29402 - DNA, 1743 bp, Heterodera glycines
agggtaggcatttttttctcattaaattttcggcctttgcatttcgatttctggcaaaagaaatcgtaatttgtcaaaaacatcctctccaaaattgatttacctcggtgttgctggttttgggcaccattaatggcgccgactttggcgtgtccgcaagcgcatctaaaaagcgcaagaaatggtcacaaaaaaacattggcactcaaactgcacacactttcgaataacttttcattcggtcggtcaattagtgttccgtgccgaccgaccggaatttcccgtttctccccaagatctttgcgatttttgacagaatcccagggtccgggatgcgccatggcattaatttttcggtcccatttttaggttttgccaagtctaaaatccagtgaccggtcggacgtaggggccgagaatccctgacttttccgggatttcatggccccgttgaggttttgaaaactcccggtctgccgacacgtacatcgcagcgggcgcttcatctttatgaacagactgccggtcgcgttcacatcggtggccatttccacgtccttgggcatgaaattttcgaacacctgcttgatgtggcctttggagaagaatttgcgcagctcggccttgttcagatactctgaacaatgggacaaaaagttttacagtcttctaaaaaaaattttggattttgcgttttttttgggaggtgggacaggcccggatcagtttttatggtataattccttgcatacctgtctggatcaaatgaattcgatatcattcaaaagcccaaagtattctctatcagcctgcaaaatttcaaaaaattcggttggggttacaaaaaggttatcataaaaaagctaaaaaaaaaaacgatttccaaaaatttatgtctataaattttttgtaattcaatgaatatttttttgaaattttgcaggctaatagagaaaacgtagggctattaaatgaaatggaattcattcaattcggataactatgaaagcaattatacccaaaaaactgatccgtggccctgttggtcggggcccagtgacccgtttcgtctgtcatgacacaccgtcatatttgttgaagtaggttttctgcagttcaagcagcacaactggctcatgttccgcaccacactcggacagacagctcaaaagacgttcacgaccctgaaaatagtgaaggaattttccatattttttgtaccctcaagccggtggtcaaaaattgtttttaaatggctcagaactcctaaaaatttttcacaaattcggaccatattgttgcgttcagatgtgctgagcattacagcagaagaagccataattgcttgctgtcaatgtagacaaatcagagaattatatgaatttaagtaggctaaaaaaaaaaaaattaattttagagccctgtattttgagaaaaaaaaattatgcaggaacaggaacaggggatagtgaagctggtgggtgccctacgtttcccccccccccccgcatcgtttccccccgagaaatttaaaaaaaaatttactaacttagaaattttttaagaaattttcagcgattttttggaaaaatttttaaaaaaactttgtaattcaccataaaaatttctcaaaaaaatttttttcttagaattttcttgtaaaaaaactttctaagatttttttcttgaaaaatttttaagttagcaattttttttttttttaattttctcggggggggaaac

SEQ ID NO: 29403 - DNA, 1747 bp, Heterodera glycines
  unsure (1)..(1747): unsure at all n locations
ttaaaatattttttattccatcggtcgcaaaatttggtggacggacgaaaagaaacgaataaagtcagctgtcacaggccgaaggcgccaacaaattgaatgtaaagcggcggccaacggaactttactttggtggaaacattaagtaaaaacagcgaattttctttcttcactttcgcagccgactttctttctttcttttattattattattattattttttattatttgagtaaaatcaattattttttatttttattttaattttaattttaaattttactttcctttttcttttggtcgcttttcattttcatttttccttttactttctttcgttttgtttgcccttctttgccttatattttcttcccatatacaaagcctaaaagattattagcttcgaatttcaaaatataaaaaagccattgtcattttaattcactaaaatttgctttttattttttattgttttttgctttatccaaaagaccaaatgaatatagaatccttttttaaaactatatataataatatgaatgagtttttttcacatttcgtaaaaccagacaaatccattagcaagggatttctgacaagcaaccaacacagttcatgatcattcattccttgttctccgactctccagttcactttccattcgtcagctgcagctttccctttcaatcggagtatagaatcccttccccctcccctcccccgccacaattcccccttccccccttttccccacttttgctgcgacgctttctttggacatcccgacggaagtaaaaatagttaaagcgacttctgttgaattacaaaatatgcgtgtcggctgatgggtctaatggcacttatcggagatatttctaaaggagaccggaagaaggcaaagtgaaacattcactcactaattaaatggaaagaacaaaattgatgaccgtaatcgaatacagtacccggttgatttttgattaaaattctaatcctttctgcgcttttttatgccatcgaatatttggcgggggaatcttatgactaacaagcaaatgaggaggactttatcatgataaaggattatcggatgaagaaaaagccattacaaaagtgtctgcccagttagtcgctgggaaaagtgtgaaatcgcaacgaaaaggccgcggggacggaagtgccaatggacgagacggcaaatccgcttaacggaaaggacgaggaggggaatgagcgacagtgggggttaaggagggaaaaagcgggaggagatgaagccgttggtggggagagagatgaagccgtttgggggngggggggggtgacttccccgccctgtcctatttcctgaacgattacgtcctggtcctgatgctccgataaaattcgttcgcaatttccgcgctttccgtcgatgcttcgagctctttgatcagagcatttccaatgcccctgcaagacatgaaaaggcgtcagaatattcggtcacatgattgatcgcaaaagtggctcttcaacgattcccatggtcagagctcgagcagcggcagtcgtcttctcaccattttccacgagtcatccaaactgctaagcttgtttcaccgttttcttccgtcggtcacattttgcacttttccacgtccatcaattggtcgcggtgacaatccgcaacagggcgagggcaaatgtcgtaacggcagagccccagtgtccaataattgcccccaaaaaactcaaatcaccgcc

SEQ ID NO: 29404 - DNA, 985 bp, Heterodera glycines
  unsure (1)..(985): unsure at all n locations
tgaaaaaaatcgattttttgtttcggggcagtccccccganccgatgcgcncagattatgaggagacngatccnttcgggaatagcttccctatagtctgtactttaattctgcgttggatttttgctccccataattgtttgagtaccccaaacggacacttgaaaaaatcgatttttttgttttcggggcagtccccccgaaccgatgcgcccagatttatggggagaccgaatccttcgggaatagcttccctatagcctgtactttaattctgcgttggatttttgctccccataattgtttgagtaccccaaacggacacttgaaaaaatcgatttttttgttttcggggcagtccccccgaaccgatgcgcccagatttatggggagaccgaatccttcgggaatagcttccctatagcctgtactttaattctgcgttggatttttgctccccataattgtttgagtaccccaaacggacacttgaaaaaatcgatttttttgttttcggggcagtccccccgaaccgatgcgcccagatttatggggagaccgaatccttcgggaatagcttccctatagcctgtactttaattctgcgttggatttttgctccccataattgtttgagtaccccaaacggacacttgaaaaaatcgatttttttgttttcggggcagtccccccgaaccgatgcgcctagatttatggggagaccgaatccttcgggaatagcttccctatagcctgtactttaattctgcgttggatttttgctccccataattgtttgagtaccccaaacggacacttgaaaaaatcgatttttttgttttcggggcagtccccccgaaccgatgcgcctagatttatggggagaccgaatccttcgggaatagcttccctatagcctgtactttaattctgcgttggatttttgctcccccataattgtttgagtaccccagaacggacactg

SEQ ID NO: 29405 - DNA, 1759 bp, Heterodera glycines
attattttaaaatgcctcatttttgccattgtacatcgacggtgcccccatcgctgtatgtaccgtctgtgaaaatatacgcaaatttaaaattactagggtttcctcagttgaccgttctggcaactctttacatagattagagagaagcaaagagcttttttattcatatttatttaaatttcgtccatttatcatttgcgatcccggcccattcctgcaaatccatgtcatcattttttttaaattttttatcatcaaattgttttgtgtcttttcccccccccccccattttttttatctgtatacaatcatttgactgatttcatcaatttttgttgttgatccatatattcctttggcatgagggattgatgcaccgctctgttgttgactttaggtgtttgctataaaagaattatttgaaaaaatggcaaaaaatgcgatgtttttgagggcgcttttccctcacttcagcttctgctgatggatgggttgtttttctgttgaccctttttagccacccaatttgaaggaattaaacggtggaaaaaacaactaaatttcaatgaatctttactaattatatggaagataagataattagtttttatttgtcaatttttgtctgtttgttttgttgccgattgggatgggaaaaccaaaacaacggcggatagggacggaggagtggccgaatcaattggcgagagagagagagaggagaatgcttggggtattcattcctcattttatccattaatttttattgcccaaaatgttccaaaaataacaattatagtgcaagcaattaatttaagattaattgccttttctttggtagtcgggcggcgggaggggcaaccgcgtcgaacaacaaacacacacacccagttctgctgttgatgtcgaacgcgtacaaaaacatacttttttggagtcggaattccggttttcgacattttcggtgttgtaatttccgtgtttcgacattttctataataaatttcgttttccgacattttaagagttggattccgattccccaaaattgaggcttcgaaactttctgactctgatatgtgccatcttcgttattgtccgtttgtccgcctttcccccctcctctttttgtccgttctcacattctccgtccgttcacttcgaattctgcaaattgtgcccggtttcaccaattcccatgtgctgttcaattatcggttggcccaaacgctggcggacatgggacattcggtgactctgtggacgcaaatggaaatggcaatggtgtaagggaaaggggggggggtcggaaaaatggggcaaaaaaagggggcggaaaattggggcaaaagggtgggagaacggaggggaaccggaaaacctggaggagaggggaatcgaaaaaggagaggggaatgggaaaattcggagggaggaaagtggaatcggaaattgtggaaaaaggggtttgggaatggaagggaatgggaaaattcgggaaaaccgaggggggaggggaatcggaaaattggaaaaaggggtttgggaatggaagggaatgggaaaattcgggaaaaccgaggggggaggggaatcggaaaattggaaaaaggggtttgggaatggaagggaatgggaaaattcgggaaaaccgagggggaaggggaatcggaaaattggaaaaactagtaaaaaattgagaattagctactggaaatccgagaagtttctcgactgcgtggagtcaaattccgt

SEQ ID NO: 29406 - DNA, 1225 bp, Heterodera glycines
tagcagaaaaaaaaaattttgggtggagcccaggttctccactattaccttttttgccaatttattcagaacaaaaaacgcatggctgatgtcctgaaagtatatatttgtttgtaaattttggatatacaaaattcaattttaggaagcagctttttctcttgccggtcgctcgttgtattaaatttattacttttttaatttgagttcagaggcgaaattcactgccggcgatttctctcacatggtaaacatttataataaaagcatttttatcacttaatttcccttaggttgttcaaaatgtgtcttcccaagcgcagtacacagtcagaatgaagcgcgaaaatgttgttggtacgttgaatggtttttcagtttttgaatatcaccctccccccccccccctaaaggtgtttttctgccggtgttcgaagcccaccgaaaagagggctctgacggagacgcgtacaatttgacgggacttggcaaaggcggggcgaacattgggaagctcaagcgcaactacaacaaagcggtggaactgctggtggagctggccacgctgcagacgtgctttatcacactggacgaggccatcaaagtgacgaatcgtcgcgtgaacgcaattgaacacggtcagtcgggggaatggacaaaaatgcaacagatacgggaaaaaagcgggatgaaatgaccgagataacccccgtcctgttggtctaacaataaagtccaagtggaatttacaaaacatgaccaaaacaaaaaacaaattcgtttttcgcggcttcatttttgtcacggttcgttttttgtgtgttatatgtataggctatatgacttctcgctgtttgaactcctaataattataatgacaaaaaatgaataatccgcgaaatgaattagggggtcattcatggaaccgaaatccatctccatttgcacattgtcattcattagatttaactgaaaaccgccattttcagtaatcatcccgaagattgaaaatacgctcacttacattgtcaccgaattggacgaaatggagcgcgaggaattctttcggtaaaaggcaaaaataaattatataaaaaaatatatgtacttttttatagcatgaagaagatccaagccaagaagaaacgcgaacgcgacgaagaaaaaagcccgggaaacggagaatgtgctgaccgaacggcagccggacgatgggagggcgctg

SEQ ID NO: 29407 - DNA, 760 bp, Heterodera glycines
tttttttttggctaattttttttttcatataatgatgaatacccgggggttttcgaggtcgctgatcacgaatatggcatccatttcgactaattcgggatcccggcaccgaatttaaacaaaaagtcaaaatttgaatttcgaattttagttcgaatttgggttccgggttcgtaataggttaaaataattgtcatattcgtgatcagcaacctccaaaaccctcgggtacttgttttcaggactttttaaagcgaaaaaaatttgaaaaaattagaccaaaaaaagtgcaaaaaattttcaaaacagggctttgtaaatagcgtcaaaaattttcagagggggggggggtaacaaaaagggtaagtgccccgctttcattctcccctcccccgtcggtttgccacctttttcggcaccctacgaacagtagcagcagaagcagctaatttgcgcatttcctctgcttcttcttccgctctttggaggtgttctttgagttttttgatttcgtcctcctgaaaattaaaaaaaaattatgtaaaagctgaatttgatttgatgggtcgaatgttgcaatttctatttgcctatactgaattttcagttttttgccgcctgaaaatttcattttttcgacgcctccgttttttgccacctttttttccttgtcccttttcaatgctttgatttctttcgcttgcgcctccaaaagttcgtttctttcttcgtcttctttctcaagcgccttaataaaatc

SEQ ID NO: 29408 - DNA, 1908 bp, Heterodera glycines
aagttgcgatcattttcggcatttggatttgaatttgattgctcattttcggatttgtctttcagcgcattaatcagatgagagaggcgagtgacatcatctcctttagaggcaagaaatagagcctcaagctcttctgcttgggctttgaccaattccaaattcttggcttgcgtaaggccaacaagacgaatgaggaagctcatgtttggcttgagtctgtccaaaaattcctcacaaactttctctttgcgctgatcaccagacaatgatggatttgatgactcaactagcggagtcatacgccttaaaaattggccaaccgtttcatcctcacgctgtcggcacagtgcaatggttcgcttcgccaattcccgtcgttgaggcgagtccaacttggctctcagggcatccaaggcgctggtgagagttacgatttggtcagcctcgagttccttgaacagggtcctcggcgtgtccttgagcgctaatttgagacgcgtgactttctctccttcggtcagattttttccggacaccgataagtagtccttgaatcgctcggcccaatcatcgaaagcgtataccgattcttctccgaataactccaaatttgaatttatcgataatgagttgctcaacatgttgatgccaaagaaagatcgggttgggccagcaggattgttggaagaggtcccgacgcctttctgtgtctgcgttgccgtgccgccacctgtgcttaacaagccacggtttgtgcccttgttatccttcgacggcatttcaaattgtgaggagtcgtcctgctcgcgcactgtgctgttggcatctgttccatcatttgatcgttagagatcgtcgatttggtcgaccaatgtttcaactatgggcctttattatgtcaaaacttgagttgtcatttgagacatcctccgaggcggtaaatttgtgacgcaatttgtcactttgtgccgtcgttgtgtctcggcacggcgccacaactacggcctgtcaattcattcattttctacaaccaaaaaagcatgtgcaccacagcgcatggatgggtgaccaccatatcttgggccaagaggccaaatccaatttggccaaaatccatttggccattatcggcctcccccgaaaaatttgtttacccgcccacgcgttcattttgactggaaaaggaggaataagaaaatgtaatgaagtgttacataacatatgctgatggatttgcaaaagaaaaatgggtataatccgaaatatgtaaaaaatggctttacaagaaatataaaaaatgaaaaaatgtaatacaaaaaatggcgccaaaatttttctaaaaagaaaattataaatttttaaaaaatggaaatttagtaaagtgccaagacccgaatcttaaaaaaaattaatacttttgccaataaaatttatttttctcattttgtaaattgcagaagtgcgcctccggcagcaaacagaagttgcgcagtcgcagcttcggccggaagaactcaacatgctgttaagctaaggtcgacaaaaaagcaaatttttgataaatttaaaaaattggcaaagtgtttcgctatggtatttccaaagaaatcgttaccctataaaattttgtagtgaatatgaattcataattcaaataaatttaaaattttcattttttggcgtaaaaatttttgcgtccgcttcagtcccacggaaagcgctggtcgctcaaagaattgccgaaagcttgctgttgcgaatggtcaatttattacggtggagaactttactaatgattgtggaagcgatacggtaggggcgaatacggtgtcgccgcgtcgaaaaatttcaatgccacaaacgacgtcctcaatgatgatgatgatgatgggcaccatggcaatg

SEQ ID NO: 29409 - DNA, 1471 bp, Heterodera glycines
  unsure (1)..(1471): unsure at all n locations
gtgccatcgttgtcgtcgtcgtcccggtcagcatgtgccgtccatttgtgcaagagtaacaacaacagacacaacaatttggcgtcgtagccgccgcgatcgccaaatgatgctgatcgcctggactgaccgaaccattaatcggattgatcttttcatgatggccatgatgactgctgctgctgatcgggctatgctgatcactattgatcagattgtgccgacattggtgctgatgggatgccactgaagcggcggaggacagcgcggacggtgacggcgacgaacttttcctttgatgttgttgcgaatgcttggccacgacggtgccatacggaggcggcagcggcggacgctcgtgctgatcacaatgtgtggaaaagaaaaacaccgctgtaaaccataaagaatcagagatgatggcaaagtaagctacagcaatttaacggaagaaagttcggggatttaattgaattggcattatgttatccgatcattggcacacccggtaggaggcaattgcgtctggccaactgcgttctgagacaactttaagaagccattttttttcatttttcgccaaatcaagtaaactagatagatgtcattcgaaagctctgtctatatctttcgaagatatttgtaagcttttgcaaagcgattaaggaacccataaaaaattcatatatttttatttttaactgttttatttcttaacgaataattgtgaatctcagacgtaattggaaaattttgagacccgggtcaaatcaaaaatgtttttttttaatttagcaggctactagagcttgtcaaatgctttcgaaaaatgccattttataacatttggtttagcataaattcatggcgggaactccccggcgccaaaagaggcgatttccacctttgatcagtcaaatgcgtttggcaacttgccggtggcgttggagacgctgtccggctgaatgttttgctgcgaggaggacggcgcgtccacagtgagcgcagcggtggcggccgcagtggtggcgcagccgcgtcccgccaggaacaggcgctggcggttgtcgtgcacctcgcgcaggatgcgcataagcagcgagacgagcagcgtgagcaacaggcacgggaacagcttgaacacggcaccggtgatccaaaatgcaaggcgaaagacgaggcaatcggcctgaacaggatggccattttaaaaaaaattgtatttctattacaaaatgccaaaatattttgaatttctataattttggagaccggaacgggctcggtggtactgagacgggcttttattctctaactcaaaaaattctcaatgaaacaaaaagtcccgctcggctctcagntggncaaagtgggacttttttggcatgctgttgattttatttatcccagcctcgtccnatctccttcgtctaatcatatcaaatcagtctaatcatgcgctcccatcagc

SEQ ID NO: 29410 - DNA, 2011 bp, Heterodera glycines
  unsure (1)..(2011): unsure at all n locations
gtagagtcaaaagattggaaacagaagcattatttaaaatcaaaaataattgatattagatatgttacatcttagtggcaaaaaaacaaacaaaaaaaggtttccaatttggaaaaagaaatagggctcaaaaaggggagatggttagaggtcaagagaaatgtttcggaaggtacgcgccccatctgataatgccattattcagttccacaactgaccaaaggagattgtgttcgtagacaattaattgtccaattaagggactaggaccaagcacaataaaatgttgtacaaattttggaactgtgccgcctcacgatgggatgaaaagcatagaaaaaacaaggtcaaaatatcaaagaattaggttgttttaaactttacagtttaattcattagcgtccaaagagtggaggcgggagaccagagaatggtaatggtatcgtatcggatttcggatcacctcccctctcccttttcaccccttcctcaccctcccccccttcactttccctcgctctttcacccgccgaactgatcaagcagttgtacctattcacccttccacagcatttccccatctttttttcccgaagagaatcgatcggaagagggaagggggggggagaggggggaaatcacctgtcagtgtcggaggaggggaagagatgagtgggcgttggtgcagaagaggggagggggaggggggaaagaacttgccgttgctgctgctgccggtggctttgtccatctccgagtgagttggtctgtttgcccctcggaggctgatgattgatgcttgttattgccgtgttgcgggtgtataggggtagggtgttgatgtaatgataaatgaccgcgtaggacgaactgaggggtctgctttgacgttctttctccctactttgctacgaggtatattatcggaatttagcgaattatctgatccgatcttacgattgttaatagtgatgaattcacggcgtgctgttctatacggcttgtatgcgtctctaattataacattcctcgtatgaacacctgtgaactctgctttgacattctttcgtcaaactttgtcagttgcttttaatattaaaaattagcgaattatcttatccaaatttaccactattaatactgaggcatccaccgtgggttgttctatacggcttgtatgcgtctctaattataacattcctcgtatgaacacctgtgaactctgctttgacattctttcgtcaaactttgtcagttgcttttaatattaaaaattagcgaattatcttatccaaatttaccactattaataacgaggcatccaccgtgggtctgctgttctatacggcttgtatgcgtctctaattataacattcctcgtatgaacacctgtgaactctgctttgacattctttcgtcaaactttgtcagttgcttttaatattaaaaattagcgaattatcttatccaaatttaccactattaataccgaggcatccaccgtgggtctgctgttctatacggcttgtatgcgtctctaattataacattcctcgtatgaacacctgtgaactctgctttgacattctttcgtcaaactttgtcagttgcttttaatattaaaaattagcgaattatcttatccaaatttaccactattaatactgaggcatccaccgtgggttgttctatacggcttgtatgcgtctctaattataacattcctcgtatgaacacctgtgaactctgctttgacattctttcgtcaaactttgtcaattgctttaatattaaaaattagcgaattatcttatccaaatttaccactattaataccgaggcatccaccgtgngtctgttctatacggcttgtatgcgtctctaattataacattcctcgtatgaacacctgtgaactctgctttgacattctttcgtcaaactttgtcagttgcttttaatattaaaaattagcgaattatcttatccaaatttacactattaataccga

SEQ ID NO: 29411 - DNA, 1031 bp, Heterodera glycines
  unsure (1)..(1031): unsure at all n locations
aaaaatttgtnaatttaatggcccccggaaaatgcgtcagtgataaaaaaaatatctgnaaaaaatntaattaattnntaagtgattntaattaattaatagtntaattatttactttttaaatcttattttcaaatccttcctctctttttattattattattattattgttaataagaatatttaattccttaatatttaattcctttatttattctttcaatcttcgtaaagttttgtatgttcctcccattcatttccaataaattttttactttataaggttcatttttaaattttcatctattacattaaatcaattttttcttttggataatttacttggttttttaaagtattttttaattaaagtttttattagtttttttgatttattttcaatggattttttttataaatgattgtttccacattgactaataataattttattattttgcctttaggttgcttttagttgtgcaactttaaaaatgcgaattttatttaaaggatttaattattgctgctttataagtctagatgtttctcattggctcactgaataactttttctagtgaattttaattaatttattaattcattgttttaattcttgatgaatcgtctttttttgttgttgaaattttcgtaataaaaatgcatttattaaggacctacatttttttaatacactcttaaaatgattttttcagaaaaaatattcaacattgtccaaaatcagcttttaaaacctcataattactaaagttttttaatgcaactggttacttaataacaaaaaattaattatagagattaaggaaaaatacatcgatttatttctttagtatatttaccgtatttactcgattatacgcccccccccctcgaatggaagccccccccctcgaatataagccccccttggaggggggttgaaaaatagaagcccccttcgaatataagccccctcaaaaaaaatttttttttcaaaacttttgaagtcagaaacgtgcaaaaactatt

SEQ ID NO: 29412 - DNA, 1325 bp, Heterodera glycines
tctttttcgggattttgatgcctttttcttgccttttttcgggattttggtgcctttttcttgctttttttcggtattttcgtgtctttttcgggattttgatgcctttttcttgccttttttcgggattttcatgtctttttcgggattttgatgcctttttcttgccttttttcggtattttcatgtctttttcgggattttgatgcctttttcttgccttttttcgggattttggtgcctttttcttgccttttttcggtattttcacgtctttttcatgattttgatgcctttttcttgccttttttcgggattttggtgcctttttcttgccttttttcgggattttggtgcctttttcttgccttttttcggtattttcatgtctttttcgggattttgatgcctttttcttgccttttttcgggattttgatgcctttttcttgctttttttcggtattttcatgtctttttcttgctttttttcggtattttcgtggtgtctttttcgggattttgatgcctttttcttgccttttttcgggattttggtgcctttttcttgccttttttcgggattttcatgtctttttcgggattttgatgcctttttcttgccttttttcggtattttcatgtctttttcgggattttgatgccgttttctgccttttttcgtattttcatgcctttttcgggattttcgtgcctttttcatgtctttttcccgattttgcttgccttttttccgttctctactgataattgtctgtgaaaagcaacacactttaagatgaccactttccgcagaggaagaaccgactcaaaaaaaggaaaagctacaacaaaaagcagctccaatcaatgctcgaaatgtacttgggtaaaaaattttggatttttattcatttatagtcaaattttgtttgaaattagtttttttgtacatttaaaaattaacaaataaaaagtggtgtattaaggcggtccaatgggtgaaggagttctcactggcccaattgacctggctgaacttataagcgacattgacatggcctacaacatcacatgcctattggtaaaaacataatttgtagccgtgcatttaacaattaaaattgattttgtcataaaaataaaattttgatcactaccaaccgatcggggtccccgacccccaacaattttgctccccgagggggcggggctcaaccctaatttcgtcagttttataaaaaggaaaattttttgaatttattttttgtagcaagggctcaaaaagcatttttgcacttaaattttttcatttgaagtcaatat

SEQ ID NO: 29413 - DNA, 1158 bp, Heterodera glycines
  unsure (1)..(1158): unsure at all n locations
agagtccccaaaaacacgagagttggcgagaggcgagaggacgagaggcgagagtttttcaatttttttctgtagccttattttntaatttaaaaaacttcaaaatcgtatattaaattaggggtacgggcctgggtatttgggcaaataccgggtcagggtattgccgggtacagaaatccgggtcagagtcctagtttttaaaccgagtccaagtcatgaaaaatccaaaaaacttgttttttaaattttttgtttttaagtcgcttttttgtggcgctgttttttcaaaaaaacttttttggaacattgggtgcggggtccggcggtgccgataggcgccgtcggaaaaattctaaaattttgagtgtaatatattaacagaacttgtcaaaaaatgatcaaagttttggttaaatttgcagttttaggctgtttaaaaaaagaaaaaataataatttttaaattgaaatattttttattaattaaaatttcaattgaaaaataatttaaagaaattatttaaaaatattttccgatttttaaagccctgtaacttaactgaatggaaacagtaaaagatagaaactcaacgaagaaaaaatgattatttgcgagaaaaaacttttaaaagttgaggcaaaaagaattcacacgagattaataataattcaatgatcaataaaatttttatatttatacataattaaaaaaacaaattctaacaaatagtaaacgtttttataattcataattattaaaatacaagattttaataattttctattaatttggtaaattactgcatctttggagctcctaacgatcatataagtacaatttagaaaaattaatgttgtttaaaaaagtttcttttatttttgtcaattaattgacaacgccaaacttgatattgcttgtttatttttaattgatatttgcaattaattaactatcttcttatatttttctgaataccttttaataaattattttaaattattttatattttatttttcagcttgacttcttacttctcaaattaatatttgttttttaaatttctaataaaaattaacaatcaattaaattaaagcgtaaattaaattcattttgatctatttcatgtgtgttgctttcgatttcacccccagttt

SEQ ID NO: 29414 - DNA, 1274 bp, Heterodera glycines
gattcaatataatcatgcggcaccaatgttgccatctgatagcttcattgctggcggatacgtcgccatgccccaaaaagagctaaaaaagaaaaagaaacaatcaaaaccgtaaacccaacacaatatattttaaaaatttatttatttttgctatattatttaaaaattaactttttgcgctgatggccttagtatcatcaagttgttatttttaaaattaataaatgccaataaataatcattttcccgaaactttttaagcaaaaatgaaattggaggagaatctgtgagaatgccattggaactcacagtgagttcgtcagtcaaatcgaaaacaggaaaaacttcaacaaagagcggcggggttattaataaaatattttaacaaaaatgcaaaaagaaaaaacaaaaaaaatgtatatattaagaaatgaccaattttaaaaaatagacgcctaaaaaatgaaaaactttctcaaaaatttatcccataacatttatttattttttcttgagatgaatttttgattaaaaattgtccttattcaaaaaaaaaactataaaatatttaataattacattataattgaatagacacaaaattaagttaagttttttatttttggtgttttttgtggtttgataactaaaaatctttattcaaaaattactcctatttaaatacatatttcgcgagtttccttacctaaaaattatattatccggtctcttttttactaaattaataattgataagaaagttttagtaaattttataaaatttaaatcaaactttaaaaacatagttttacaacaaaaatattacaaaaactaactaatatggcggcacatttttattaaaaaaagaaggacgaggaggccaatgctatttaatgttttttttaaataaataaatttaagcggcatcctttggaccttagcagctctcaaagaaaagagtcaatgcggaccagcagcaatgcgtcatcgtcatctgcaagacaaccatacaactttgtgacgccggcattggaatataatgtgtcaaatggttattttagttttcgagttattatcaactattttctggtttttattttagagcctaaaaatattttggcatttttcccgaaaattatttttaaaaaatgcaataaaaaagaaaaacacacccctaaaaatggacccgaaaatttttaaaaacacccctaagaaaagaaaagatttctcaaaaattcatctccaaaatttcttcttatttacgacctgca

SEQ ID NO: 29415 - DNA, 1004 bp, Heterodera glycines
gagagcgtttgttgcatagaaaatttctcaaaaaaagagatagccatttttttggaatatctattaaatataaaaattattagaaaaataaaatggccatggcgcaccgcacttcgtttcatgttcgagagcgtttgttgcatagaaaatttctcaaaaaaagagatagccatttttctggaatatctattaaatataaaaattatttgaaaaataaaatggccatggcgcaccgcacttcgtttcatgttcgagagcgtttgttgcatagaaaatttctcaaaaaaagagatagccatttttctggaatatctattaaatataaaaattatttgaaaaataaaatggccatggcgcaccgcacttcgtttcatgttcgagagcgtttgttgcatagaaaatttctcaaaaaaagagatagccatttttctggaatatctattaaatataaaaattatttgaaaaataaaatggccatggcgcaccgcacttcgtttcatgttcgagagcgtttgttgcatagaaaatttctcaaaaaaagagatagccatttttctggaatatctattaaatataaaaattatttgaaaaataaaatggccatggcgcaccgcacttcgtttcatgttcgagagcgtttgttgcatagaaaatttctcaaaaaaagagatagccatttttctggaatatctattaaatataaaaattatttgaaaaataaaatggccatggcgcaccgcacttcgtttcatgttcgagagcgtttgttgcatagaaaatttctcaaaaaaagagatagccatttttctggaatatctattaaatataaaaattatttgaaaaataaaatggccatggcgcaccgcacttcgtttcatgttcgagagcgtttgttgcatagaaaatttctcaaaaaaagaaatagccatttttctggaatatctattaaatataaaaaatattttgaaaaataaaatggccatgggcgcaccgccccccccccc

SEQ ID NO: 29416 - DNA, 1500 bp, Heterodera glycines
tggaaccgtttggtcaaagcacccctggggccagcccaatcatttgtgccgcaattccaattcgtcccgcgtttagacattcgatcgccattttatatccttaaaagcatcatagaattaaagagggcatatagggcttttagaccacgaacctttgccatattcgccaagaatggcacttttcgggactcggacctcgtcgaaatggacaggacatgtcgaacttgctctaatgccgagtttgtcctcatgttttgcaacagtaactcctgcaatttgttgaaatgtcttcccagcaaatgaacctcgtcgttaacctttcagattccggtcaaccaaaaaacatgtgatgccccggtaccctttcgttggttccgcgttggccatcacataaaaagatggaattgttcaaactaatggaatcgaaaaaaatacgagaaaaaacttggcgaaagaggcattggaaatccacatctttgagcccgaaatcaaaaaatcatcgccgtccggaagagcaacggttttcaatgcgaatgcgtcggatccactcccagcttcagaaaggcaaaaggcaccaatcttttgatagacaaataaaacgaggagggagcaagtcccgtcctacccaatccttcacaattcgtgtcaaatacttgtgtttttgctcttccgttccattttctataatcaatggtgcaactaaagtctaaataaacaatgaataagcaaaattctggctgaataaggaaaggcacacattttgaacatcgaccaaaaccgcaaccgatgggtccacttttgccaattcttctacggttaaagccacattgaagaagctggactcggaaccgccaaacttctctgctatttcgatgcccataagctgaaataaattatcaaaactggtaaattcgtggatccgtaccccatttgcaaatacgccttcgatcactcgcctgtccatctccgatttcacatccatttctttcacaagcggtcgtatgacactctcagaaaactgtttaactataaaagaaccaaaaataaatagattccgcgtatttaacccgaatgcttaagtgcgacttcgtcctcgctaagatatgtaagcggagcaggcggtgcttctgcggcgactcgtggcaatccatttctactggcaacacccaaaaaggcagtcgcttgtcgagaaacaaaggaaatgtgcatttttagtgacagtgtaaattcgttatgctaaagaaaacttggcgaaaacctgaaatttttcaatcggtgccaattctaaacagagttacagacccgagactgaattgtccaaatgtatttaattcgtaattttggaatgatatggcataatgtcattgctttagagaaaatttaaaagtgtgacgcaaaatttaatcgttttttggacaaatacccgctgaccaacgaaatgtccaagccacgaaatgcccaagcccacgaaatgtccaagccacaaaatgcccaagcctc

SEQ ID NO: 29417 - DNA, 1099 bp, Heterodera glycines
atgtttattcaaattcggaaaagagacaatcatcagcgacttgaaatttcagctttaggtaaaagataggcaaagcaacctttattatttccgattactttcaatttttttccacccccccccccctctgttttttttgttgtttaaaatggcacctcccgctgaaaacgctcttcgccacatcgctgtgattgcccatccgccagcagagaagagaaaagcgcaggatcggtctcaatttgcccttctccgtcatgcatttcctccgctccgtcctcctccgcttcattcgcatatccctcataaaaatcctataagcattgctccatccatttattaaattattcatcgcaacattttgaattacctcaaagtgtttatcaaagggacgaaaattcgcaacacttttacgattactggtccgctgcgcctcctccaaatgtttgttgtgtaaagaataattcactgcacttttgcggtcaatgaacggctttttgtgtttgcccttaattaaggaaaagtgcaaatttcacgaagcgattatgcaaaacaaaaataataccattttagcagtgtaatgtcagaaacactgaaaagaaattggaaaattataatagtaagaaaaagtagaataagaatttcaattgggaaaacaaccaaaagcaagtgacaataatatggacaaatatgaacttgaaatttatttgggaaaccaatcaatataaacattaatacatagaatccacatataaaatataacgaagaaaattaaaacgtaattcactgcgctgatcgtgcatacaaagcggtgaaaaattcacgctaattaattttatttttttttgatatttttttaagatgtttcccaccatcccaaaattcacttacggcgaagaaatttcaattgcactttcggacttttttcctaatcagctgattaattggatttttagctaacccatggaatgcaagaacacacagtgattgtctacacaaaagtgatgtgagaagtgatcaaagcaatcagcagaaaatgttataaattatcaataatcaccgaaacaattatttttattattttaaatacattgcttatttt

SEQ ID NO: 29418 - DNA, 1843 bp, Heterodera glycines
  unsure (1)..(1843): unsure at all n locations
cgatagggatgaatagtttgatnntcgtctctttnttcttttgcctattttgccgtgccattcttttttcggctttccttaggcttcgctttcgtcccactgcctttgatgtgctgttgtacgctgttcagcttctgatcggctacattttgatgatcattgtcatgacgttgaacggatggctgattttgtccgtccttttgggccatattttggccaaattgcttttgggtttactcacttcggactcagtgctgaacaattgaaagggcaccgaagcagaagcaattggaaaagccaaagtgatttaaattcatttgaacaaaaaaatggaaaagttttaattatttaataataaaatgcaattgaaaaattattaaattcatttttgagaaaccaaaaaattgacaaattttgcaagagaacaaaatcaaaaaatgagaaggaaaagaaaggtaacaaaaactatcattgataaactaggcaggtgctatgtcattacttaaaaaccatcataatgaaaatttttgcttataactttgctctaaaaagaccaaatttttaatccttgctatcattcgatagatctaaatgttctttatgagcctgtaaaatttcaaaaaattttattaagtttaaaaaaagttatggccaaaaatgttcgaaaatcaaggttttttgagttcctcgagctataacttttttgaaacttaacaaaattttttgaaattttgcagactgatagagaacacttagggctatcaaatgatatcaagaattaaaaatttggttgctttcgagcaaagttataaataatttttcgacaaaaattttcataatgatggttttttaagtaacgcccattatgatggtttttaagtaacgacccagcaccgtttaaacaaggatgatgagcaataacacgtcatatttattgtgggtcaccggcccataaagtatgccgttggtgttctcgcatactcctgatggatagtgacatttaaatcgaaaaatttgaaatgcgttttttgcgctcttttctccaaaacagttgagcaagcaaatagttaaatcacttaaaatagcgactttactaattaaaattgctgaataaatttttattttagtttagaaatagcgaccttactaattaaaagcacgaatggtcggtccttcgtcctttttatttgcttcttctatatcctccccacctctctcaacccctctctctctctctccctctccctctctctctctctctctctctcaacccctctctctctctctcaacccctctctctctctctctccctctctctctctctctctcgctctctccgctctctttttaagaatataaaaaaggacgcggagcgccatcgtccattgagattgtcctaaaactaaaatgagttcttcaccaaataaccattttcattcattcgatatttttggaaaaaccaaaatgcgtagcaaatatataaataaatttttaaaatgtttcaatacaacaaaagagtgaaataggcacaaattgccataaaatttacttagaatcatattttagcaaaattaatttttaaattgcgaaattttggatttttggggggaatttccttaaaaatcatcataatgaaaaaattacaaaagttgtgaaaaaagtaaaatatattcctaaatatgtataaaatccagaatatttaataatcatactcaatgatttaaaaaaaatcattctgtcaaaggcataaaaaaaataaaattattttatttttatataaatatttttattataaaaattaaagattaatcgttacaatttaattataaagaaaattccaaa

SEQ ID NO: 29419 - DNA, 826 bp, Heterodera glycines
tgtttcccactcccttctcccaggggtattattttgtaaagtctttttttccccaataaacttgtcaaaccccatttttcgcaccgtgaatgttatttttattgaattctgaaccgttttgagtagattagactataaaaaattgaaaattttgaaatcatgtttcccactcccttctcccaggggtattattttgtaaagtctttttttccccaataaacttttcaaaccccatttttcgcaccgtgaatgttatttttattgaattctgaaccgttttgagtagattagactagaaaaaattgaaaattttgaaatcatgtttcccactcccttctcccaggggtattattttgtaaagtctttttttccccaataaacttgtcaaaccccatttttcgcaccgtgaatgttatttttattgaattctgaaccgttttgagtagattagactagaaaaaattgaaaattttgaaatcatgtttcccactcccttctcccaggggtattattttgtaaagtctttttttccccaataaacttttcaaaccccatttttcgcaccgtgaatgttatttttattgaattctgaaccgttttgagtagattagactaaaaaaatatgagtgatcaaactttcactaaaaagttaagcctaaactttttcccaaagttaaaaagcaattaaaattttattcacctccattattgatagaaaaagcatcagagtgcctaaactaacatgtaaataaaatttggtgcgtttcagaaccctttctgaaaaaatatttatgaaattaattttgcaaataaataaaaacgaaag

SEQ ID NO: 29420 - DNA, 1022 bp, Heterodera glycines
cccatccggtcccggtctcgcagcctgaagctgtactcggggctgggcgtcggcgcaccctccatacggttgtcgcctggcaatggcgccaaaaagttgctgtgcttaccaatggcatgtgccgaaagggcgagccgtgaggttgacccatcctccgggtccatgatcgagcggtcctcgacggtcagtcggcacgacagccggagttggcaatggaatgtcttcacagggttcagcaccaccggtctctggattgttgtgcactcggcgggtagttcgtcttgttgtctggctccgtgtagtgctttccaccgcaaccgtcagccgattcctatgcaaaaccccatgcaccactgaggaaagttttcaatattcgtggttggcaagaaaactttcatagaaggcaattggaggtcattaatcaagcagatgtaattttctaagatacgaaattcgtgcgagagtttttgtcattaaaagttggtgattttttaaatcccggattttttgggttatctcggcaggcagtcgcttgggtcaatttgtaatccagttgaacaaatgcgagagtaaactatcctctcatagtatgggattcaatgggaataagtagacgtctcagacagtctccgcagattctgattacagatcaaaatatccatgatgctgagatgagcgagagggaattccctccccccgaaataaaaaatcaaaaaattttcaggaaaactgacaattttttaaaaattcaccccccccctggttatgcgcctggtgcaaatccttaaatatcaaatcttcaatgtcgtgatcgtcaaaagattaacatgtcctgatttttaagatgcatctcttgtattaatttgtgtttattataatattgttttgtaaatagaaattggcgcctctaatcttatttattaattaacaattaatttgttggtttacaaatttttttaaatccgacttgggactgtccggcgacaaagtgagtaaataatgtattaattaccctaattagt

SEQ ID NO: 29421 - DNA, 1110 bp, Heterodera glycines
gataagtaatatatttccaaaataattaactataaactgggcgattttggttttagaatacttaaacaaatttgaaaatgcttaaggtccgcttcatctgctacccgcggacttcctccggcgagtgtgaaccgttgcggcccgaaaactttgaaccaggcgccaaatttgaacattgccgagcatttgaatggattcagaggaacaacccaaattggcagcaacagcaaagcatatcgccaaatgacagtgacataatgccaagcaatgccccaaattcaaattttgaacaagcaacgcaacgattgtccaacaaattattctttattagcgggaataccacacgctaattttatttatgcaaattttattttaataaactgtgcattaatttcgcaaaaaatcaacaaattacaaaaactcaatgaaaattaaaaatatttatcatcttgaaaatattatcgaaacataaaaattaaatcaaaataagtaagcctttaatgtattttctaggttcataaaaaattttcatctttcactttttatttaattcacactacaacagtgatttctcggttatgtcagctgacgattccgtcactcacaagcggtggccgcggttcgtcaaatttttcaatttttgattttattaaatttattattttattttgtgccttcagctttttgccgaaaaaacactttgtcatttttcccgtgccgtgccctttttggttgtcattttgctgctgggcaacctgaacagttccatcttcgcctcgtcacggtcaatattttaaaattaccaaaaatgacataaatcgttcgtttttcagttatttgtttgccggtgccaaaaatggcattttgctctccgcgttgagtacggtccatgccaattcgatgagtccgcgggtggacattctttactaagtgcattttcatttgatcatatacaaagtaaatcaaaacaaataataattttaaagtgttcgctttgatcattctgtcattcatctgcgacttggagaatctgatcggatatatgtgagtgagttgagttggattcgcatatgaataggcaaatttaatttttgtatttgttcccatatt

SEQ ID NO: 29422 - DNA, 633 bp, Heterodera glycines
aataatgtgtttttaaatttatttaatctgtttttgaaaacttgaaaaaacatcggtcacttgaaaaaataaattctaaaatttcgtccaggaaaatccagggtttttcctgttttgcctggacctggattttttttcacatttgacctggacctggatttcctggacaaaaatcgaggaaaatccaggtccaggcaaaatccaggttgtcgaaaaatggcctggacctggatccaggaaaaatccaggcctggatccaggtccagaccgatctctaattttgattataaagatacaaaatcgctttggacatttagaatcaatagaaaaaaaaacgaagtgcatttcaacatcatttatgtcaaaaaaaaacgctattaacaagacaaatacatcaatcattgatcagacaaaacgacacattggataataggtaatagtttagatggtacccccccttttttaaaaatttttttcaactttcaaaaaatcataaaaacatgtttctaggggttttcggggtcgctgatcacgaatccgacatccatttcgaccgattccgaacccctgacccggattcgaacaaaattaaaaaattgattttttaacaaaattcacctttattgctaaaaa

SEQ ID NO: 29423 - DNA, 1232 bp, Heterodera glycines
  unsure (1)..(1232): unsure at all n locations
agaggcaacctggactgccactatnctttgagtaaacagcatgaactctaagctaaggctactaccggctaagatagttcggcagatgaaaaaatctgcagctaaaatctgtattaataatactaaggattattattaaattattaatatgttaaattttttgaattttatttagttattaaaaaataaatatacaaaaaaaagtataaacccataaaaaaattggcacagttaaattaattgaacatttttttaaatgataaaaatcttgctctatttaattgtttgtttatgtttttcggtacatctaattcatttttaatatccaaattacaaattaaagggcatttaaactgtcattacaaacgaaatataatttttagcattgtgtctcaaaagcaaatttaatttaatttaattgggaaacaatttaagccaaaacgtgaattctatggcaatttctggatgtgaacaattgaagaaaattaaattccaagtgaatggaaaaagtcaaaaaaaaaagaaattaaattgaaattaaatgtaacactttctttttgaaaagttaatcataaaattttaaaataattaaaacaaattttcaaattaaacattactttttatactttaatgtgtttgttaatattaagttgaaacggaaattgtttcattttttctgtttatttaattcattggaaatttttaaaaattgtattcgctgagaaaactcaaatgaacgaattaaattttcactgaaaaaaatctttttttttaatgataaacgagggcaattaaactttcaattttttttccatgcacatttttgtcagtaaaaataatcaaaaaaatggacacccaaattttgtgccggtttcttttttctaattattaattaattctcaagagattctttaaaccgggtacacatgacaggttcaaattttttgattttgaaaaatcacaaaatcggtggcccagtcggttaaattcgaattcttggaggtccgccggggttcaaatacaacacaaaaatgaataaatttttgtgctcggtcgtttcgtaaaaactgccaaatttacagaatttttgagaaaaatcagtcataacttttcttaaatacaacttaaaacaatagtcttggtatcatacgatagctcttggcttgctctataagcaagaaaaatattcagagaatgtttcattgagttatcagaaagttctgaccaaaaat

SEQ ID NO: 29424 - DNA, 1381 bp, Heterodera glycines
accgctgccgctgccgcagcaacggcactgggcctttcgtcggtgccgacgacgaatgcgatgagcgacgaacaatggcaatgggtgtcgcgaatgcgcgcccatcggctgttccaacatcacccggaccattcgtcggattttgacctgctccgttgggccatggcttacaggtcaatcaatgatagctgacaagcccaagacaataaacgtacacagaacaagccacgttcgtgccgaaacatttgcataatgccaatcccaaggaaatataaaattacccccacaaccccatacatttttcagcgatttttccgccattctcggcaaatgattttggtctgtgtgctgttctcccgctcataccttgattctcaaaaaaaagaaaaatggcacatttagaaaaattaaaggcaaattttggtttatttttgagtgccctaatcattgttatcattgttttgtcctagtttttgctaccttaaaagcagtatttttggatttcgaaagttttaaaattatagaaacttgataaatccaagttgatttatgaatttctaatttttagaggtgacatcgaactcgcaatacgcaaatatcgacggtagcaaatttaattttatactttcatttttaattacaaaattttttattttcaaatatttattattttttatttaaaatatattttgtaagccatttgcgcatccgaaagctgctccgactggacgaaattgagcagcttggcgagcaggacggcattgacgaagatgccgaactgtacgcaccgatggaaattgttggcacggtactgaaaaataagtgcatctcttacgatgcaaaatctatttctaatctaatactttttgaaattgagctatcatttttcttggcttgcaactaattaggctaaattactcccgaaaatcccttttgaagatgagctccacggatggccgcattttgttgttggaacgctcgggacaatttgaattggatgtgatgatgaaaagtaagtttttggaaccaaattgaatgggaaaatcaaatttttttgttaggttgtttttcaaaatatgggacagtgcctgaggcgacgctttgaaaatttttaaaaatttaatctgtttggcaccccgaaaactttaacttaaattttgaaaatttatttcttaattttattaattaatttaaaaattggcattttatcaaagaaattttaaaaaatggtgacaaaagcgcgactggcacaatattcttcctttaagcggaaaaccgctcaaatttcaggcatccgaaccaacgcgttcatgctgaaccgcttccgtctgatggagcgcgtgcttggcgtgtgtgcacgcgtccgaacgcgcgtgcgacg

SEQ ID NO: 29425 - DNA, 1082 bp, Heterodera glycines
ccttctccgtgtgtcctattttaaagcatatttcctgtctttagcatgtccccgacatttgcatcgaatttcttaaggtccattttcgcacataaacgggagtccataaaattcaattttgaagatctcgttgcagaattagaactaaaaattttggctctattactttaggcgtccaaccgacttaggctccaatcttcagtttctttgataatagcttttttcttacccggtcaatccctacaatcttggtatcaaactaaagtttaaagtctatagttttttatagacttaattcttggctaaaagcaacagacaaaaaattattcttgaatacactcgaaaaaagcgcgtttagtattttcttgttgtatttttttcttaatgtatagtacctatttgctcttttcatgtatttatgacttcgcgggactttaagctttcgtttgataccaagaatgtaagcattgaccaagtaagaaaaaattatagcttaaaaaatgaagattagacgcctaaaagtcgatttaaaacgcatttcaattcacaaatattgtttgtattctaaaaggacaaaaaaaacatatcagttggacaatgtgaaaatgtgtatttttctgattccattcgcttttcttccttttcctttatccaattggcttttgtaagccaatttgtatttcattgagcttcttaatagggtgaaaattgcacaatttgattggtcagtggcaaaaaaccacaaacttaccgaagtgccgtccattggtccgacttcgtacagactttcgcccagcgtttcctcgcatttctcgaacacattcaacagggttttccaagcgaccatcacagttcggttgccaaagcaatgggacaacttttatgcgtggattgaacgggggatggactcagttggcctgtgctcacccgtgcgaaattcttaacgccgttcagagtcgtgtggaggaggacagttcggtcggcgaatggctccaacatcgtcgcctgatttggcggcacaattggaagtgtctcattttcaatgccctgctggagaattctgatagcttcttgcagaattg

SEQ ID NO: 29426 - DNA, 1015 bp, Heterodera glycines
ttttccattttttgcattttttttattattccggaatgaactttcaataaaaccatttttatattattttttcaatttattcacattatttatcaatctttgtcattttttattattattattaggtgctctccgagcccgggttgaaagcttcaaaaacaatttttaaatttaaaattttatttgtaattaattatttttacattgccattttttaattattaggtgctctctgagcctgggatggttgaacgatttttcccaaaccctgaagaagcgccattaattaaagccatccgagacacttatgcaaacatttggagaattgaagagaatgagaacaatgagccattttctgagataattgaagtaaaacgaataaataaaaatatattaaaaatgtgtttaaaagtttcatttaattgttttcattttagagagtcaaaaaacagccaaataattttgtaatgaaattaactgaatatgcattatgggacgcatggattaaaaaggatgtggagaaagtatattttggcaaagaaattctcgaagctttggcaaatttcgatgctgacaaacgcttggcatacattttgatggaaaaattacggccgatgtctgtgaaggtaaagtcgggaaaatgcatcaattgtgagcttaattttaaaagtctcagtttcaattttcaaattcttaaaataattttataaattcatttatgcaaattcagaatcacattatttgggcagaggacggagaagaaagcagcggagaagactttttagaagacgtgaccccggaattgggaatttttggcactttgctcggcaacattgtcaacggtgaagtattgtacaatgcgcaatttggccatcagctgaagaccaaattggccagcgagaatgagggtggcatcgcaagtggaaacagtgcttatgattcggcatatttggtggactgatttttgaagagaaagagagagcgagagaaaggatgaacaaatttggataaatat

SEQ ID NO: 29427 - DNA, 1300 bp, Heterodera glycines
tgctttgaagttccgccgtagacatttcgctaattgactttttggatgggacggaggaagtcatttcgaaatttttgaataccaaacataagtattgactccttaaatacacattgggcctttatcatttctactgaccacatcaaatttgtagacggccaatatgactgctggaaatttgactcttgactatgaatatgactcggaaaagagatttgaacatttgcaaggaatggtgatgctgatagttctttactcagttttcttattgtttttatgtttttcatatctacgacactttttgtatgaataatcaccatttattgataaaataaatcacgaaaaaattggactacaatttaaatccaaaatcacgtacagtaaaattttctgatacaattcctttggtcacaacgggacggtatcgcttcaaaatgcttacagattgcactgctccttcacgaatattggggccaagctggtttggatagtcaattattatttcttcaaaagcatcttcttcttcttctgcagtgtcataccgcaaaacggtttgtttgaatgcgctgaagtgtaataagcggcacgcgtcggcgcacaatgtaatttttctaactttcaaaacagtgtcttcttctcccgttcttttgctccgcattctcagcgcgtactgcttacatcctccactcacaaattccaaaagttcatgcccgggatattcgtctgagaggtcgcccaggtgcggcccagttgtcaatggacatccgtcttaataaaaccttataattttattttttattagttttttaccggtctccttatacgccaaaaccacgctgtccgtgtcggtgtagattaataaggaattttgggcacggactacgcgttgcataagactcaggaggtggagacgggcggctgaggtcgtccaaagcgacaaaactataaattcacaaattattttaaaattattaaaataattttaccaatattggagcagccgtgctcctcaatgaactcagtgacagccgagtatgtgataagaacagtttcttcgttcagcaaatccacacttgaaacttcaatttttgggtcgtcgagaagggagcgtagcattgccggggagtccgtaattttcgtctttgacaggccattgcggagggagaagcgtccccatagcgaattgttgcaaagcttggcgattgtcctctttgccttgttgtgttccatctttgcttcgtcaattttgatgccaaaaagttgttcgcactcttcaatgaactgttgtctttctgcgtct

SEQ ID NO: 29428 - DNA, 1086 bp, Heterodera glycines
tttatgaattctgagccgttttgagtagattagactagaaaaaatgaaaaatttgaaatcatgtctcccactcccttctcgcaggggtattattttgtaaagtctttttttccacaataaactttcaaaccccatttttcgcaccgtgaatgttatttttattgaattctgagccgttttgagtagattagactagaaaaaattgaaaattttgaaatcatgtttcccactcccttctcccaggggtattattttgtaaagtcttttttccccaataaacttgtcaaaccccatttttcgcaccgtgaatgttatttttattgaattctgagccgttttgagtagattagactagaaaaaattgaaaattttgaaatcatgtttcccactcccttctcccaggggtattattttgtaaagtctttttttccccaataaacttgtcaaaccccatttttcgcaccgtgaatgttatttttattgaattctgaaccgttttgagtagattagactagaaaaaattgaaaattttgaaatcatgtttcccactcccttctcccaggggtattattttgtaaagtctttttttccccaataaacttttcaaaccccatttttcgcaccgtgaatgttatttttattgaattctgaaccgttttgagtagattagactagaaaaaattgaaaattttgaaatcatgtttcccactcccttctcccaggggtattattttgtaaagtctttttttcaacaataaacttttcaaaccccatttttcgcaccgtgaatgttatttttatcgaattctgaaccgttttgagtagattagactagaaaaaattgaaaattttgaaatcatgtttcccactcccttctcccaggggtattattttgtaaagtctttttttcaaaataaacttttcaaaccccatttttcgcaccgtgaatgttatttttattgaattctgaaccggtttgagtagattagactagaaaaaattgaaaattttgaaatcatgtttcccactcccttctccaaggggtattattttgtaaagtctttttttcccccaaataaacttgac

SEQ ID NO: 29429 - DNA, 750 bp, Heterodera glycines
aaaagcaaaaaaaaaattggactaaaaaaaagttgaaaaaaatttcaaaagtttcctctttgcaactagcgcctaatatttctcttctaattgaaaggaaaagctttaagtttgaatcactaattttcaattaatcgtcaaaataacacttccgttgtgtttttctctgcaaatcattcatatgaaaaaaaatatttgaactcatagtttttttgcttataaaatgttaatgaaaattgatgtgacaaatgctttcgcaacaggaaatatttgatattaaacgatagaatcattatttttttttgttttttaaattatttttttattaacaaccgaacagcagctgattagcaacaatttatcactaaagaaaaatcgagtgaaatgaaatgataagcaaaatgaattaactgatcaaattattcggtgtgataaacggctaaatgaatgatgtaaagtgggaaaaaataattatccttagccatttttgccaaattaattcttaacgaatgggcaaaaaatttatgaattttaatgcgaaaaaattattagcatttggttcactttgattttcacaaaagctgagcaaattgtgcgacaaaacattgacaaaaaaaggaagaaaaggcattgtgaaattcagtgaaatttggccaagtttttccaacacttttcaaaaattattcctttaaaaaagttcagacggttttaatttattttttcaatcgataaatactaatttgagaagca

SEQ ID NO: 29430 - DNA, 1022 bp, Heterodera glycines
gatttatagttttttcactatgtttttcctgagatccccgtagccttaaatgcacgaaaaacatgtttttttttcggctgttgttaagctacttttcgagatattagcaactgttttctagttttttatttttagcaactaaaaaactataaaatttttgaaaaaaactattttcaactattttggcgttttgccaattatttgttaacaaaaaggcaataaaaaggaaaaatacacccctaagaatcgacttaaattttttttcaaaaaataaacccctaagaatcgacccaaaaattttgaaaaatgcccccctaagaaatgaaaaatttctcaaaaaatcatctccaaatttaattaatttttattgacgataatttttgattttgaaaatggtgtatctcattaatggtttggcataatatttttacttttttgaataaattttgtcagtaccacgggctcgaattgggtctaaattgtgacgaatttatgatcatgatcatgaaacctatgcattttgaaatttggtcggttttatgctgcacatccaaaggttcaggcaaaacaaattaaggtttaggggtcagactcaattaatttattacaaaaacaaaatcaaatttaaaaaagtgttcatcgaattttatgtcttataaactgcaaaatgtttaattttcataaccacaaaatattaaaagaagaaactaaatatattaaaaaaaattaaaataaaatttaaaaatatatttcaaaagaaacataatgggtggtatttgctaatattgcagaaaaaatccgtatatttttattattggcgtaaagattctgcaccttaatccattcggcataaaagttagcacgcaaattttttcatattttttaataatttagcttatttacatttttgattttaatttttttgcttagattttctattttttcaatactaagattaacaacttggattcgcaaacgagtcaaacctaagttcaatgttttttgaaccgttatatagttct

SEQ ID NO: 29431 - DNA, 688 bp, Heterodera glycines
ataatgtaacagtaagagaaaccaagagaaatctaacatttaaagaaagttataaacaaaaataaacaacaattaattaaattaatcaaatcttttttggtaattgcctgaacgctgcgattttatatattttagcttcgttagaatttgtgctttcgaatgataccaaaaagatagggtttgttcgaatatgaaccaagttattgtacatataaaaacccgggattgtaaattgattggactcataaaggtcgattggactcataaactgcactagagcctggattttttggtttttacctttttttgcagatagtacttgatgagagaagcacgaaaaacacattttctccgaataaaaacgaaaaatacaccctaagaaccattcaaaaaaaaactaaaaaatatacactaaaattgaccaaaattttagaaatattttttctaagaaatgaaaatttttcccaaaaattcgtccctaaaattgacattttggggattttagtgcataaaaacactagatttttccaatttttagcacctatttttcggtaggggacggttcggtgccagcccaatttttggactacaacttttttcattgttgaccaaatctaataatcttggtatcattcgaagctttatatgtttagaagctttttctaacctattgcttagcgattagctt

SEQ ID NO: 29432 - DNA, 844 bp, Heterodera glycines
tcaatgaccatttcctcagtttcttaggcaattgggcctttccatatattcttgttattaatcgacagcttaaagtctccggaattttttgtaaaatgaaattatgggctaataacaatagacaaaaatttattgttaaatatactcgaaaatgctgaaaatctcatgttttctcatagtaacttttttcttaatgtcaacatttgttcttttattgatttataaattcctgagactttaagctttcgtttgataccaagaatgtatgggatttaccaagtaagagcataagaaactggggatagtcagtcgttgattggacacgtaaactgcatacatggagccaaaaaatgtgcccgggaatttttttttttaaagtcgggactggcatcaggccgggataggattagtggattcaaatctttatgtcgccgagattttgccgggaaatgaattccctggtttcatcggtgtcccaatccgagcccttttttcaaataagccgggattagtattgggatcccccgggaaaaatcatcgggattggcaccaggtcgggatagggattagcgggattcaaatccctgtgtcgccgaaattttccgggacataaattccccgaatcccgtccgggctccactgtattcattttctaaaaaaaataacaaaacccaaggagagtttgttggctgatgaatgatgaaggatttttggtcattttgctcttctgcagcaggcgatttttaaagtagcaaaaaaagtgactaattaattaatttcctaattaattaattttccatttaaaattacactaaaaattgccgaaatttaccggggggggggg

SEQ ID NO: 29433 - DNA, 1015 bp, Heterodera glycines
tttgtaatttctttctgatttgttaacagattttcaccaataaatgatcaatttttgcgattttgagacaattggcgaccatttttatattcaaaaagctttttttgtggcattttttcaaaaaactttctttttttaggcgggggagtccgggggtgccggtaggcgccgctgggaaaaattttgtaatttttaatgcgacttgataacagatttttaccaaaaaaggccaatttttgcatagcaaattttaagtcaacttttgaaataaagggggaattttctggccaagtcggcgccgataggcgccgacgagaaaattattttggaatttttcatgaattttgttaagaaaatatattcaaaattcaataatttttcctcttttctcactttgactgcgaaatggtcatccttaacagtgtaaaaatttctcggtttccgagactaaaaacccgagaatgctttttgagcccctttcttcatagcatatgcgcagaaaaaatatgcaaaatcatacaatttatacttattatgattgcaaaaatgttgcatttactttttaaatttctatttctaatattaaatttttattatatccacacgtgcatacatacatatgattacaatgtattgattgatattaattgaaaaaatcaaaaaaaagaaaaaaaaagagaatttttattaatggaggatcaattaaacagatgctaaattcgcgcataaaattttatttttgcaattcattgggcgctagcatttatatgtgtgtaatacttaaaacgttaaatcttttatttattaaaattggcaggtttttctaaaagaatttaatataaaaaaaggctgtaaacatttttaaaattttatcattttaaaggcaacaaatggacacttttgctcaatcacttcttccaagaaaatgtgcaattttgcatcttctaatcattggcatatgtattatgtttgaggaagtaattaaaattttgtacaattttattatgtttaaaag

SEQ ID NO: 29434 - DNA, 961 bp, Heterodera glycines
aaggcgactgtgttcgttgacaattaattgtccaaccttttaaggtactggactttccacagtaaaatgtgtacaaatttgaactgtctcgcctcacggtgggacttaaaaacatagttaaaaacttcagagaattatttgttctaaaaattacagtttaatttcttagagtcaaaagattcgaaacagaagcattatttaaaatcagaaataattttttaaaattttttacattttagtttcaaaaaaacaaacaaaaaaatgttcccaatttttaaaacgaaatagtgcacaaaaaggggggatggttagacgaaaagagaaatttttaggaagggacgcgcaccccatctgatatttccccttttctgctccataagaggccagaggcgactttgttcgttgacaattaattgtccaaataaggtacttggactttccacagtaaaatgtggtacaaattttggaactgtctcgcctcacggtgggacttaaaaacatagttaaaaacttcagagaattatttgttctaaaaattacagtttaatttcttagagtcaaaagattcgaaacagaagcattatttaaaatcagaaataattttttaaaattttttacattttagtttcaaaaaaacaaacaaaaaaatgttcccaatttttaaaacgaaatagtgcacaaaaaggggggatggttagacgaaaagagaaatttttagtaagggacgcgcaccccatctgatatttccccttttctgctccataagaggccagaggcgactttgttcgttgacaattaattgtccaaataaggtacttggactttccacagtaaaatgtggtacaaattttggaactgtcccgcctcaaggtgggcttaaaaacattgaaaagccaagttcaaaacttcagagaattaattgttataaattttacagtttaattccttagagtcaaaagat

SEQ ID NO: 29435 - DNA, 1346 bp, Heterodera glycines
ttccaacctctccctgttttgtcattcctgactatcattcttggaataaaccagaggttgggccaagggcagcaagcttacttgcaaatgtgccgccaaatcgggcttggagagaccggagaacacttctggattcctccgcagttcctcgtaaagagcagggatgagttgatagactttgtctatcccgacttccagaaactccttggaaatgacaaggaactgctaaatcgtctgatcctcgcacctcacattgacacatgcgatgagatcaacgaaatcatgatggcgaatgtgcctggtcaagtgcgcgaatatttgtcctcggacaaaccgcttgacgagcggccactggatattgatgaaatcgagtccgaagtggcagcgttgaatcgacgcacagactctgggatgcctccccaccgtctgcgactcaaggtcggaagcgtcgttgttctccttatcaacaaaagtgataaggaaggactgatcaacggcacgcgcatcgttcttgaagaacttggcgacgatcgtctggtcggtcgcgtcattaacagcaacgctgttggtggccaagttaagttcttcatcgaacgaacacgcaatgtctacgaggacaaaacgcctggcggcataaaatatgagcgtttgcagtttcccatcaaacctgcctttgccatgaccattctcaaaggtcaaggccaaacaatcagcacggtcggaattgacctcgaaagggatgtgttttcccatggtcaattgtacactgccttttcaagggcaacagacgggaacaacgtccgagtgtacgctcccagaagggagaccgatggccaaggtcaaaccaaagtgttgaacattgtggccaaaaacatgctcaaattacaataaagcaaacgagttatagtccagcgtgtgtggcactttactgatgtcgccccgttctcatctgcactttaaacggatacacatacaaaaagtgctgccacctggactaagggagggaggagggatgacgtgcgagttagggcacttccggtttccattgcactgataaatgcaatgtgtcagctcatcacgtgagtgaaaccaagtgcatgtcggctgacgcaaagaccctaacacaaggcctaggtagcgaagctcccaaagcgcgaagcgctttaagcactaaagaaacatgtaagcacacacccgctagtttatatactttagaacaacagtgagtttcattgctaaaactaaaatctcgggaaccgctggcgggaggggctcgcgagtgtggcattgcttaagcaactttttgaggcgcatccaggaaaactataggcattccgttccggagg

SEQ ID NO: 29436 - DNA, 1130 bp, Heterodera glycines
  unsure (1)..(1130): unsure at all n locations
tggttcattatgatcaataatttttggtttgaaaattttattattttttcaaatttttttgaagatcaaatgatcggatacaatcacttttaatcgcttatttaaagctatttatgcgatcattgattgaaaaaaacttagttttgaaccagattttggacaaaggcgcaaatgtcgggccgcaaaagtcggggccgcaaatgtcgggacacgaaacagagggggttggaggagggctaagaaccgctagaaatttcaaaataaatttttagaggcttgaaaaggggcaaaaaaatttcaaaattttaacgccttacgaatggccattgcattggcacgggatgcaggaaccgatcagatgcgtgccaaccggggccggcaaccgatggtagccttgtgcgcactcttggcaggacgggccggtgtatggctctgcaaaatatgaacatgaatgattacggtagatttttgacgtgcatactgtagaaagtgaattacagaaactgaggaaaacacattgtaatttaccaggacattcacacagttccacagatgatgcagttggacgaagaaggccagactcatcctgggaaatgattttacaaatttaaaattaattttactggatttttctatctttagatcgaaaagataagaaattataaaataagttaatttaattttaaaaaattgaaaacattcaaaaaatatgttattggacttttttttgtttttttttgcataatgccattatctttgtctccttcttatcatcactttaaaattttgattcggttaatttttgaagagtaatggtggccaaattttgttaaatttactaaaaaaaaacattttaaaaggcagaaaattcaaaataaaaccactttgaatttttctctgttccagactaacttttctttcttaccaaagcattttaaaattaaaaaatccgacacttaactttaaaaaaaatattttttcaaaaaaatttgtttctcatattttaatagacttttattgaattaatgacacatgaccgaccaaatgttccgtaataaatgttctgagccgaataattaaatttaaaaaattaaaaaattcattttttcaaattttaccctcgccnggtg

SEQ ID NO: 29437 - DNA, 916 bp, Heterodera glycines
  unsure (1)..(916): unsure at all n locations
gtataaaaacccgggattgtcaattgattggactcataaaatatctttggtctcataaaagtcgattggactcatataagtcgaatggactcataaagtgcattagagcccagattcgtactcagtggctcaaattagccttagaaatgtttttccagaatttattttaaaaaatttcgggaccaatgaaccgaaagattgccgttttttctgtccctccacccttttgggtgttcgaaaatgccaaaatcgcatcctcctcccctttttaggtctgattggcaccggccatgcccggaagatggtcggcgtgtccagcgatgagcccattctggccggccctgcgtatgcaattgagcgagctgagcacattttggtggtccatgtgagcgagcgcttgtgccgtcgaacggcaaaaatgccaaaaaaaaatttctaaatttttaggacgtgacaatgcccggcaaattcctgagccatcgtctgctgtacttcctgaaccgatttgcgcacattccctcctctctggtgctgaacaaagtgcggcttttttattggaattccgtggggttaaaaaaaataattttccgaaaattggtaaaaaaaaattcaaaaatatgccaaggcatttccaaatcgacacttttaaaaacttctcaatcaattaaaaagcattttttccaacaaaaatttttgtatggtttttttttgaaatttacttaattggtttcctttaattcgaaaaaccaaaagctcacgcggtttttccaaaaaactttttgtggaacagggggttccggcggtgccgataggttccgcgccggaaaagtttttgcaattttttaacgaattttgtccaaaaaatgacaanattttgcgattttgagccattttaagcagattttcatcaaaaaat

SEQ ID NO: 29438 - DNA, 1269 bp, Heterodera glycines
cgatatgatcttatgacacgtcagttcataattgaaacgtgcatatgatttatgacacgtcatatctgagatatgatcagaattgaaataggccctgggattttgtgaaatgtcgtgccatctcctctgatttttaaaacagcgcttgtcaagtgcctccgacttttgaataatgccaactttactaagggcacgacctttaaaatgagttcaatcacttttttatttaattaatttagttttatgatttaagaaaacaataaaaatcgactcgtccccattgatcccacccattcgccggtgtcggtcatttcctcagaacacatcttagaacaaaaaagtgaaaatgcgatgattaattaccccctccccgatccgctgctgctgggaatcccgttttgttgtcggggatgggcgaatgaatagtctcccggaaccagcggagcatttgaccagcaccagcaggggaggggcagcaacagttacaggcgaaggaatgaacgcgggagggactccaaacggatggggcgggcgggaggaggcgtaaagcattttttgggaaggggcacccaagcttttcgcggacgggagggggcagcttttcctttcatttaggggccgtggtgggtaagctttccgccgatggcttttccctgcccctctccccgagggcatcaaacctttcctcttccctttcctcctcctgcttctacctcctccatcccgtcgcttgacgtcgtcttacgacgcgatgatgatgaccagcgccgatcatcgacaaagtcagccgccacaaccgcaaaaatttctcttcgccaacggcggcggcgcgtttatcctccgttagcagcgctcgacaaaacatttccctttccctcaaaccatcgtcccccccccctcccctaagggtcgtcgttgtgtcatgctttttgatgctttaggcatttctctcatcaacagtttcaatattggtagaggagaaagcataagtgtcgagactgagctcgggttttcagcccaaactcgttggacggctaatatgttgagagaaagaaaaatggaaaaaatagggcactgattcttcttaaatatggaaaatgcctttacaaataggctaaaaaggtcacttttgtctctgtgattggtgccgatttgttcccaaaatgtgctcctcctccactttggtcagtgtcttccgtccgtccgtcttggttttgtcccctccgtcggtgggttgcgcttcatctcctccccccccccatttgcaag

SEQ ID NO: 29439 - DNA, 999 bp, Heterodera glycines
  unsure (1)..(999): unsure at all n locations
acagcttacaaaagccttgatatttttntggcgctaaaaataagttttctcatcaaatttatgcgtaaagtcctccgttccactcttttgtgtaaagaatgcgaggtgttgcagaacattcgcagctccaattcgggtctaaaaatggtaaaacaataattttatattatctttttatttttgcacctttttgaggggaacactcaagggcaaaggccaaactcttttcattacgttcatcagtgtctgtttgtaccagggatgtgccgagccagacaaaatccgattccgattaaatcgccgattccgattatggccaaaaatccgatactgttggtaccaattttgcggtaaaaaaatgagaaaaaagagatagccattttttggtcaagaattttttttgtttgcgtttcaaatatcgtaagattgtttgatagggccagacaaaagaaggcaactgttggtaccaattttgcggtaaaaaaatgagaaaaaagagatagccattttttggtcaagaattttttttgtttgcgtttcaaatatcgtaagattgtttgatagggccagacaagagaaggcaactgttggtaccaagtttgcggtaaaaaaatgagaaaaaagagatagccattttttggtcaagaattttttttgtttgcgtttcaaatatcgtaagattgtttgatagggccagacaagagaaggcaactgttggtacaaattttgcggtaaaaaaatgagaaaaaagagataaccatttttggtcaagaattttttttgtttgcgtttcaaatatcgtaagattgtttgatagggccagacaagagaaggcaactgttggtaccaagtttgcggtaaaaaaatgagaaaaaagagatagccattttttggtcaagaattttttttgtttgcgtttcaaatatcgtaagattgtttgatagggccagacaaaagaaggcaactgttggtaccaattttgcggtaaaaaaatgagaa

SEQ ID NO: 29440 - DNA, 1516 bp, Heterodera glycines
  unsure (1)..(1516): unsure at all n locations
tagtggcagccgaaacgacctgtttctcccattcaaattcggcccacatnttccgaaattctgtgtctgtgcaagtgcccggcacaatgtaatcctgaaatgggaaatggtaggaagtgagtggtaagcaaagtactagattggaattatgcatttgctccactcaccattatgtcaatgtgaatgtcctcaaggtacacacaatttcgatccgaggtcgaccctcgcacatcataagcaatggtggagaaaatgactccattttcggtggatgacacttttacggtggccttaattatgtttaaagactgtgtggattatgaaagatggactttgatgttagtgaagtcgttaggtgcaagagtaatcggcgagggtttgtccacccttaaattgtctcaattttagcgaacaagatgatattctgtcacaatttaaggtcgccaacggtcgagagttccaatgacaaattttgcaaggtgtcgctagtctggttgaccacgagtacgtccaatacaatgtcatattggttgacgttgacgtacgcctcggcatagacgggatccgaaaagccggctaactgaatcacttttcccagtttggagctggcaaaggtgtatttggtcgttttgggtgcagtaccaagcgcttgggaaagcgaaagatcaaacaaatttgtgtccgtcacgttttctgacacgcgtgtggacagctgcgtgaacataattgtcttgtcgggctgaatttgtttaaatttgattttatttaatcgttgcctccttccgcttgcctgcacaattttcttcttcggcgcttttgtgtcgcgttcgtgccggtccacgtcccccttggccttgagcatgctttccaacgaagcacggcactctctcaaaaacacatccaccgctttcggccattggtcaacaatcagtcgaacagtggtcgacaaacggtccaagtcgtcctcagtgatcggctgtttgcacaagcccgacttgccaagatgaatgattgaagcgatgagcagcagcgcaccactcgccaatttattaacagttgaggggacacctaaaaattaagtgaatttgactgcgataaaaccgatgccacggggttgtttaagaatgttggaatgcgaatggatttagaaaaaaacaaacaaagcaaacgctactgggaatcgaacccatgccatcggaaatgtagaaagcatcattttaataaattacaaattttaaaacgataaaaatttttaattagtgtgtaaaaaagatggaagcgctcagacaaggaaacaagtcagtcacggacagtcagccccgaaagatggaatatagtaaaaggtcatcattgcgccttacaatgggctttgagagcacaaccactaagccacgcctatacgttcagcaggtaccaaaaacaacatgttaatggaaaaaagaaaacaacaaacccaacccaatccaatagacaaacccttgttgagctcagcgtagcgcaacaccaaatttggcca

SEQ ID NO: 29441 - DNA, 915 bp, Heterodera glycines
  unsure (1)..(915): unsure at all n locations
ataataactagggttataagttgtatgcactaataatgccaaatatgcggataaaatatgcactaaaaatcccccaaatatgccctaaaaactcgaaaaatgcccaaatatgcactaaaatatgccttaaaaaactgccaaaaatagcttttagccctcaaaaatgccaaaaattatgtataaattaagagttgacttttaaaacacaaaacaagggccaaggagcatttttttagacaattgcaaaaatactgaatttccaaatttataaatttttattatatgcaaaaacaaaattacatttttatatacataaatatttttccaaaagttcttacaaaaatttaaaaaaattttcgtttttaagggtgtattttttaaaaaattccaaaaaacgtcgtcgatccttgggggtgtatttttcgcttttttcgcatttttcttatgaaaatttgccaaaaatgaccgaaatatgcactaaaaacttcaccaaatcaaaaaattttaatgcagaaatgctatttttgagcccctttcttcgtagcatatgcgcagaaaaaatatgcaaaatcatacaaattataaccctagtaataggtggcaggccaggaccaatttggtactatggatgaatatttcgaaattgcagtaaatttatggctgctttttgccaaaaaaaagctcaaataaaatatttatcaaaatatattggtttttaatccattaccgataagcaaatttttttttttgtttttttttgtattaaaaaaataaaatttggtgccaattttctaggccccgtttttacgaggcctcgtccaccatacganataattgttttttttattaatttgatttttcaggtgctccggcgcaaaatggaggcgctgggaactacggccagcagaagtcagg

SEQ ID NO: 29442 - DNA, 864 bp, Heterodera glycines
ttatcgtagccaatacagtcggatttcgcattagcattataggaggaatattgcctaaattcaattattaaaaatttaattattagtttgagtaaattacctaacccaaacattggaatcattaaaatctttgccgccaaacgatactcaatgaaattttgtccagaaaatgttgtatgtataaacaaacaaaaaatggccaaactgatggagcatttcaaaaaaggaacaaagtgccaaaaggtaattaacagtgccacatgacctaattaaggtaattaaggttcacttataactcattaatactgcttattccaagaatttatctacacttattacgcactttgttaaaaaggttacaccaatgacagaagaattgaaaatgatgccaattaccgcaatgattccataaatcagtgcacaaccaattagtgaccagctgggatggacatctttgaagaccaaataaaactgaaatttagttataataaaataatttttaccaattaattaccgtatcattgccttaattttccaaattggccataattaaggatcgaaaacaatcgtttttataaatttttaattcaactttttttagtaccaaaagaatgttatgaaaaaaattgctgaacatggaatttctcatcaaaatttatatttccatgaatttttgtttaaatttatttaattaattttttgagataatacaacgaatgacaaagtgctgaatttggttgaataaaatgaaagctcacctgacaagttatttaattcaatcatgcctaatgaccaatatttgtgattttttcatgtcatttgccaatgaattaatgaaattacgagcattttacatttttccaa

SEQ ID NO: 29443 - DNA, 665 bp, Heterodera glycines
cttcagatttctcccccccccaccccccccccttcccgaaaatgttttctggctacgcgcttgtttcctattgttttagacatttctcggtgcaaccacttctgtcaatttcattgttcattttgaactgctccagccaattgagcaatttgaattggtgaataaacggactcgcgaaaaattgacacttgagaaaggacggaatcttcgtcaatgggtgatgaaacgatgccaaattggacaaatggttcagtgggaggacggaaacatgaacaccgtcagcattgaattgaatgtttccagttgcattgggtgagcaatagtagcaacagtatttgtgtaaaaatggaaagaaatggattatatgaaaatttttgagttttttcatatatgtataaactattgtattttggcaaaaccgggaccatttcgagttgaaaaatcgggaatttttgctggaaaacccagtaaaaaccgggacttaggtactcagttgtcccgttttttcagtatcaggtcccgaccccgctctactctaatataaactgagggggtggtcctccaaggcgcatacgacgtacgctcgagccagggtggtggtcatatgcgattttccttacgacggggtccaaaatttttgacgacctttttttttttgctcatcg

SEQ ID NO: 29444 - DNA, 783 bp, Heterodera glycines
ctgaaaaaacgacgcaaaaaatgacaaataaaaaaaaggaatattagcaaaaataaattataaaaaggaaaaaacgcttttattgtcagaaaaataaaattggccttggcattttatgcaaaatggcgaagggaaggaaaagcaggcaattcggagactaattcccaatgccctcccaattcttccttttttgcatcaattttctcgggccaccgtttaccgaatgtttctttttgggctttgctttgctttaacttttcccctgggcccatcacttcgttccaaaatgaaaaatgccaattccctcttcctttgtcaatgttttttcccgtaaatctggtcaaagtgcataatgatagagaatgaaaatgagtgccaaaaatgtaaataaataattaattaattgttaattgcctgagggacggtgcggcgaagtccaaaagcgttgtccgttgcccaattcgtccgcgattaattttggtcgtttcttttgaagtttgggacgaattgcagcatcattttgggcagttgaagcttttcattcagtggagaagggaatcgatagaaagaagaaaatgaaaatccatctgttggccaaagggggcattcattaaaatggcggacaaagcgaagaaaatgcaataaataaaataaactttattggcaatcacaatgaagagaagtgacaaatcatttgggagcataatttaggagctttgtataattggccgacaaagcattaaaaaccgaaggcatttcccacgcccgggggggggggggggg

SEQ ID NO: 29445 - DNA, 1270 bp, Heterodera glycines
tggaaagatattatgaacttttggttcaatctcagttgtcacgccgcgactgcatcgttattatatcagtcgatagaattttcgaatcgcttttaaatcgtctcttttgcgtcccttaatcttcactctgagccgagttactgcggtctaaacacgtttttggtagaattgcggccagaatttaaaaatacagtttgctatggcttcgcatcacccgcttcaacgggtgctcagtgtaaatatcgactggccattcaaattctgcctttccagccttatggaaagatattatggaacttttggttccatctcagttgtcaacgccgcgactgcatcgtaatactgcggtctaaacacgtttttggtagaattgcggccagaatttaaaaatacagtttgctatggcttcgcatcacccgcttcaacgggtgctcagtgtaaatatcgactggccattcaaattctgcctttccagccttatggaaagatattatggaacttttggttccatctcagttgtcaacgccgcgactgcatcgttattatatcagtcgatagaattttcgaatcgcttttaaatcgtctcttttgcgtcccttaatcttcactctgagccgagttactgcggtctaaacacgtttttggtagaattgcggccagaatttaaaaatacagtttgctatggcttcgcatcacccgcttcaacgggtgctcagtgtaaatatcgactggccattcaaattctgcctttccagccttatggaaagatattatggaacttttggttccatctcagttgtcaacgccgcgactgcatcgttattatatcagtcgatagaattttcgaatcgcttttaaatcgtctcttttgcgtcccttaatcttcactctgagccgagttactgcggtctaaacacgtttttggtagaattgcggccagaatttaaaaatacagtttgctatggcttcgcatcacccgcttcaacgggtgctcagtgtaaatatcgactggccattcaaattctgcctttccagccttatggaaagatattatggaacttttggttccatctcagttgtcaacgccgcgactgcatcgtaatactgcggtctaaacactttggtagaattgcggatttaaaaatacagtttgcgtcccttaatcttcactctgagccgagttactgcggtctaaacacgtttttggtagaattgcggccagaatttaaaaatacagtttgctatggcttcgcatcacccgcttcaacgg

SEQ ID NO: 29446 - DNA, 755 bp, Heterodera glycines
caaatagacccactttccatatagcgccaatagtttcgcttttggtccattatcgtctccacttggtcctttgtccttgcgaatttcgattgctctccaaattgtcaattcgctttttgcatcgaaatgtttgtccaccaaaacatcgaaacggtcggaaagcaatgccaatttgagtccaagttgaggacggtcaaaagatgggagaatgtccatccacacgtcattgcaaatccaactgaaattcagaacaaatacattcaattgcttaatgtcatgaaaaatgccaaatttggctcacattttcctaaaaaattgttgttgtctttcaccaatagcagaagaaatgaggtgccggtcgacggaagaatattttttctttttttcgacgggctgcgccattaaaaacctggaaattcccggactggccccggtttcgctcaattttgtacctaattaaaaataaacaaataaaaaaataattttatttatttggcgttatgttgatcaaaataaaaaaaatttccaaaaacaaattgtaagttatatgtatgtaagaggcaaacatttcaatgggtgagaaaagttaggagcattaaggtcaattgttttgcgtttttgatcgtttaaactaaaactggcttagagcaactcaattattttcccggtaaccaaccccggtaatagtttagatggttgcccccatttttcggagaattttttttttgttttcaaaagtcatgaaaacatatttc

SEQ ID NO: 29447 - DNA, 851 bp, Heterodera glycines
caaatttgtcatcgaattttttttttggaaaaatttttgaacaatcttagtaattcaccatttttcgtaacgtaaattttttaaaatttcttggagggggatgagttgcttccatcaaacccaccgagtccatttcacgtaattttcgctccagacccatgtttttgtgcaacaatgccttcattattgccaggtgcactgacttgtgcacgtaatcagcgctaaaaatgcaagcaaattttattttttatttttccgctaattgttcattttccatgagtatctggtagcaatccacactcaattttttatttaaaaaaattttttcctggcattttcttacgaaaaaatttcataaacatttttttaaacaaacttctgttgaaaattttttttgggaaaattaaggcaccacccccccccccccctcctgttttccatcccacttttttggaaaaagcgccccgcaaaagcggttttgaaaaaaaaaattttgcctaccgaaccctccctctgcactttcgtaaaagtttctccgactcacccaatgccacgtgcaccaccaactcgttccaactcctccctcatcactcgtcggatattgcccagcatcagtgtgccgtcatcaacttgggagcaaatctgtgcaagaattttttaatttaattttttttttgaaatttaatttcatttcatttaattgcctgtcgaatttgctgcgccctttcttccaccaattgcgaaacatccagagccgtcgtccaactgctgaatacggtgcaataaattttaaaataattaaaattttttaataaaaaataaatacgaaaaatttttgccatgaccatacc

SEQ ID NO: 29448 - DNA, 2235 bp, Heterodera glycines
  unsure (1)..(2235): unsure at all n locations
gctgcacggatggctgagcacttttctcccgctgttatatgtcaacaaactgaacagtttgtgtgccaaacagccgcagttggagtcgacgcgtttgctcatggcgatgaaggcacaggacgacgcgaaggacggaaacgacgacggaactgttgctccgcatgagtcgttgtggaccaagaagcgagcgaccgtggaggaagagatgtgcgagttcggcatccggatggggtgtgcacctttgatctatgaaatcatatgatttgttatgctaaaaataggcagtttctttgggtgcaccccaaaatatcgccgacacaaaatatgccgcggaaatttaagatgaaaatttttcacttagaaattttcaagaaaaaaatcttagaaaattttttataaagaattttatgaaaaaaaccattgaaaatttttcgagaaaaacagtaatttatcataaaatttcaaaaagaatcgcttaaaatttttcaattttttattgaacttttcttaaaaaaatttttctaagaatttttttttaaaaatttctgtttgaaaaaaatttttaaaaaatttcggcggcgatattttgtcgcggcgatatttaggcggcgaaattttgtcgcggcggtatttcggcggcgaaattttgtcgcggcggtatttcggcggcgatattttgtcgcagcgatatttcggcggcgatattttgtcgcagcgatatttcggcggcgatattttgtcttggcgatatttcggcggcgatattttgtcgcagcgatatttcggcggcgatattttgtctcggcgatatttcggcggcgaaattttgtcgcggcgatattttgtcccgtttctgttatacatatccttgagtcttcggatacaaagcaaaagttcctaaaaacaaatttttacactaaaaaagattaaaaatgaccctcagccgttgcaacttgacgatcaattgagttaagtgccaattttgatcgagaaaaactctcaattgttgtgtttttccgtctttcttcatccgtttgcttatggactctgttttcagtgtgcgacttgatggctgaaactcccattgattcgacattgaagtccttttgacaaaaggaacaataaaaaaagccattccctttccggcttctttttacaaaattatattgcttttcccaatcgggattgaaagaacatttgcgcttatttgaaaacattctgaaataaaaatgggtatcatgaaagattcctaataccatattaataataataataaataataattctcaactatgagcaaaaaaaattaacataatgccataatttaatatccaaatatgttataaaattaccaaatttcctttgattattttttccacttttccaaattctcattttcaaggacgtccttgcatccaaggacatttttttattttcaagaaagagggcccaatttcaaggatgtccttgccattcaaggacggatcccatccctgttatatagtcttacggaattacttttaccgttataaaaatgtctacgcaattacctaccattttttagcctcgtgctcggcgacatcccttgccatggtgcgacaaagacgttctcggataagcgaccaatgaaaaacgggtgtttgaaagcggagctgaaggacaaatccgatcaaagatctcactgacttcttattgattcctattttgacaaattatgaaattattgggtattttgattaaatacattctctttatttctttctataaatgtcaattaactgagttccgagaacctcaatcattattaaatcttcattttgctgagatgtaatatagtgtcaatgtttaggcagtaaaataattttcaaagaaaacagtcgaaaactttttttaaacctgccaaaaattgagtttttttataaattttgtagcattttttctcctttcattagaaaaaattaactgaacttttcaaaatttatttttatttcaattctcctncaatttttgggtggtcatatatttatgcagtaacatttatcttagaaatttttctttaatttatgggcaaaaaaaaaattctgaatctgctaagtaacttttgatgctgatcaaaaaagtcttttacagcaacttgatcagatcattccttcatagtgatcgggacaccacaaaatacagtgcaaatcggggaaattttcgaaaaaatcccctagggggttgtgaaattttttt

SEQ ID NO: 29449 - DNA, 2133 bp, Heterodera glycines
catttgcaaccaaaattctgccattttcttttattttaaaataatttgttgaatttaattgattccctaaaaataaataactaaactttaatcgttttttttaattacttgagccactcgggaatgcgtatgtggttattatcattgagatttgttcattcaataaatcaatttcgctaaagctttgttgaatgtggtaaaacgattccattaccacatcctcattgttctggaccaaatccctagggggaataattaatgggtcagttaacgcatcacaataaaggtcgtaagaaattttttttatttcccatcccttttcatttttttccagtgcattttttttaatattcgattatctttttgaaattcttttttgagttttttttctgtatttttaaatataaatctcacaatattttcctttattccaaattttctattctcttttatcgtatttgaaatttctgtgtaataacttccgtctggtatattatttgttttcgaaaaataatttttttttttctcaactgtcttttttctttaggtacttttaaaaatcttttttcatccatttttaatctataataaaactaaatttgcaaattaaaattaagaatttaaatatttttggacaatgaaacccttttttaaactatcaaattaaaatgtttatttatacctaaaacaattaaatgcaaaatgaataaattaacatatgaaaaaagaaaaacccaaatctatcgctgaatctgacctgtaaccggggagagaatggaacgaaaattatttttgagaagatttagagaaaaaactaaaatttcttatgatcaaaaacataaattgtgttttctcaaactgaaaaaaaccattttagaaaaaatgtaaaaaaaaggtccattctctccatatttccggttatgggtccagttggtcttttaacatcggcattatgcaccaacactcggtggggtggctcatcatgatggtaatgccatcgtcgtaaatttggcggctccggtggtggtggaagacggacaactaaattataatttatttcaaaaaaatgaattattttttgtaccaaattcttcgggcacaatttccaacagctcacgtcgacgtttttgaccattggggtcacgtaattccacttaaatattattgtttttattatcgttttttgattttttatttatggacatggttcacgccaacgcggctggcggccaatttgttgaagaaaatgacctctttggccaggcttaatttaataatgtaatcgtttataatttaggttcgtaaaaatataaactcaccggagcaaacggcatgttgatcaacggtggcggtctcatttgtggtgcgttgaaagccccatacagcggacgagccggaggaattggaatcggcttaaaaatatttgaaaaaagtattatttgcccaaaaagaaccccatttgtctctaaattgctgaaaaaatttaatatttttatttacaagaaatgcatattccgccccccccagaaaaattcctttttttctgtaattctgaaattttagcattttgcgaatgacttaagtacctgcggaatcggtggtggtgggtacggcattggtagcggcggatttgcgaacagggggacgaacggaaccggcgggggaaatcccattggcggcggcattcccatcggcggcggcattcccatcggcggcaggaacggctgcgcaaacgccattgccatttgttgttgcggttgtggtggcatggcgtcccaattttgcgccacgaacggagccaaagccgccgggccatgttggggtaccaacccattttctgccgcttcatctaaaaatgaagggttttaatgtggcccgaaaagtagtttccctgtggtaaaaagcagaaaaacggtgctcccaaatccttaaaagattttgaaccccgcttatttacctggcagattctcctgctccgggtacccgaactctccctcctcctcctcttccggttcctctttgatcatttgcaggtcgggcacatcgggcacaatcggactcggcacaacattttgggccaaaaattggcgtagccacaagctgaaaagtgaaataagaaattaaaaagtgaaa

SEQ ID NO: 29450 - DNA, 1068 bp, Heterodera glycines
aaataacttttgagataataaggtttatcataaaattcaattaaaaataaaccctcaaatattggtatgaacgatactttccaaacatgcacgcgtttgcgctcgagctatttatcatcgggctgtcaatccaaagcgaaacaacaaagatgctgttttgaacgaataaagggcataggttattttgaagaagtgtcaaagaacatgcagcaataagcctgcaaaatctaataagtggaaaatacatgagtatagaatttattttcagaaagtgtccacagacttttggaaaaatatatttgcaatttatcaacaattttgagaagtgagttagaaatgataaacttcacgattcaaaccaattttcgttgctctaattaaccgcgataaaaacattcgaatcaattaaatagcttctgagataataaggtttatcataaaatttcatttaaaaataaaccctcaattattggtatgaacgatactttccaaacatgcacgcgttttgcgctcgagctatttatcatcgggcttgtcaatccaaagcgaaacaacaaagatgctgttttgaacgaataaagggcataggttattttgaagaagtgtcaaagaacatgcagcaataagcctgcaaaatctaataagtggaaaatacatgagtatagaatttattttcagaaagtgtccacagacttttggaaaaatatatttgcaatttatcaacaattttgagaagtgagttagaaatgataaacttcacgattcaaaccaattttcggtgctctaattaaccgggataaaaacatccgaatcaattaaatagcttctgagataataaggtttatataaaatttcaattaaaaataaaccctcaattattggtatgaacgatactttccaaacatgcacgcgttttgcgctcgagctatttatcatcgggcttgttaatccaaagcgaaacaacaaagatgctgttttgaacgaataaagggcttaggttattttgaagaagtgtcaaagaacatcaaacggtaagcctgcaaaatctaataagtggaaaatacatga

SEQ ID NO: 29451 - DNA, 1829 bp, Heterodera glycines
aatgtttggaatcgatttagggacttttataagcctttcctttggtacagtgatgggattagccgtctttttgtcgactggcactacttctgctgaggaatcggttatttttacgataaagtaagggccgaaatgtgtccatagtaattttttgtgtcgggaattacggtgcattcccggaaaagctaccataaccctttccgatatttcaaatttgtttgccttcactcggggctttgcgtcataccactctttactctttttcctgtattcctccaaattttgtttggctttgtcttgaatatttaagagattttccaagaacaattgaaaataaaattggacccccaaaatggtaaaatggtcatttttggcgaaaaaatcctacaaattccttctttttctccccggcgctgaaaatttggagaaataaatgtcggagaaaaaagattttttggcctgaagaacaaaaaaaaaacgattttcccttctgaaatttcattttttcttgttatggatttttacttcatataattaataaaaaaatttcgaaactttaataatatcgattaaacagccagtgaccatctgatcaccaatcaattcaatgctttggtacaacgatttgcacaagtcgaaacaaaaagcaacccaaacaattgttatcgtagccaaatacagtcggattttggtcttacggtgccttaaaaatggaaattaaaagttttataacaatatttatatctaacttttcatcaaaaatcactccaatcagtcggtcaatgcccgtgaaaagcattgtcggataaatgccacctaaatttcagttttagaaaatttcggataaataaaaatttatattttccgatttcttacaaattccaagcattgaaatcagttcaatctttgttgccaagcgatacggaatgaaattttggccagaaaatgtggtgtacacaaatagaaaatgcccttgttggtgaagcagttcaaaaaaggaacaaagtgccaaaaggtaattaacggtgccacggaattgtctaaaaatttaaattaaaaatttaggaattattcagcttttttttcaaactttgtcctaattgttacaaatataacggaaacattgaaaatgattccaaatgctgcgatgattccaaatataaatgcgcagctgatcagtgcccaacttggcttggcatttttgtatgccaaataaaactgaaaataaattaaaaacaataattattttttcttttggcttactgtgccattgtttaaatctgccattgcttatatttgaattggttgttcaaaatattattagaaattgtgcacttttaacaaccttttttcaaatgccaagaaatgattacattcttttgttgctagggtaaaaaagaatggaagcaactgttaattaaatttaatgccaaatgatggtaagttacaacaattcacctgccaattaattaatgaaattacacgtttttcagcaataattaaatggaaattttaccctttttctcgaataattaaatgtaattttacgctttttcccagtaattaaaggtattttacgaattttttctccgataatgaaatggcaatttttctgtttttgagttgtaatcatatgtacatgaaatgacaaattaactctaaaaataatttatatgactaagcaaccgtggtatcatcaatggcacaaagtttctaagggcatattgaaaagattgcaccaaaatttttcaaaaagccggtatgaaaatgccgaaattgattgtcagttcagagtacaaaaaagtgccatggaaaaacatcattttaat

SEQ ID NO: 29452 - DNA, 1693 bp, Heterodera glycines
ttttttaaattttcgaccaaaaaaaaaatccaggccccctggggggttttttcggttttttaccaaaaaatttttttttcatttgcgccattgaaaaaccccccggcatttttgggttgcactttttcaagagcttttgaaatgatataaaaaaaattttgaaaactcaaaaaaagtttttccctccaaaccgggtgggtccagtggtgtgtgtggggggttctgggggaggggggcccgggttcgaatcccgcggtgtgcggatgatttttatgacgggtaacgatgttccaaggggctggaaatattttctaaaatttttctatatttttttcaattttttaaattttttatttgaccaaatttgggtgtgtttgaatttttcatttttcgcccaggggaaatttggggggattttcaaaaattaataactccatttgaaatgggtcaaatgtgaaaattaaatgatcaaaaaatgcagaaaaatcgggagaattttatggtttttattgtgcatttctacaattaatatgaaaaatgttattcctgaaaaagatgaaaaattcgatttttcacataaaaattcataactcattccaataaaggcagtagggtataaaaaaatattgataaaatccgcaatttttttctctacaagtaggaatttatttcataattttagcacatttttaaaaagagttataaaattaaaactgcttttggagccaaaatccaaagggataccattttggaaatttaatggacacatttttttgctctaaaatttaaaaaaaacatattttcttacgtaatttgggtcgctgatcacgaatatgaactttattttgagttatagacattttggaattttttaaaaatttttgaaattttagaattttttggcccttgaaaatttaagctacattttgaaaattcataactcccatcaaaaaggtccaattcagtccatttaaagtttaaaaaatagagaaaaatagggagaattttatgagatttatttgggatttctatcttgcaaacaataaaacttattcctgaaaaacttgaaaatttcaatttttcacataaaaattcataactcactccaaacaatgtgctaaggtatacaaaaatattgataaaatgcgcaattttttgctctattatataaattttatttagcatttttatcacttttttgaaaaaagttataaaaataaaagtgattttgggattcgggaccaaagggggtggacaggatttttgagtggaaaaattttttcacccaaaatcttcaaaaaatatgtctttaaggccatttaatgacgctgatcacggatacgtgatcagttttcacttttgacatcgttaaggcctcagaatccctgcgtaaactgggattctgaggcattcaggttcgaatccggacggtgtaaatcatttttaaatttattttctgctattttttaatgctaattattaagtcaaaattattttatttattttttaaattcaattttaaaaaaattaaaataatttttctataaaataaaaatgaaaatgtttaattattaatttatttaaatttaaattaaatgaatttttcttgaattaaataataaataaatgtatttatttataagcaaataagattcagaaaatgaacggattaataacagacaaaaaatttaaa

SEQ ID NO: 29453 - DNA, 1126 bp, Heterodera glycines
tctcttattatttcattaaaagtagtatacttttctgtctgcagctgttgactttgatactgcgagtaaaatagaattttttctttcaataatagagggcaattttgccctttcgggttaggtaataatttgaaaaatactcaccaattgaaatttactggcatttttcaaaagaggtattcataattttaaaataagctcatatttatagtgagcctgttttcacctcgcttctattattaaagggttaaaagattgcgcataaaggccttaattaaccacaagaacatattcacatattttgtgtaattctatctcggactccctcttgctcaaaataatgagtttaatgtaaaatagatttgactagcggatactactaagttattttaaaattttcatctcttaattattttcatttaaaagtagttatactttttctgtctgcagctgtttgactttgaatactgcggagtaaaaataggaattttttcttttcactaatagaggacaatttttgtcctttcttgattagctaataattgaaaattactcaccaattaaaatatacttgcatttttcaaaagacgtattcataattttaaaataaacacatatttatagtgagactgttatcaactcgcttctattattaaagggttaaaagatgcgcataaaggccttaattaaacacaagaacatattcatatatattttgtgtaattctatctcggacttcctccggctcaaaataatgagtttaatgtaaaatagatttgactagcggatactacgaagttattttaaaattttcatctcttaaaattattttcatttaaaagtagttatactttttctgtctgcagctgtttgactttgaatactgcggagtaaaaataggaattttttcttttcactaatagaggacaatttttggcctttcttgattagctaataattttgaaaattactcactaattaaaatatacttgcatttttcaaaagaggtattcataattttaaaataagcacatatttatagtgagactgttttcaactcgcttatattattaaagggttaaaagaaaggcttaaaggccttaattaaacacaagaaccatattca

SEQ ID NO: 29454 - DNA, 1170 bp, Heterodera glycines
  unsure (1)..(1170): unsure at all n locations
ggcgagctctaaatttccaaccaatgtaacgccccaaaacgaccaaatcctctttacaccatagatttggatgaatatttgcaatttttcagagaaaattatgaaattttggttaaagaggcttcaaaaaacatcgcgaaagcccaatttatccaaaagaaacaatttgactcgaaaccgaacgttcaaccaggaaaatataaattgggagacagagtaatggttttctttcggccgtcggcacaaattaaacactcaaaattatcttggaattattttggtccttacaaaattaaggccttaagtctaaccgcagcatggttgtgcctgtgaataaagaagaaagtgaacaaatcaaagtcccaattgaacacttagtccatacaccaatcgaacttcccaatgaaacttttctcccaaaacaaagacgcggaaaaattttcaaaaatatgccacctccagaaaatggaaaagaaaccagccaaaagaaaattaattctgttttgacaaaatgcatcttttcagaaaatgtcgccccggcgaaattggcactcatcgcacactgctcaggcattgagcaacattcaaattgttcttgcattttgctggaagaagtgtttccgaacttttcggccatggaccctcttcgacgcgtccaattgtcatcacttggagaattaatcccaatttcaatcgccaaacagaaagggattttgctgggccatattcgcagttgggccaattcggatgaagaatcagcttcactccttcgccacattcaaaatttcattcctccaattttaatgtgggtggaccgttgtgccgtcgcatttcaaaccctcaaaaatacgggaatgaaagttgtacagcaagagatttgctcaaaaaatccgctccaccggttcggggagttgatcagcgaagcattcgaagaagtgaaggcaaaaaatataatcggcttttcatcaatggaatccgaaaaattccttttttacggcgactcatcggttcgagagtttgctagtaaattggaaacaaaaaccatcatttttaaaaacacactggaaatggccgaagcattncaaaatacttattttacgactaaagtccaagaaattctgatcctgatccgaaatgacgatttggaccaggccttgggttaaatgatgt

SEQ ID NO: 29455 - DNA, 1043 bp, Heterodera glycines
  unsure (1)..(1043): unsure at all n locations
cgcgcttccggaatgtgccaatatggcgacgcgtgccgtttcgcgcacagcaacgaacacntccgtttcgcggcaggtgggcagagtcaatggcaaatcgaatgccacggaacactttcttcgttcagcttccgcacaattacaagacgaaactttgccgtaacttcgaacaatttggtttttgtatttatggggtaagtcaaaaaaatttccgtccttttaaattttcttgggatggaccgtcggacccggccttctcgaattagcaaaacagtgaaagaatttttggctgtcagtgattatttaattaaactaaaagggctgttttaataatctttgaaattaacatttgtcgtcatttaggccaagtgtttgtacattcatcgtgatgcggttcgttaattctcacaattatggtcaatgtcttcttccgatttcagttccgtgcctttccttctcagcttctgcccaatgctcattgtcagatgccttcgcaattttcgttccctcgcctttcgaattcttcgcccgcgtcggcgcccttttctctgtggaaagaatgaatgaatcgctttttctgttgtttttaacatacattttcaaattcctataaatgtgttttagaaattaatgaaaataagttttaaggggttttcaaggtcgctgatcacgaatatagcacccatttttgccaatttcgaacccctgacccgaactcgaacaaaaataaaattaaaaaatttgtatggatgatatatcctcattggcatcttacccatgagggtaaccttggtataggaagtataaaatttaaagtgtatggatgatatcctcatgggcatcttgccaatgagggtattattggtacaggaagcctatcaattctttgtccatgtacagctcatgtagtgaacggtagcgctgatctgagcggattcatgatcagcgacctcgagaactccttaatacttattttcattaatttttgaaacacatttataggcatctgaaaatgtatgtagaatctgtcctgtaaactagag

SEQ ID NO: 29456 - DNA, 1882 bp, Heterodera glycines
  unsure (1)..(1882): unsure at all n locations
cggacggagtgccccctctttggacatgnccgagcacagtgacgcgagtgtcgtaatggagcctgttcttgacagaattgcatacctaaaaagaaagatggtntaaggagtgcctaaactaatgaaccatttcgctggtgatgactttgccttcctcgtcgatggcaccctccgccacaatgataatattcagtcgctggttgagttcgcgagaattggtcaattttgcacaaagaacctaaaaacgaatgaattgatgggcggatgaatcggtgggccgacctcttcccattttttgggttgtggccattccggaatgaaacaataatcggcctcacaagccaaagcggcaaccaacgccaaataaccgcagtggcgacccatcacttcaatcacaaaggcgcgctggtgactttgcgcggttgaaacgaccgcatcgacggcctgaaaagaaaagggaaggaagaaagagatgtcggagattgcattccatttcaatagtaagcacctcaacaattcgctgcaatgcgctgtccgtgccaattgtcatatcagtgccacaaaaatcgttgtcaattgaaccaacgaggccgacgatctttaattttaaggaggatgttatgaccgaaagcaaacataacctggacataagggcaaagcttggcctgctcctcactgatttggccattcgacaccaattctttaagcagtgctggccattcgtcacgaaaaatggtggcgccggtcaacgacccgtccccgccaatgcataccaaatgagtaatggaatttgcgacgagatttttgcaagccgaaaagcaaccgaataaaaagagcagcgaatgtactcactttgagacggccatcgtgttccctgaactctttgcaacgcgccgaaccaattatggtaccgccgctttggattatgtcggaaactgaattccaatgcgcctccacaatgttttctcctccgtccaccattccctaaacattcggatgttcgccgcccaaaagtcgctcggtccgtctgacctggtaaccctctttgatgaaaaacacgcgacaaccaaagtaaagtccggtacggacaacggaacgcaccgcactgttcattccttaaagagtgccgttcaaaaaaaggcagcgaaggaagcgggactcaccgcacgaatcaccgccacttgtaaaaacagccattgttcgaccagtgaaacatcccggctcaatgagagagccctccatgcgcactggggacggcctcttggcaacgtcagaaattgacatttgacaattttgttgtttaaactattcgactattttttttaagtggagatgcttaacataacacaaggttaaacagttcgtattcatataaaacgaacacatgagaatagtacattaggtaatactgcagaatggcggcccgacagaaaataaattaaaaattttatttttgtctttaccagggtaaaaaatgtgctgattactagagatacgattttaggtttttacctgtttttcctgagctccctatagtctaaaacaaacgaaaagcatgtttttttgtggttgttaagctacttttcaagttattagtagggctgccaaaagtatgcaaatgcatattttttcctggcttctccatgctctaaatagtaggaaaaacactttcttttttgtgtttgcgtataaaaatcgggacttttatttgcatattttgggcttttatgcatattttgggtttttctgaatttttatgcatattttgccattttttggaaaatttgttaacaaaaatgcaatataaacggaaaatacacccctaaaaataggtcctaaaaaatacagaaaaatacacccctaagaatcgaccaaaaatgtt

SEQ ID NO: 29457 - DNA, 1517 bp, Heterodera glycines
ggcatttctctgctctgtccgtctctccccccaattccaggccatttctctgttctgtccgtctctcccccaagtccatggcatttctttgttctgtccgtctctccccccaattccagggcatttctctgctctgtccgtctctcccccaagtccatggcatttctctgctctgtccgtctctcccccaagtccatggcatttctctgctctgtccgtctctcccccaagtccatggcatttctctgctctgtccgtctctcccccaagtccatggcatttctctgctctgtccgtctctcccccaagtccatggcatttctctgctctgtccgtctctccccccaattccatggcatttctctgctctgtccgtctctccccccaattccatggcatttctctgctctgtccgtctctccccccaattccatggcatttctctgctctgtccgtctctcccccaagtccatggcatttctctgctctgtccgtctctcccccaagtccatggcatttctctgctctgtccgtctctccccccaattccatggcatttctctgctctgtccgtctctccccccaattccatggcatttctctgctctgtccgtctctcccccaagtccatggcatttctctgctctgtccgtctctcccccaagtccatggcatttctctgctctgtccgtctctccccccaattccatggcatttctctgctctgtccgtctctccccccaattccatggcatttctctgctctgtccgtctctcccccaagtccatggcatttctctgctctgtccgtctctcccccaagtccatggcatttctctgctctgtccgtctctcccccaagtccatggcatttctctgctctgtccgtctctcccccaagtccatggcatttctctgctctgtccgtctctcccccaagtccatggcatttctctgctctgtccgtctctcccccaattccatgtcatttctatgctctgttagtcactgcccccctcccagtcatataatgctatgaccgctatcacccaaaatccgagaatttctcaacactctccctatcacccacacacctcatggcatatctctgtattgcaccgcacgacctcccatttattggtattaatctactctttgcctacctaccccccctcgcatgtactgtatatgctctcctctactctccacaccatatcatgctataattctctcaactctcatgcataaccaaatataataataatgctcatatgtgctatttttccccgcaacttttatattatttataataaatataacggctaacacgaatgggcctgcactttataccgttccacccccgctagccataatattactgtaatttatattctactttatttaaccccaaaaacaataaaatactatataagattagccagatcctcatggcatcacattaagatcttcatccattatcaccttctgccacaccgtcttgtacattttgtgcttct

SEQ ID NO: 29458 - DNA, 1082 bp, Heterodera glycines
  unsure (1)..(1082): unsure at all n locations
caatcgctttttggaattntaatgagtaatcagggaccgtaaaatgacattctatgcttctcttgtntgatacacggaaagaaataatagttagtcctttngtgaatttntagaaattttatccgtcaaatcgcttttggaattttaatgagtaaatcaggaaccgtaaatgaattctctggttctcttgtggatacacgggaagaaataatagttagtccttttgtgaaattttagaaattctatccgtcaaatcggcttttggaattttaatgagtaaatcagtaaccgtaaatgacattctatgcttctcttgttggatacacgggaagaaataatagttagtccttttgttgaatttttagaaattctatccgtcaaatcgacttttggaattttaatgagtaaatcaggaaccgtaaatgacattctctgcttctcttgtttttttagaaattctatccgtccaatcggcttttggaattttaatgagtaaatcaggaaccgtaaatgacattctatgcttctcttgtttgatacacgggaagaaataatagttagtccttttgttgaatttttagaaattttatccgtcaaatcggcttttggaattttaatgagtaaatcaggaaccgtaaatgacattctatgcttctcttgttggatacacgggaagaaataatagttagtccttttgttgaatttttagaaattttatccgtcaaatcggcttttggaattttaatgagtaaatcaggaaccgtaaatgacattctatgcttctcttgttggatacacgggaagaaataatagttagtccttttgttgaatttttagaaattttatccgtcaaatcggcttttggaattttaatgagtaaatcagtaaccgtaaatgacattctatgcttctcttgttggatacacgggaagaaataatagttagtccttttgttgaatttttagaaattctatccgtccaatcggcttttggaattttaaagagtaaatcaggaaccgtaaatgacattctatgcttctagaagtgatacacgggaagaaataatagttagtccttttgtt

SEQ ID NO: 29459 - DNA, 1114 bp, Heterodera glycines
agagagagaataaatgagagagagggagaggcagacagtggaaaataaaagagtgtgagagggagagaaatggagagtgtgaaagagaggggaagagataagaatagcagacagacagagaaaattgggggagcgaaaatgtcgataagcgaatgaggggggggggggggcggcgtccaccctttgccatagcaaggggaaatgttgcaaataataactaaaaacatttaggtaaaattttggcaacagtttttttgcaactatttgcagtttttagcagctattttgataatttttagcaaatattttggcagtttttagcaactatttaagcacctttttcatgtttttaacaaaaatacatgccctagtaataattcactgtaaaataatttaacgtctcaccattcgggcattctgccaccattctgtttaaagttacctaagactaaaatgatttaaatgattatattaatacatagatttaaaaccaaatttccatatgtttctgttttagaaattatcaattttaaattttcgagtaaatattaaactttttaaatcttttgggcccagtatttttatcaatttgttttggtttgtggtccggtaggaggtttaatacaaagtactatattaaattaaattggttgcggtttcttattggttttttttataatttgatcaatttttggctaaaaactgctatgaattatttagttaataattgcaaagcattaagaagcattccgatttcatataaattgcacatattttatgctattccgaacagcaaaaatttagcaaaaatgcaaaatttaaaatcattcaaaaaatcacaaaaatattaaaatatattcaaaatgacagaaaagcaaaaaaatttaaaaaatgctaatacaatatagaattgaaataaatgcattaaatatttaattaatttaactttttgaaattttaaaaattgttaaattattaattgaaattcttccacagaacaacattgaagaacaaacacacaatagttgactggtacaatttctgtcgtgatgtcaaggaaataatttaacacaaagtatatttttaacaaaacagaaaagaattaacattaatt

SEQ ID NO: 29460 - DNA, 492 bp, Heterodera glycines
attttaaaatttaagctttcacctcatcacatttacttaattttcatgcagcataattcaacacacagaacgagttgcagaatgcagaaattctttacgccgttgaaaaagctttattcagttatattcataaaatgttttctatttttttgaatagtgattccaatgctaaataattttgtgactaattatttatattaaaattatctctcaaaattattagaaataatatagatttttacgtgtttttgtactatttttcgtaggaaattcaataggagtagttactcaccaagattttcggggttgtttttcagtcccgccatttcagtcccagtggaaagggacatttcagtacttaaaataaatataacccaaagccaaatcctattggagaaggggaagggaggcaaagggaagggagtcagctgtcgtgcccttgggggaggagagggacaccaggccatctgagcgctcgcgcgtgccatatga

SEQ ID NO: 29461 - DNA, 1975 bp, Heterodera glycines
  unsure (1)..(1975): unsure at all n locations
cctgcaccaaaaaagccgaaaatttacaaaagcaaatcgactatgacagattggcaggcttttcctctaaacacaaaatgttttcttccatgtcttctgttttcacactctttccactcttgctttaaaatccatgttttgttgcaaaatcatttaataaattaaagaaaagttccggaatttgccgtgcggcgcctgtcggccgctaaccgaaaattcttcttaattttcaaaaattttttagaaaaaaatggttgtgattagttttttaagcagaatcttttagcaaatttgacaaaaaatttaatgcacaactctttcgcaaatagctagctctgttttccctttatgggctttcttttaatctcgttaatccgttcaataagttttcgcattttcttttcgtaatatttcttttcatatttttttttaaaattcttttttccatttataattttcattcgagatgcaattttctgctcaattcgtatctgaactttttgtggatattttcctcctttttaattgcttctctgattacatcaaatttacgaacaatttcacaattttgctcatttcaattgttttcatttgatcagttacaatgaaatcagctgaatttaaaccatacaatcaatncctatnacttttttattcattaaatttnaatttttaaaaattcaaacaatttaattatcttcaattnataaaaatcnnaatatnaccntnnatttcaataaaaaaatctcattattactctaatatattntaaatctacaaaatttaaatccattctntttaattacccaaccntaanaaatcatacaaaaattcnaaaatttcaanaaaaaatttaaaaatcatttnataactctcactnaaatcaaaatttaacaaaaatttacccatttattttacttttttccattttnatanantnacaattccaattttcaaaaggtcagcaatttctttcacttttagagaccgagttttcctctttaatttatatcaaatgttcatttttttcttcattcgaatacgcatatttaactaaaaatttaaaattaaattttaatttaaaattntaattaattacttttaccaatttcaatgccaaattcctttttccataggaataatgttttttgtctatgcccaattctttggcaaattctttatgttttcctttttaggacatattcttaactcgtcaattcgttcaacaaattctctctttttcttttcataataattcattcggtttttctttcttttcattaaattaaattcttttttccatntaaaatatattggcgatttgttctaattttttcgcaattttttgctcagttttatacgagacttttgccgaatatttatcttttttcttaatttcttctttaattgcgtgaaatttattttcatcactgaattgaccaaatctgagcattgcgaattgaattggctgaatttaattcattttatcacttttacgataatttgcgttttgatcaatttcattttcaaattcaattttttctttatcccatttttggctaaaaatttcagcaaaagttggccaaagttttctattcttttgacataaatttactgataaagcttttttagttgaattattatgaatgagagcacaaaaacaaaaataagaaaaggcatctcttaaaaaataaataatatttatgatttttattattcaatacttttattttggctaaaaatttagaaacaattctaatgacaaaattttatcaatttgtgaaaaaaatagaaaattaatgacaaattttgctcaaatatttggccaaggatgggactttgtaataaaagcaaatttatattatcccatatctaaaaatttaatttatgaaaagtagatttattttttacatttttgtgaatataattattcataatgaattcattaaatcccatttattcaaaataatatttt

SEQ ID NO: 29462 - DNA, 1676 bp, Heterodera glycines
tcctctcctccccttttgttaatgctctcataaatcacagtgatttcttcgctttctttttctctatttttcgttgtgtttcgacgtgtcttttcttctctggctctctcactttcccccgctgtttcgccctcctctctttgctttgtcgcactttcttcagccccttttgctttcttccgacaaatgaaccctttgcgtttgtcaggcgtcgcccatggaatccgtggcgcaacgtgtcgcaacacttttccgtccaccgcagtgccatcctcgaaatgctctttgccgtaatatattcccacccaaaaatcgctcaagtcccagtggaaagtgatgaaggtgaactcgtccacactgtggaaggaagcgaaatttgcctaaaaagcaaaattacacaaattggcattcctgctgctgctttccatccgccatttactttcatttgggcacattcctcaacccccgcgtaaaagtccttctctgtgcggcgtccgtagaagcacaactcattacggtaattgagccaccccttctcgcattttccctcctctttctcctgcttctctccatcttttcccgcctcttctttctccttcctctcccgtaacttccatctttgtccctcaaattgctcttctctctcttcaacgctttcattctgctgctcttcctctgtctcctcaaatgtttcattgtctgatttaattgagtcaaaatgtccgaaaaatgccgtcttatcagtgacagcaatatcctcatactcataatctaattcatcgtcattaccatcatcatcattgtcgtaatcatcttcataacggtcagtgtcattctcttccataaatattgtttcttgaattgactcggaatctaaaaaaatttttaagattgtttaaattttgttgtaatttactttcattttcattcaaaaaagcttcatcttctgcttgaactgcttctttttcttctcccaactcgccgaattcgattggtgaaatttggtgaaaaattaaaataaaaagaaatatagaaaaaacaattttgcacatctgcattttagaacggcaaaaaatgcgtaaaaatttacgtttaattactaatttagtttaatacacaattaggcacttaaaaaagcatgtaaaattatatttttattcattttattttttaaaataaaaaaaaatattaaatttaattgaatgcagctttagagatggaatgatgccatcatccgtcatttgccatcgctcacctccaccccccgcccgccccctccctcctccctcacctctctcaatttgccatttttttgcccaatttgtgcctttctcttcccacccattcattgccttggccacaccaatcactcactaatgccaatgcgtatgacttacaaaagccaatacttctcttcgcatttcatcatttttgcgcttgtcaaataaattacacggccataaaggtaaaagatgggagctgctgtacttcttcaagttgtgaaaattatttgggataatcataatgctggcattactttcccaatgatcaacggttcccatgggccatggtctcctaaactcagagttgccattttgcagttgccactctttgggtcagtcagcagcgccaggaatggccagctttgaaattgccagttttgcttgatttttcaa

SEQ ID NO: 29463 - DNA, 610 bp, Heterodera glycines
ctcattcaaaattcaatcacagcgaatgtctcaaaatccatccaaaatgaaagccatccgccccgggggcggggaaggcacggcacaacaaaagccaaaggcactttaataaatacggcagcccatggcaatgcaaatggaaacagtgaaccatggcaaaatatgcaaattactcttggcaatctgttgattaactcaaaacggaaggtactgtcgcggagagtcataaaataatccgaagagaatatggtgaattctttgccaaaataaccgatggattttgaaagaaaaattttggcgctactgtaaaagttgttggttttgaaaattttttcaaaaggggggacccttttgttttgcaaaattttttttgtgatagtcataaaaatttattctctggggtttttggggtccccgatcacgaatctttcaattattttgatcaattccgatttcctaatctaaatttgaacaaaaaatcataatttgaaacgagttcgggttagggattagaaattagtcaaaatacatgtcagattcgtgattagcgacctttaaaaccccggataaaaaattatcatggttttttatcttaaaaaaattttgcaaa

SEQ ID NO: 29464 - DNA, 1327 bp, Heterodera glycines
  unsure (1)..(1327): unsure at all n locations
cagagcaaaagttcgaatccgcttgcctgcggcttatttattgcgattttccctgggctaccgtacncctcgcagtggtgacgtcatcatctttgcagcatatagtggacaattatctttttctggcaagtgttctcgtggcagagtggtagtgtgttgggtntggtggcagagcaaaatttcgaatccgcttgcctgcgacttatttattgcgattttccctggactaccgtacccctcgcagtggtgacgtcatcatctttgcagcatatagtggacaattatcctttttctggcaactggtctcgtgtcagagtggtagtgtgttgggtttggtggcagagcgaaagttcgaggccactagtctgcggcagaatttttcgaataaaaaaaagtcgcgcacccctgcaataggtttaggcttgcagaaaaaaagtcgcgcacccccctgcaataggtttgggtttgcaaaaaaaagtcgcgcacccccctgcaataggtttgggtttgaaaaaaaagtcgcgcaataggttttggtttcagtactgaaaattttggcgctcagttggcccgcgctcacatggcggcgctcacctggctggcgctcagttggccgtgcacccctcccataggtatgggaggctaccgtacccggcggatttgtgtgccctaactactatagcagtcgatagaattttcgaatcgcttttaaatcacctcttttgcgtcccttaatcttcactctgagccgagttactgcggtctaaacacgtttttggtagaattgcggccagaatttaaaaatacagtttgctatggcttcgcagcacccgcttcaacgggtgctcagtgtaaatatagactggccattcaaattctgcctttccagccttatggaaagatattatggaacttttggttccatctcagttgtcaacaccgcgactgcatcgttattatatcagtcgatagaattttcgaatcgcttttaaatcgtctcttttgcgtcccttaatacactctgagccgagttactgcggtctaaacacgtttttggtagaattgcggccagaatttaaaaatacagtttgctatggcttcgcatcacccgcttcaacgggtgctcagtgtaaatatcgactggccattcaaattctgcctttccagccttatggaaagatattatggaacttttggttccatctcagttgtcaacgccgcgactgcatcgttattatatcagtcgatagcattttcgaatcgcttttaaatcgtctcttttgcgtgccttaatcttcactctgagccgagttactgcgggctaaac

SEQ ID NO: 29465 - DNA, 2193 bp, Heterodera glycines
aaaataaaatttttggtacattgtaggatcgggttttcaaaagaatttactatgatatacctatatgtatgaggctgaattaggtcatttttatcacgaaaaatgttccgattctcgcgaaattccaaattaaaaactgtttttagattaaaatttttgcactaactttttttaactacagtaaaacggtgattttttggaaaattttataaatttattcgaaaatctcccccaaatccttaaaaaaacccacctttcccgggggaggccgacaaatttttgtggtcgtcgatggactggtgggcaaccacggggcggagcaccaccgctgggacgcttttcgttcaaagtccaaaattcggtaggccaaactttgggtgtatcgccgttcctcggcctgaaaaaatgtgaaaaataaataattaaattttaaaacaaaaaaaaataatttttatttataaatgtttttctataaatttaaatccttttcaatatttaaaaatattctttaaaataacaatataaaatttttttttataaaagtgatttttctccaataaaacatatttttatatttttcataaatgaaaaatataaaaaggtttaagaaaaaaagaatttaattgaaaaatatttttctcaatttttatttttatttcaatttacaatatttaaaagattcttcaaataaacaatataaaatttattttatttgtatctaaatgatttattttcttttttattattaaattaatttattttaaaaaattcatattaattgaatcccaatttaaaatcattttttattgaaaattttaataataatttcaatttaattcatttttttattgaaaattaataataattaattaaatttcaatttaaatcattttttaatgattaatttaatttcatttaatttcatttaaatcattttttatttaaaatttaataatttattgaattccaatttgaattcatttttattggtaatttaaataataaattagaatacaatttaaatctttttttaatttaaataataaattagattttaatttaaaatttttttcattttcctcctaaattttgccttcatccgcgtccacaattcgtacgcctcttgcgccacttctttcttccgcttttccgtctcctccttctgctcgtgttccgtctgttccgcgtgctcgtgctccattcgctccctctctctttggcgcacattttgtgagactaaaaatttttaaaaatgcccaaataaagcccaaattaaatatatattaaattaaaaaataaatttcaaaattagagagaaaactagattatttatttaattaaaacatcttgcaattcatcgacgtttcgggaaaagtctcggatttgtttggggtctcgagttttggcaaaattttctgtctcgggtatcacgattatccatttgtatgaatttaaaatatttttttccaaaaaactcgccattccccaaacgcgctgtccgccttcgtccgattcgcctccttccgtcgccgctcgtccgcttcgcgttgctgcaccgcgctttgggcccgctcgcgttgacggcgcacgcgttgtgcctccgtgcgtttccaatgctcaaaagtctgagagaaaattaaaaatcagaataaaaaaaacaaacttttaattgcttttcttgaggatatctcgagattgaggcatatgacactaagtatacccccgaggtaagagttagagaaattttctgggacaagagaatcagtcaaattcaaaacccaaaatcagaatttttatgggggtcaaagctcgggaccaagacagactctcgagagaagcgctattcaaaattgcttccgcgcactttttccgcgtccgctcttttctcctcctttttccgcttttcttgttccgcgagcgtttccgccgcccgcttctccgccgctttccgttgcgccattcgcttgtccaattcgcgcttccaacgctcaaaattcatttcggacatccttaaaaataatttaatttgttaattcattccgctcgcgcactttttcttttccgcctcttcgtccgctttctttttgcgctcctccgcttcgcgctgcctccgtgcccgatcgacttcctgtttttgccgtagccatgccttgggcaataacaataataattagtgatcactgatcagtgatt

SEQ ID NO: 29466 - DNA, 1574 bp, Heterodera glycines
  unsure (1)..(1574): unsure at all n locations
cgcagactgaacctgaagagaagcccaaaacatttgcttttggattgcaaactgatcaaaccggtttgatcgattcggagatgcaaacagtttcagaagagaagccgaaaacggtcacttttgcaatgcaaactgatcaaaccgatctggtcaattcggagatgcagacggagacagcagagaagccgaagattaccaacaagttaatcactacagaggcgcagactgaacctgaagagaagcccaaaacatttgcttttggattgcaaactgatcaaaccggtttgatcgattcggagatgcaaacactgtctgaagagaaaccgaagatgaccaacgacgaggttcttgaactcaatgtctcggttagtttattttaaaaatgtttatttggtcttcatatattttcttgttgtcattttattctttgagactaattttatttttcgatgttgcagaaattgcctatggatgctgattcgtcatttctcagtaatcaagggcggagttcccctttgttggacgaatcattgcgccgtaaatacaatgaaaagtgtgaagaaatggcagaattacgttatgtaatttatctttttcttaaaatcttttctaaacattttctacaggcatatgagtttcaacagtcaatcatttctaatcaactggacgaaattgcgcggctaaagcaacaacaacaactacgaaatggcgttcaaaaaaatgggtgagcgaagaaatagattcttacactgacaatgagtacgtttaaaagcgtgttacttttttgaattaaatgatgctttccgattacaatacaagtcattgttcagaagtccgtcctcgactcgtcacccaaccattactgctgcttcgccgtcgtccgttttccctagcggtgctctgcccaccatttcgggtcgaccacgcgctgcaaggcgaacttattgcgaacattgcgaaatgtttgacgcacacgactcgtcagagtgtccaaaagaagaggcaaaaagagcagaacgacgcgaccatgaggcactttcaccgcagaagtgggacgaacgggaacgcaccttctggcattaatattgacgatgcatttagacccaccctttttctctttatttttgtccattcgtttgtatgatcttttgactttaaacccgtgtgcctttttctcttttttttgtctcattgagtttaattattttcatcagctgcctttcatattcttggttcggtttcctctttgacttttctttttacattaaaaatcgtaaaaactaaataaaattcaatcattgcttttttccgcctaaagttcaatcaatggcttttttgtgcccaaattaccgttcgtttatattgacaattggctaccagacaactctgtttgttgtcaatttaaatgtgcattaaaactcatcttagatttcagggtaacgactgaatctcaaaaatgaacggttctctgacaaatggcaacaaagtcgaccgcggcgtcaccattcttttgggcgcgcaatggggcgacgaaggcaaaggcaaagtgttggattntctcatcggacatcaca

SEQ ID NO: 29467 - DNA, 2374 bp, Heterodera glycines
tccatcggaagccaaatgtttctcgtcggattgaccggcggaattgggactggcaaaagcacagtgtcgcggatgttacgcgaacggggctattcggtggtggacgcggacgaaattgcgcggatgggtccgccattttattttccctaattataccatcaaaatgacaattcaattgcaaatttgaatcctaaccgaaccgtcaaaaaactaaattttgttttaaacccaattttatggtcccaaattttttttgccaattttagtaatctccgattttctaaaattttttacaaattcagttgttgagccgggcaaaaaggcatacaatcggctgagggctgagtttggcgacagttttttcgacgatgaaaacggcggagttttgcgacgagacaaattggccgagttggtgttcaccaatgttgaagtatagtttaatgaatttcaccaaagatttttttgaaattaaaggcttacaaactaaaaatttagaaattttgaaaaattcgcaaaattttaacccaaaattagtgccaattttgaaattaaatgtgcaaaaaatgtaatcccagaaaaggaaacggttgaacgcgatcacacacggcgaagtcatcaaagaaatgatcaaacgcattctgtgggaggcggtccatctgcggaaattcatctttttggacattccgttgctttacgagaccaaaatggaccgatttgtgcagaaaacaattgtcgtggcatggtaaacagaattttcacaagcttcagcaactttaagtgccccctttttttcgaaaaaacgattttcaaaatgtaatttttagtaattaaaaatcggaaattttaccacccatttccaatcgttacggcattgtaaaaacaaacagtttttttcccaaatttttgatttttgaaaattacaaaaaatatccaacttctaagatttgatgacccacaaaagatgagacttttctttaaaagatgggataatttcttacggttttcccaaagttttttgggattagagtggacatccgctgaagaaaatttgaatttttttaatcaaattttgttttaaaattggaaatttttcaggaattcctctcatacttttttcaatgcaaattttcacaaaaaatttgatttccaaatttgattttaattttaaaaaaactcggagattttaacattaatttttctcaaattcttgtgttatgacaatttttttccccattcccttcaaaaaaagggattgccaataaaaataaataagccaaaattaagcaatgacgacactcagttgtggcgcgtggcgttgcgcgacgaattggccaccgacgaagcggagaaacggatcagagcacaaatgccaatggaagaaaaggcacggaaagcctcatttgtcattgacaacaatggtaaattttgcggcttttttcttaaatccgatatttatccagatttcttggccacggtcaatagcactcataattttttttatttattttttatttaaaacaacaaattttaaagacgaatttttgctagaaagactttgaaaaatttgttaatttttcatttttttttcgtttaaatttcaaaaaagtgtgtacgaattgccaaataataatgacaccctttggcgccaaaactgtaaaattattgttttacgtaataattgaagcacatttttaaggcagtcttgaggaaacggagcaacaattggatgccgttgtcgaactgcttgagtccagctggttgctcccttttgttgtccgtttcgcctttctttcccccatttttgtattacttttgtacatttttggctaatgtttttttttgatgccttacaattttagttaagcattattattgttgttattatgctgtattaattactctctctctctctgttacataaatttatcaaaattttcgaacaaaaaaaaacaatattataattcattcgttttccttcccttttttggcctatcccaccacttttgttgtctgcgcttccttttgcccttctcctccgtcttggcctttgtttcccgacggatttctcggcccttttggtttgaattgtcctggccttcctctaaaattgtttgtgcatttccaacaaaaaaaaacatgaaaatttctatgacggttctgatttggcttggatgcgctttcaggcccatatgcagaaaaatattcgggaacggcacccaagagctttttttttttgctcttcgggccaaaaaaattttttttttaccaatgttatttttcaaaattttcagcgcaggggcgaaaaagtagcatttttagcggttttgcgccaaaaacgacaagcttttgccgtttaggggcaaattttcaaaaa

SEQ ID NO: 29468 - DNA, 789 bp, Heterodera glycines
tacattataactttattttcaaagcaattacataaaattatcattcagattttttgaaattttataacaaaatttttgaaaaaaaatttatattgcctaacgaaagtgtacaaagatatttatctatcaaaattaatttaacattgttttttgcattttggaaatcgatatggcaaatcagtgattcacagatctagtaataatattagctgaaaaatatcactgtttatttgaataatatttagaatttattttatttttttatttataaatattttattcagagaattgcatttgtgcttattttgaaggaccatacctttaaaatttaaaatgtccttatttctaagtttcactcttcttttggctgcttattttgtgctcatttcttcgattttgtttttcccgtaaaatttataaaattgccttatttggtgcgattttcgagttcacagcagggctggagcgcgcacagaaaaaaaccgcggccgcgcatcgcgcatcgcgcattcaaattgccgcggccgcgaccgcgcatcgcgcaaaaaaaaaaaccgcggccgcgcaccgcgcatcgcgcattcaaattgccgcggccgcggaccgcgcatttaaaaacaaaattttcaaaaatttcaatttaatcaataaaattttcccaagtgaaagtttttttgaaaaaaaatttgaaaatttgactgcactttgttacgaaaattgcctatattaaaatatgtactcattgggggaggcattcgaagaatttttccatatatagaaatttttttt

SEQ ID NO: 29469 - DNA, 287 bp, Heterodera glycines
tgttactagatcggggatcgatccccgggcggccgctcgagcaggacctgcagcagctagcttgatggggatcagattgtcgtttcccgccttcagtttaaactatcaagagagggaggagagggttggagaaggaaaggaaaaaaaatgaaggaggagaaagggtgggtggcggaagaagaaaagggtggggggagtatgagtatgatggtcaatatggagaaaaagaaagagtaattaccaatttttttcaattcaaaaatgtagatgtccgcagcgttattata

SEQ ID NO: 29470 - DNA, 908 bp, Heterodera glycines
ctcaagccgaagcccgtgctgtctggccatcgtgcgcatgttttccagcttggccgactcggtcaacgaaaagggccacggtttgtcgggaaattcggcggacactgacgcagcagccgcaacagccatctgaaaaatggggacccaaattaagcgaagttaaatcattttaaagtcgctgaaattccgtccgatttcactcgccacgacggaatgaatcgccgggcagcaaaatcgattaatttatgtgcatcactcgcctccgtcagtgctctttgctcggccatcattcgcaactgtttgggcggtttatggggcgaggagccgccgccgccctttccgccggacgcacttttgtcgccgctgtgcattttgtggccgttgataattggcaacggcgtcgccttgcgccgtgccaacgggcccaacaagtcgtactcaattttccgtctgaaaataaatggttggtcaaatgcgcaacggcacttttgctggactgtcaaatttgtgccccccaccgattgattgtttcgacgacacccaactttttttttacgtgttatatgtatatgaactgtctaacttctcgctgtctgcactcctacataaatacaacaacaacaacaaaaaagtgttggctttttaccgattgttctgggggtgtgcgttggtttcaactcggtataaatcccgagtttccctctccccccccccatttggctgtgcgcttcactcgcctgcccgagtgatcatgtgtgccgcattcgtacagttcgatgagtccgctgtccgcgtgttggaacgaaaacatttggaagccgcactttgtccgtttccacgtgttgcaccggtagcgcaccttcaccccattcttcagctgctcagtgcgtcgtttggacactttctct

SEQ ID NO: 29471 - DNA, 491 bp, Heterodera glycines
  unsure (1)..(491): unsure at all n locations
tttttagtgctaaagtcatttataaataaatgttcagagaagtgttttttgttcctctcatataataaaataatgcaaaaatatataaaaattcaaataaattgttcgaatttgaattttagaaattttcttatgaaatttttacttttctttttggacaaagcgaaaggaccgacgaaaatggcactgccgaggccccaccatccccaaatggcactgacgatttttttaatttatttttacattgaaaatccacgcactaccagccaacatttattaacgtgtcactatgtgtaagcataaattgccaataaatataaagccatatttccgtttgtttccctaatatggtattagttgccttaagaaaatattaacaaaatttaatagacaaacggaagcaataaaaattaataattaaattaattaaacgcgtttaaaagcataaattaattttattgccattnntcctttcaagcgaacatttattt

SEQ ID NO: 29472 - DNA, 1249 bp, Heterodera glycines
tataatttcatgaaataagacactaaatgtatagagaatgaattaacgtggtcgattggaataatgaaaaaaaaagcaaagtcaaaacacaaaaccttaaagcactagccgattgaaataaatggaaaaaaaagcaaagtcaaagacaaaaccttaaagcactagccgattgaaataaatggacaaaaaagcaaagtcaaagacaaaaccttaaagcactagccgattgaaataaatggaaaaaaagcaaagtcaaagacaaaaccttaaagcactagccgaagcaaagtcaaagacaaaaccttaaagcactagccgattgaaataaatggaaaaaaaagcaaagtcaaagacaaaaccttaaagcactagccgaagcaaagtcaaagacaaaaccttaaagcactagccgattgaaataaatggaaaaaaaagcaaagtcaaaacacaaaaccttaaagcactagccgattgaaataaatggacaaaaaagcaaagtcaaagacaaaaccttaaagcactagccgattgaaataaatggaaaaaaaagcaaagtcaaagacaaaaccttaaagcactagccgattgaaataaatggaaaaaaaagcaaagtcaaagacaaaataggaactttatacaaatttaaaaaagtaatattttgtatattgtatatgcatttaatcaaatttctactttctttataaatgttagctaattagtcagcgtctatttattttctgtaaaaatttgcctctttatttaaaattaaattaatataatttcatgaaataagacactaaatgtatagagaatgaattaacgtggtcgattggaataaatggaaaaaaaagcaaagtcaaaacacaaaaccttaaagcactagccgattgaaataaatggaaaaaaaagcaaagtcaaagacaaaaccttaaagcactagccgattgaaataaatggaaaaaaaagcaaagtcaaagacaaaaccttaaagcactagccgattgaaataaatggaaaaaaaagcaaagtcaaaacacaaaaccttaaagcactagccgattgaaataaatggaaaaaaaagcaaagtcaaaacacaaaaccctaaagcactagccgattgaaataaatggaaaaaaaagcaaagtcaagaacttattctacctaatttcatggtgactgacgaggcatttgactcccttaagagagcattcccttctcatgtacttgtacctaaaatgttgttggcaca

SEQ ID NO: 29473 - DNA, 1433 bp, Heterodera glycines
tcatctttccaccgggatttttggggtcactgatccgtgataatgacccccccccctccccgaaaaatgtgttacacggtttcaactcagaattctttttcaataactgatttctccacaattaaggcagatactgaacatcccgctgctgctgctgttgtggacaactttgagacgctcactctccgcttcttcgacctgatcaacgatggcaacatccaacaattgcgtgtgctgatcgattcgctggatgccgacgagctgaacattttgctgtggtggacggttgatccagtggagcgcgacaacacccgatcacgatcagctctttggactgccttcttacgccaacacatccaaattgttgatctcttggtagtgaatgaacaattttatccgtcggcactaatttttgtatgtcattttcagttggagaagggcgccgatccggatgagccagtggctgaccaagtgaacaacataaacacgagtgagtgggtgtggtgttgatgatgatgaaatcgtttttacaatgcatctaatttggtccctggatttggctcggaattggtcgaaacggataccggaaaataattatatttttgctttccctgaaaataatggtgtttccccatttgtgcagatatgacgcctcttttccttgctgtccgccatgccaatttgccgctgtgccgtgtgctggtcgcgcgtggtgccaacattgacttgggcacggactttgccacaacgccgctgatgcacgcttgcaaaagatcgcaaacggaaattggtagagagacgaaattttgaaaaaatgcgtaatttttccccgtcttttttccccccacagtcacatttcttgtcgagaatggtgccaacatcaatctgcagaatggtgatggggcaacagcactgatgtacgcgtgttacacgggaaatgtagggaaaaatttccattggtgaaatgttttcctacatttttccatttgaattcaggtggacattgtgcgcttgttgctgacacatggtgcaaatgtcgagcaaatggatttcgaaggtgggggattactgttacagtacccaaaaataccatgccacaaattttgtctctaattttcaggatactttccgcttattgacgcagccgttggcggcagtttggaggtgtgccgtctgctggtggaagagtgggccgcagatgtcaaccaacaaaccatccaagagcgatacactccagtgatttgcgctgccagtaaaggacatttggccatcggtgggagagaattgtggcaaagtgccaaaaatgtaatctccctaattttcagtgaatttcctcgtcgaacatggcgccgaccttcaacatgttgacgtggacggacacaatgctttgatgtaggcagtgaagtttgggaagattgaaatggcgcggcatt

SEQ ID NO: 29474 - DNA, 1952 bp, Heterodera glycines
  unsure (1)..(1952): unsure at all n locations
tgtaaaaaacngataccggtactgtatgcattaaatgtacgattacttatttctcccaaaaatgttaaaaatgatcacggaggcgaaaaatacgaaatttgataatatatttaatgatttaaatgtttacaattnaatgcaattttttaatgcaatgctattntgcaaaatgttctgatttntggccccaaaatctgatattttttttggggctcgatgttctgttttgaaaatttttctaaccgcaccctgcgcgtacccccccccccccctctggtaccatctttggtcaaagctcaaaaatttttgaaattttccaacctatagtataccactcgatagagcttcaatagctctaaaattttgttcagattgatctttcgctttttctgtaataaaatggtttattgcttttttgggtcttcggtttttcgggtttttaaccgaaaccgaccgaccgagaaatttttgagtttttcggtttcggtttttaaccgaaactgaccgaccgaccctcttgtccggtctctaattttcaaatgatgcaaaaccaatggaaaagtatccggacaaatacatcaagtcagagcaggtcgtccccccccgtgtcgtttcctcccagaaaaataaaaatttgaaacctagaaatcttaaaaaaaattcttaggaattttttcataagaaatttcaaaaatttctttttttttgaaaaatattcagcgattttttctaaataataaattttttttacaaatttttcaaaaaaaaaatagctgaaaaatcaaggaaataagcggaagaaagagagctcagctgcaacagtgctgttccgggtcacccgaatcctgacatttttcttttcagaacaatcatgagctgcaattttatcatctttttgctgatttcatggaatcaatgatgcttttttgagatgatggatgatttgctgatttttaagaaaatttgctaattttttgaaaaaatcaacaaaaaatagaaattttttttctaatattttagcattaaaataaaaaagagtatcaaacaagacaaaaaaaaaaattgacggaattttctcttttttactaacaatttaaaaaaaacaaaatgttgctcaatatcgcaaattttttttggacaaaattgacgaactttaaacacccgccccctttttcgggcccgcattttatgttccgggtttcctccattcgtccaatcaaatcacccacacccacccgttcaaattcaaaaagacgtccggtgaaaaaacaataaaaattatttaaatttgtatgtcgtgtcttatcgaaaaaactgaaatcaagaaattctttttaaaatgtagggaaagaaatccagaaatgtgagtgctcaatttcagcacagtcaatgaaaatcaatcagaatccgaattcggattcagaagtttacagttttagagtaacaaaggacaaacagaaaaggtgacaatttttggtttagaaattatagcaaattaataagaagaataataaagtggaatgggcgggccaatttgactccttaaataaggatttttaaatgaaatacctatgcaaatttgtcatgcaatttcaaatttattttggcgttttgttttatagaattgaaaattacgaaaggcggagggttattcttcaatttgatgcttttgcaaaagttttgttagttttccgatttcacataggcatttgtttaactcgttttccttcacaaaaccccttaacttttanaattttacttatctaattttgtccaaataaatgtcataaaatgtgccactttcatatgcctacataattcttttttaaaaatacttgaaaaatttaacttttttcacganaaagtaccgaattttctggtgctntttactcatgtccccatctttttctctttgtaaaatttattttttttatgaatctttgaaggaaaaa

SEQ ID NO: 29475 - DNA, 1009 bp, Heterodera glycines
aaacaaaaaagaaaaaaaaattttttttttttttttttggtgagttcttaaactggaaagccccaaattaaacccaattgttcaaaaagaaagagccaatttgataatggaaatccctttcttttcttcggtatattcgtttgtttttttgttcattttccctttcgattttttccgcttttccctcattttttgccattttctttcgtccgttgtcccaactgatagcccaaagaatggcgccgttttttgctttgcattcgaatggcacaaaaaaggacgagcagaatcaaagccaacagcaaaaggagaaggaaaagcaaccaaaaccaacgaatttcggattggcgtaatgcctaaaagtgccaaagttggaaaatattcgaattccaaaggcacccacttccgggaacaatggccaaaagttggtgtcccaccaaccgccggcttctctttctttgatctgttccactcgaaaggacggggcaccaagtcgtctaccgtactcgtccagcatgtacagtaagcctccggtgtaatcgcttcgagagaaaaattgcgcttctgacaaattaaaagtgcaaaaattttgcaataatttaatcggtgtaattaattagtgttatccatgattttaatttgatttaataagtggaaattgaaattttcttattatgctttacgcgctgtctgcgacacgttcaaaatgaattgggcgtccaatttcgtcgctgcccatccgcccgtactcgtgcgaatcggaaaaaatgacggaaaattacgcaaccgattgaacaattaattcaattggagcaccgtttaccgaactgtcgttgatgggcaacacaatgagcacgtcgtccgcgcattggacccgctggagccgatttcgcaattcgttggccgaaaatggcgggcaaaatgggcgcccgctaatcgaattttttgcaatatttaaatatgggttagacagaggcttcttttaatcccgaatcctatgacacctatt

SEQ ID NO: 29476 - DNA, 1365 bp, Heterodera glycines
  unsure (1)..(1365): unsure at all n locations
ctgcatgcctatncggcaccaccngggcccacatatatcatatttttaaaaaaattttaaccaaaaatggcaattatttgtcattttggcgcaaaaccactacaaattctggttgttttgctcctgcgctgaaatttttgaaaaataaactggtgaaaaatttatgacccgaagagtgaaaaaaagtcttctggttcccccaccccgctccgaaattttttttctgcctacgggcctgcaaatatgtgataaaaatccgaaaagtgcgaaattctggaaactgacgacaaatgcaaaaaaagtcaaaaacaggtcatttttaaaaatgcttaaattgatattaaaaatcttttttgttaatcagggacagataatcttttgcttaaatttaagctttgatcttaattgatgaaattttggattgttactattttggatgggtaggacttagtatttgataaaagaaagattacagtcatagctagggatgccaattttatgtacatatatattttttcctggcttctccatgctctaaatagtaggaaaaacactttcttttttgtgtttgcgaacaaaaattgggacttttatttacatatttttacatatttcgagattttatacatatttggtacatattttggactttttcggactttttcatacattttttttacatattttaaggattttttacagaaattttcggaaattctcaaaaacaaaaaaatccaaaatttcggcaaatttttcgtacatattttcataattttattacatattttgagaatttttgaaaatttataaaatttctagtgaaaaataaaaattaaccaaactaatttttaaaatactaaaatgtgattctaggcctatttaggtcatttttatggcatttagggattttttttacatatttatctacatattttgaccactttttgtacatattgtatttttgacatccctagtcatagctggctggcattacggtgtttttcctttgactttttttttcaaatttttaaggcccgttggcattgtgtcagtcttctcaatgtgcttctttttgttcgcgttcagcgccatggagcttaatgagcatttgtcatttgaacggtacgcgctcaaccagctgttgttcacctacggcaaaacgttgggcttttgcaatgtgtgttcaaaaaaacaacagaaacaaattaaaaataagaagaccaatataacaatttaaatgtattggaagtgccatatttatatacattttcaattatagccaattttggatcttttcataataattatttaaaattgttgtatgaaaaagtttaaaaaattgaatttataaattagttttcgtga

SEQ ID NO: 29477 - DNA, 949 bp, Heterodera glycines
  unsure (1)..(949): unsure at all n locations
aaaaggccatggggacgcatttaagttctttgggacgcataaaaaaaaggccatgggacgcataaaagttctttgggacgcataaaaaaaaggccatgggacgcataaaaggccatgggacgcataaaagttctttgggacgcataaaaaaaaggccatgggacgcataaaagttctttgggacgcataaaaaaaaggccatgggacgcataaaagttctttgggacgcataaaaaaaaggccatgggacgcataaaagttctttgggacgcataaaaaaaaggccatgggacgcataaaaggccatgggacgcataaaagttctttgggacgcataaaaaaaaggccatgggacgcataaaagttctttgggacgcataaaaaaaaggccatgggacgcataaaagttctttgggacgcataaaaggccatgggacgcataaaagttctttgggacgcataaaaaaaaggccatgggacgcataaaagttctttgggacgcataaaaaaaaggccatgggacgcataaaagttctttgggacgcataaaaaaaaggccatgggacgcataaaagttctttgggacgcataaaaaaaaggccatgggacgcataaaaggccatgggacgcataaaagttctttgggacgcataaaaaaaaggccatgggacgcataaaagttctttgggacgcataaaaaaaaggccatgggacgcataaaaggccatgggacgcataaaagttctttgggacgcataaaaaaaaggccatgggacgcantaaaggccatgggacgcataaaaagtctttgggacgcataaaaaaaaggccatgggacgcataaaaggccatggggacgcataaaagttctttgggacgcataaaaaaaaggcatgggacgcataaaagtcctttgcgacgcataaaaaaaagccatgggacgcataaa

SEQ ID NO: 29478 - DNA, 925 bp, Heterodera glycines
agtgagtggggattggcataggacaaatggacaatgaaatgagtaagtggattggcaagggacaaatggacaaagacagtgagtaagtgggattggcataggacaaatggacaagaaaagtgagtaagtgggattggcaagggccaaatggacaaagacagtgagtaagtgggattgggcaagggacaaatggcaaaagacagtgagtgagtgggattggcaagggacaaatggcataggacaaatggacaaagacagtgagtgggtgggattggcaagggacaaatggcataggacaaatggacaaagacagtgagtgagtgggattggcaagggacaaatggacaaagacagtgagtgagtgggattggcaagggacaaatggcataggacaaatggacaaagacagtgagtgagtgggattggcaagggacaaatggacaaagacagtgaatgagtgggattggcaagggacaaatggcataggacaaatggacaaagacagtgagtgattgggattggcaagggacaaatggacaaagacagtgagtgaatgggattggcaagggacaaatggacaatgaaagtgagtaagtgggattggcaagggacaaatggacaaagacagtgagtgagtgggattggcaagggacaaatggacaaagacagtgagtgagtgggattggcaagggacaaatggacagagacagtgagtgagtgggattggaaagggacaaatggacaaagacagtgagtgagtgggattggaaagggacaaatggacaaagacagtgaagtgagtgggattggcaagggacaaatggacaaagacagtgagtgagtgagattggctaaggacaaatggacaaagacagtgagtgagtgggattggaaaagggacaaatgtacaaagacagtgagtgag

SEQ ID NO: 29479 - DNA, 1081 bp, Heterodera glycines
  unsure (1)..(1081): unsure at all n locations
acatacgatgtcctgtaagagccgttgtcaccaatgtgaaaaagttactaatttaatccaacaaattaatttgatatttcctacagttggaccgcaatatccttgcataagagtgcaaggtgtctgtctacactgtcaacaatgcaaacgatttttcttctctcaagctgctttgatggtcatcgtccgcagatgtgcaacttgattaaacgttgcgatgaatgtaacagaacttttcaagtggatagaaaaaatccccacaaatgttacagcaactattgtgcgcgatgcaaggtattttttctctatttatttattaataactcctccaaaaaacacaggtataccatgagaaggaaggcgcgtgcttcatcaaacccattgtggtgcctgacgaaaagccaaaataccgtatggtctgctgggacacagagacccgattggagcaactgcaacaggcgggacaacagcgacacaaggtcaactacctgtcagcacgaattacctgtacggagtgctgtgattctgaaaatggtatgcgactcaattgtaaaatttgtttgacaacctacggagcgatggaacgaacaaaggattggagcgaatcggaaggacatgagccaatttcggcatttgtcgagtggattttgaaggcttgggacaacaaataccaaacatttatttgggtgagtttgtgatcgtttttaacatctttgttatgcaaaaataattataggcacacaatgcctcgaggtttgatggccattttgtgctaaaatacctcggcgagacaaagcgacgacctgaggtcatcatgaatggcctcaaaatttttgagtttcgtcttcaacattctcggcgccactcaaaactcacatggcgagactcgtgcctactgatgccaattcgtctggaagaaatgccgaaaacattcaatctcaactgtgccgataaaccattcttcccctacgctttcaaccgaaggttagtatgcccaaatgagggtaaatttaattattatatnttctagagaaaattacacgtgcatcttcacatttgcgggacaaggaggattactgcc

SEQ ID NO: 29480 - DNA, 1803 bp, Heterodera glycines
aaaaaaatagtttcattactcattttttacgaaaccaattttgtatttgatctttctttatacttgaaaaactttctattgaaatataacatttataaatcacgggggattagcaggacaaaacatcgtcgaccgaaacgtagtcgaatgaatttttggaccatttcttttttctttctcaaccaaattaaacattcttgctgttattcgaaagaatttgaaaaacgctattaaattgcaaattttcaaaaattttattcatacgggtaaaatttgattgacaatgaacaaagtattggttcaataagtctgcaccgttcacggggtggggggtgagaccaaaaatcctgtcctgcccacgttcccctggacgggggcggggagatttcgaaccctagttctaacaactgcgaaattattgacaattttcaagaaagaatttattgaacgaaaattattatgcttccgtgaaagatgatgctgaggctatttaatatctgagtgtaatctgtttttatcaattattttatttattgcttttgtttgatattttttatgttttaagcttctcattactcaaaaccaaaacacttgcgaaatcaaatgatttcttttgtattcgtatttagttttctttattggagctccagttaactgtttcggtcctccggtttaaatttgtttataagtttaataattaaaaataaatgtttttatatgtataatatagaattatttttaataatttttctgccatcattcatttatttaaattaacttattttcatgtgcggattaaagcattgccaattccgataaattaattacatagtgattaatttagaagccattattattttagggatttttttcagaaaaagtgttttcttttaaatatcatattcattaaacaatgaattaagttaagatttatatttatatcaatttgtcttataattacttttaagcatttattttttcttgtcaatttcatttcattagttgttttgttctaattttcgattttaccatttaataaattttgaatattttaaaacactattttatttttacaatttttatattataaattttatatgcctttttgaattctttataaacatctttttaatttcagtatcgtgaggatggaaattagtttcaatcaaaaaatcacacgtgtatttagtcacaaaacacataattcgcattgagttctattataatttctcgaacctcttgcctctcacctattagtactcatcaagtgattttctgtataagtcatcgagagtacgcattcataaaattgtggaggactttcatccgctttgcggcctcaggacggacgcctagcccccgttttcaaactttgtagggaaattaggacgcttcgcggcctcaggacgggcgcttcgcgcccgttttttaatttttttgggggatattcggccgcttcgcggcctcaggacgggcgcttcccgttttttaattttgtggggaacattcggccgcttcgcggccttaggacgtgcgcttcgcgcccgtttttaaattttttaagggacattcgaccgcttcgcggcctcaggacgggcgcttcgcgcccgttttcaaactttgtagggaaattaggacgcttcgcggcatcaggacgtgcgcttcgcgcccgttttttaattttttaagggacattcgaccgcttcgctgcctcaggacgggcgcttcgcgcccatttttagactttgtggggccaaacgggcgcttcgcgcccgttttgtaatttttttggggacattcggc

SEQ ID NO: 29481 - DNA, 1045 bp, Heterodera glycines
aaaaaatcgatttatttttgttttcggggcagtcacgccgaaccgatgcgcccagatttatggggagaccgaatccttcgggaatagcttccctatagcctgtactttaattctgcgttggatttttgctccccataattgtttgagtaccccaaacgggacacttgaaaaaatcgatttttttgttttcggggcagtccccccgagccgatgcgcccagatttatggggagaccgaatccttccggaatagcttccctatagcctgtactttaattctgcgttggatttttgctccccataattgtttgagtaccccaaacggacacttgaaaaaatcgatttttttgttttcggggcagtccccccgaaccgatgcgcccagatttatggggagaccgaatccttccggaatagcttccctatagcctgtactttaattctgcgttggatttttgctccccataattgtttgagtaccccaaacggacacttgaaaaaatcgatttttttgttttcggggcagtccccccgaaccgatgcgcccagatttatggggagaccgaatccttcgggaatagcttccctatagcctgtactttaattctgcgttggatttttgctccccataaatgtttgagtaccccaaacggacacttgaaaaaatcgatttttttgttttcggggcagtccccccgaaccgatgcgcccagatttatggggagaccgaatccttcgggaatagcttccctatagcctgtactttaattctgcgttggatttttgctccccataaatgtttgagtaccccaaacggacacttgaaaaaatcgatttttttgtttcataaatatttttttcagaaagtgctctaaagcgcaccaaattttatttacaacttaattctagcactctgatgctttagtatcaaaaaggaagatggagaaaaaaattttaaaaaatttttccttatattttggttatatcgttttgcttttggtggggtgcttggaacagtggaatcatgcgcacccgtccgatctggc

SEQ ID NO: 29482 - DNA, 1032 bp, Heterodera glycines
  unsure (1)..(1032): unsure at all n locations
aaacttaggagatttatggggtagagaaacctacgtgacatgaactaatattattaaaattggttatgggaaaaattattgttagatagtttcttaattttaccactatggacgttaaattaaaaatctaaactaaatgtctcacgtataaaaataattttgttttagccctttccccaaatggccggcctattcattcattgtttgctttgcttttctgtggctatttcaatgggttggacggacggacatgtgtaagctttatattgacctcgtgttaagaatgaataatgctgacgggggaacaaaaaaaagccgaaaagatacgacaaaatattttatttgccccgcggggagggcggcacatttttcgcgggcggcggaaaagcgttggcaattcaattggtaattttgtcgcccgaggggttttaagctgcttcctgttgttgatgtatacacacacatataaatgtacattcagcagaaagagaaatgtaattcaaaagttccatcccatccgcggtttgttgaaagcgaaatttgacacattgaacagcgaacatcacaagtcgcgttaatgtgtggggatgtccggaaaatggatcagcggataatccgtcaataaaattctttttttattattaaaaatgcgagatattgcaaggaagaagctgactgagtggttaaaaagcggaaagcggtgggttgataagatcccaaagaaaaagccggaagtgcatcattagctcaatggtagagttacgcaaggatttggtggaggagtgggttcaattcccacccgaggctttacattatatccatttcttagtatattatgaagagaaggactatacttaatagcaggctgtgttaaaaattcttggacactttcagaaaacaaaaaggcaatggcgttgtatgtatagaaaaacgccanatgtnggattaagcgtggactanaaaaaggaataanataaaaaatacaaaataacccatattaacccaaaatatattttanaaaacatattttaa

SEQ ID NO: 29483 - DNA, 1565 bp, Heterodera glycines
aggccgcgaagcggccgagtgagtaccttcggtgcaggaaaattattaaattttaaaaattttttagttgctttttaaatatgccaaaaaatgtaggcttaacttttttagtgaaaattcgatcactcatattttttgctaattgagcagaagcgtaccaaactttgcagggatactccccggtaaaggactaacttacactgaaatgagcgccgagctagctggctcaaaaaaattttcgaaaatctgagtctttcgtttttatttattttttgcaaaattaattcttaaatattttttcagaaagggttctgaaacgcaccaaattttatttacatgttagtttaggcactctgatgctttttctatcaaaaagggagatgaataaaatttttaaaaatttttaattcctttttaaacaggccaaaaagtttaggcttaacttttttttcagaaactgatcagaagcgcaccaaactttgcaggaatactgaaaggaagagaaataacctattttaaatattatctagtcagttcatttaaataatttttatccaaaaaatttttttttgggttttcggggcagtccccctgaaccgatgcgcccagatttatggggaggccgaatcaagacggaaaaggttccctatagcctgtactgaaattctgcgttggatttttggtcaccataaatgttagagtaccccaaagcaggcacaaagaaaaaatcgattggtttgattcataaatattttgtcagaaagtgctctaaagcactccaactcatacttgccgcttcaacctcagcctttcccttcttcctccccctttcccttcttcctccccctttcccttcttcctccccctttcccttcttcctccccctttcccttcttcctccccctttcccttcttcctccccctttccctcattacccctctctttactcccctttcgcccttttatgtccctattctcccccccccccttcctcctcctttccgccttatttttcccctttcccccgttgcccctctctttctcctcttttcccttcccccccccgttttccctctttttcctttatttttcttttattcttgtgatggcggtcctttgatcaaaatctaacaaataagcgatcggacggtggacttttattggatttgttcgttgatgcgcgaattggcgagagacaacagcaaaagtcgggagggggggggagacagtgattgggccaacagatcgacgaacggctgattggttctgctgatgcgtttatttctcttaaattaattgcccctttttctgtccatttaaaataatgtcaaagcgcaaaaacactttttaatgtcccattaatggtggactattttaatggttttcacttttacttatttatttgttcatgccgttttattttttcttttgaattattttcggatgccatcgatggaacgaaataaaaatggtagcgatttattggcggaaagtggcggaaaaacgagacggaagactaggtcgttgctgggccgttttgtggccaacaaagagcagtcgaatt

SEQ ID NO: 29484 - DNA, 1891 bp, Heterodera glycines
aagatattcaattttttacaaatatttgatttttcatgccatcggtttttttaaatattgcttcgctataaattattctccggatcagaatattattataaagaattcaaatttatcttcatgtttttaattttgataaagaattttcttcatttttttatctgatagatttatttcgctgccggtagcaatttaaaatgtttgttttaatattaaaacatttaattattattataaaattgatgtgcaattaaaaatatatttacatatgattgttttattatttttattttaagcaatttgataaattgtgtttttttatttataattttctatttaattatggttagcatctaattaaagttttctatttaataaatttttttatataagtaattttttgaaagcttaagataaaaaatctttttttaattgaaattatttctaattttcattatttattttatatttccactttttttcctcttttttttaaatcaataaattaatctttatttttttaagcttgttgtttctcaaaatattatttaaatctgatcggctttaaatagtttattattgaaatctttttttttcaattagattatcattaattatatttaaagctttaatcgtagaaaattggatattttttctgatttaaactgtcaagatccaagaaattgtttttgtagctaaaggagcagaaaattttgatataaaaattgttgagaagatttaaaagaaattaaatataaaatgaatttatatgcaatttataaatagaatttaaataactattcttcataggtatctatattttctataggaaattataatttaaaatatcttctttataaatattttattcaaatttaaattattttcttacttttgccataattttacatgtagaaatattaaaagttaattaataaaattatgatcttttctctcactgaaaatgcctagagtttaatttatgagattccatattattgtatttctaaattattctaaaattacattcattgatgattaaatatttttaataccaatattttattatattttataaaaaaaatttcaaaaaattatatttctttataattaatattatttgtttttcttaaaatttttactgaatatttggctattttgtctattggattttttgcatatttttagtattaaattaatttattcattacattttttgttacaaattgtttatcatttaaaaatattatcgctttgttttattaaatattttcgatgatatgacattactcaaaaaaccatcttggaactgtcctaattttgacctcacactattgcagaatttgttttcaaaatattttgacaacaacagggcagttaagttggttttgattaatttatgatgcaacgtttaataaagagttatcatataaaacacttatttgttaaagaaaagtaaagtttagataaatttactgaaaatcaaatgtttataataagaataaataatagttggaaaaagaataagtaaacagaaatggtaaagcagattttcttacataaaaattaataagtaataactggaaattaaatttattaggaggccaaataaagccgaaataatttgcatataaataaatacagattaacttagtaatactcctacgaaacagataaatggtttataattcaccaaattaataagctttttcataaaaaattttgcattaataattaatttattgaatgaaagcaactaaattaaaataattataaatttttcgttaaaatataattttattattcatgcgtaaccataattaaaagctaataaaaaacgcatatgctccatggcaaaattttaaggtttaaatttattttcccggtttaa

SEQ ID NO: 29485 - DNA, 982 bp, Heterodera glycines
  unsure (1)..(982): unsure at all n locations
gcctcccctctcataactctctctgacctttacacttatataaaataaaaatttcaaaaaactcacaattttcagacacccaatggcattggcagtttcttggcattttgccaagtccttttgttcgtggtgttgccgcgcaagccggaccaacgggcgcccatcctgcgactgatcagttttgtgcgcaactcgtgctgcagttgctgcgccgacaacacgttggacctggagtccgctgcaggtgcaagccttaaaaatttatccttgtattttcaatttcaaggacgtccttaaaaaactcaaaatattaacagcatttttgcgatctaaacgggtttgatttctccttgaaaaaggaagcataaaacctattaaatttagaattaaaaattcgtccttgaatattgaataatggaatttaatttttttcccaaaataatgccaaaaaacaacaaatttttcagtggtgacagcggacaagaagtgcagtgccattgacaccattggcattcatcggatgtccagcagaatgagcaacaaacaccgttggtccagccgcatgatcaccaatgttgtgggcgagatggaaaatgtcatccaaaaagtgcacggagaccagtatggaaataaataattttcaaatttgaattaatttaattaaaatttatttatgccaactgtcctgggtttaattaaacttattaaaattatctaaccttcaaaattcaaaaaaaaaaaaaaagaaaattcaggactcttaaaaatattggttaatttcattgngttcagcgtttaaattcaaatgctaaatttttacggcaacataaaatcctcattttgccacagtttcaataaaaaataaaatattttaaattaaaaaaaaataaaaataaattcatccattcctttatccgctcattttaannnnccatgctaggaagttatctcatttctagactctcgaaaattagttgaattt

SEQ ID NO: 29486 - DNA, 1012 bp, Heterodera glycines
aatacgaaccaatcatcaggcataagaaaacgctcacacaaacaataggcatgacaagatataaacaactactagtttaggtccagcagaagagtgattgagaggaaaggggcactctccaaaaggaaggaacagcgagtaaaagggggttaagggaaatcggaaagggttgcgaggaagtgtcaaaaaatgaagtcctccttcgccatgtcgagagcccagcggaatttgtcgcgttgcgttttgctgaatattttctcaacgggcacgtcattctttttgcaccatgcaaccgaaatcctgaaattttttttggacatagtaaattggaatattcgatagaaccaacctcggatccaagtagttcagttttgaggttcccagtgcaatttgtttgttttcatcctgaaatcaaaaatgaccaatctttgctgttcccgattcgttgatttgaagggtgacttatttccccgaaaaatcaaattccaaatttgttcggaatttttgccaacccttccttccccctgccttgtccgtgcgctgtgtgttcagtttggcgatctgttccttcaatctttcgtatttttttgccattttctcgtccaccgatttgctcttcttcagctgatccttcaactccttgtactcctgcttcttctcttttatctgaattttgcttaggatttgcgtttccgtttcatgtcatattcactttattctccaaattttccatcgacttttcgtgcgtttttggcactgccctttgatggttacaaaggatggccacctgacgatttgcacctgaatttaggcaatataagtgaaatgcctctgaaccagtggctttacgattgtaggaaagcattttctcgtggacggaatcggaagctgaaatttcggaattaatttggcaattaaaaatgagttggatacgatttgtcagtttgtccagctgttcttggagagtgatcgacgcgttatacgtacgaaacactttcgcggtcagtccgtc

SEQ ID NO: 29487 - DNA, 591 bp, Heterodera glycines
tagtatgggctcaaaattctgcgcctcctcgcggtgagtccggaaacagagttaatttttaaaatattaattaattttttttgcaatggaattaactctggctaaagcagacgtaattttgtttaattttgtggcttagaattaaattttataatttttttttgttttattgaaatccccaaatgtcgggtccctaaatgtcgggttgccaaatgtccgtggttttcttaagtgtcttttgctcaaatgtcgttcggtccccaaatgtcgggtccccaaatgtcgggtccccaagttgcaaatcccaaaaagtcgggtagcctatataaccactgtgaaataacattctggcttatggtgctgacagtcagtcttctgtctatgggcggcctttggcctctgaccgcctcattcaatgggatatcaagaaaagcaaaaaggaagcgattccttttttgcctgaaggaaagaaatgaagaaaatcgaatgcgaagaaaaagaaaatcaaataacatttgcatacacagagaaagaatgtgcaaacgggtagagcccaacccaacagccctttctttcgctcacttcccctgg

SEQ ID NO: 29488 - DNA, 954 bp, Heterodera glycines
cgtcctgaggccgcgaagcggccgaatgttgccttcaaaattaataaacgtacgcaaagcgcccgtctgaggccgcgaagcggccaaatgagtccacaatatttagaagcgcaaagcgcccgtctgaggccgcgaagcggccaaatgagtccacaatatttagaagcgcaaagtgcccgtctgaggccgcgaagcggccaaatgagtccaaaatatttagaagcgcaaagcgcccgtctgaggccgcgaagcggcaaaatgagtccacaatatttagaagcgcaaagcgcccgtctgagtccgcgaagcggccaaattaaaccttaaatataaaaagggtgcggagcgccctttgaggccgcgaagcggccgaaagtcctccacaaaattatgaatgcgtcctcgcgatacctatataccaaaatcccttatcacatccataaattcatttcaaaaccgcgcatgcactagcaacgaagtcctttgcgcgaagcgctcatgtcagcgcccgtccatacatataaaaagcatactgcctacacaccgagcaatcactgtgcaaagcatactgtctacaccgagcaattactgcgccacccgctagtccggtggccaactgagtaccagggaccgatttctcacttttgcttgcgtttgaaggcccataactttttttctaaaactctgatcaaaaaatgcccgctgcgagggcaccccgccaaagggtcctctacatgctggtattttttattttattaatagagccaccccctggcctgcagaaaatggcaactgaagcgtgctcaaaaagtacacttcagtaccaggctaataccgcgtcggcgtttgatctgagagaaaagtgcccagcagacttattgtagagttttggaagctcgattttctgaaatttaaaaatttcgaaaattttcaaaatttttcgaagctaggcct

SEQ ID NO: 29489 - DNA, 862 bp, Heterodera glycines
ctaagttcgaataagtgcgttaaaacgcaaaattttcgaacaaaaaatatgtttttcgtgcatttctcgtcgagttaaagccgcagaaaaaataagcaaaaacttaaaaatcctcaccctattgattggatgcgtaaaaaccgattgaacgcgtaaattgcagtataggtagccgaattgttttttcctttatcgatatgcatagtgcaattgtatactcagaaaaaaaatatatttatgatcaaatatattcggttttccctattagcagcagatataaattaattagtacgccaaaatgagggtgtttttctctatttatttgttcgtttttcggatggtgtgtcatgaaaagaaatgcattttattattaaataaatttcataaactgcttctcctctctctctgtctccttcattttgtgctcccatttcgtcattctccgcatggaccgcgggaaggggtggaaggtacaaagtccatcgtcgatgagacgaagtggcgaaggaaatgtgaggggggggggggaagaggaaaaggatgcgcgacgaaaggagaggtcgttaaagtgagaaagaattggcgatattgttgacaaatgtgaagaaaatgctgggaatggatggggatattaaggagccctgcgaaagtgtctgttgccaatacgcattgatctttgctctgcgcatgatcattgatcacttatcagtagggtgtggatttttaggggcgaaaaattccaatttagggacctaaataggggcaaaaaattcgcgaaataggggcgaaggtcgcttcttaagggtgtattttttcttttttattgcattcttgttaataaaattccgaaaaaatcgcgaaa

SEQ ID NO: 29490 - DNA, 1291 bp, Heterodera glycines
tcactaaaagtcgcgaccctattaatcaccgattccaaagattgcaaattgggccaaaactttgaggatcattttgtgtgtggaagatgacagcaatcttctgatcattttagcaaaaaatgaaccaatgattaataagaatcttaaattaatattaaaaatatatgtttttgttttcaagggtttttcaaataaatgacaattttaatggttttctcattaattggttctaattattttgtagtttatgcacttatgagaattaattaaataaattttatccgttaaatcatttaaacgaaaagaacaaaatttaattgagctaatcgttcatcatttaagcggtttgtcgatcataaatgattgtatatcgatcacagtttgtcagtcgattaagccgaatgctttataataaatatggattgattggtgaggaatgctaataacaaaaacgactaatgactaataaatgagtcaacttttacatcgattaaggataaataatgagcttttttataaaaggcattaaacgacggacattttgtggacgagtgaaaagggaacgaaatgatttaatttgttgactataaaaaatgtgtggcggcgatggaatggggcggtgcgattgaactacgcgatgaaattggtgaaatttggatggaaaagaaaataaaattgtcaaagcgtaccaaccccaaaaaatcaaaaattattttatgggggcggccgaaatgcgcgagaagacgaagaaaaaaagaaataaataacctgttgatgggggaagggtgttcattggtgcccgaacatacccatcactcgagaatctcgccgagcacgtaaaatgatttcgccaaaggttttatcacatcagaaaatgcgcaaactcgcgcgtcatttcaaatttcaaggtccaaattgaaaggaaaatagcactgataatgatcaattaagtagttaatcacctaattaactgaacggtggggccatcaaatgaaacgaatgcgtgtattaatgcctttttatgcgaacttttttgtcgaaaacaaattaatttaatttagttgatttaagttattcaatcagtctttataatttaatttctaattgaaattatcaaattaaagtttttatttaaattaaagaaaaatattcggcggaagttcattccactatggcgcacaaaatcagataaagcttacaaaaatatcaactaattttatacattttgaaaaaaaaaatttaaatgcaaaaaataacctaaaacatttaatgaagaatcattaacgatact

SEQ ID NO: 29491 - DNA, 1167 bp, Heterodera glycines
  unsure (1)..(1167): unsure at all n locations
gctttggctgaccataactcgccagagagtggagatagacccttagttgatacatttgaaaatgtagagctcggctagcgcattcgaataacacaaaatttgttttcatttgcccncaaacaatccgcttatgacgcgccgaaagaaaattcacaaaaatttggcaccggaaaaactccatttttttatgggccagcatagtaaagtaaacccaaaatgtaagggaatttaaattggtgatgagagatgtttagttttttatttgccccatcctttttctgggaaaaaaaagctgaaaaattttccaattgcatcagatgcagactcaaattcttcaacaacataatgtaaaaaatattacgcaagaaattatttttacatcctttttagaaatgctgcataaatttttattgtaaatagtcacaaacaaactttttttcactcccaatatctaccatttatcattacaaaaggcaatggttaagcactgagatataaaaaaatcgtctagaataattatctcaacaatttgtcgggaaagatgaataaatttcagttgcaataggcatattggctcaatacataaatgtagagcaggctcaaaatagaggaaataccaagattaaaaaattcgtgtgtatcccccactctgctttggctgaccataactcgccagagagtggagatagaccctttgttgatacatttgaaaatgtagagctcggctagcgcattcgaataacacaaaatttgttttcatttgcccccaaacaatccgcttatgacgcgccgaaagaaaattcacaaaaatttggcaccggaaaaactccatttttttatgggccagcatagtaaagtaaacccaaaatgtaagggaatttaaattggtgatgagagatgtttagttttttatttgccccatcctttttctgggaaaaaaaagctgaaaaattttccaattgcatcagatgcagactcaaattcttcaacaacataatgtaaaaaatattacgcaagaaattatttttacatcctttttagaaatgctgcataaatttttattgtaaatagtcacaaacaaactttttttcactcccaatatctaccatttatcattacaaaaggcaatggttaagcactgagatataaaaaatcgtctagaataat

SEQ ID NO: 29492 - DNA, 915 bp, Heterodera glycines
acagaggaggacgagcagtacgagaagaacctggagaagaacaaagtgcgttgggagggataaaaggaaatttccgcccactaaatgtccctttttcgcattaattggcacctgaagcacgcgcacttcctgctcaattgtgccgatgagttgcaccattgtggcgcggacttgtcgtggaacagtccgttgatggccaacgcgcacaaaatggtggccatgcaaagggccatcgccaggcccaagcgacgctccaaccgcgagaatagtcgctgcagcgccttcggcggggaacagatatattgtggcacgtgttgcgtccaatggcactgaactgaccgactgttcgcgcactgcgcgaactccaccgccacgcaatttgccattgccggaatgaaccgaaagtttgggcaacggaggggcggcggcggaggcaccgctgggacttggcatttcctttggctgcttttgttgttgttccatttgttgtggtcactttttgtggcgatcgtttgcttattattaaaaattggagacaaaaaataagaaaataatgagagaaagggagggagagaaagagagagaatgtgtgaagaagagagaaatggggggagggaatggcgacaaaaacggggaatgaatgctttgcggaaaggcttcgattcgatttcacgcatatcaatgtggcgaaatgctatgatcgcggtgatcggaagcaattgatcagagtgagtgatcagagattaggggagggggagaagcgatggttgggaccgttgccagaaaacaaaaagcggtttatacagatggtctgctgctggctaatggaattgacttccagttttattgcgcattgcatttttgttttaccatttctatacggtagcgaactgactgttacggtaaaagggacaa

SEQ ID NO: 29493 - DNA, 1036 bp, Heterodera glycines
cctccactagttttcgatttccttgatgaaaaaatatagttgtaattctcttttacccaagggcaaaaattgatttcttccccgtctttggtccaagtctcggtaattaaaagaatgtctattttttcggtttctaaaataagtgctatttcatcgattttattcattagtgacctaatgtttattaggcagcatttaacattccctttattttttattaaaaagtttggatgggtaattttttggtataaattttttaccgaccggaaaaatttttgtacttttgtataataattatgggtaatttgtagtgatttggttggataatttaaaaattttttcgaatatggtcaatgtcctgcttcagcacaacctgattggcataaatcacccaatcaccgctgtccgtctgccttttcttcgcacaatcctcaatcaattttcgccactccgacaattgttccttggtcatgctctcgcggacgcggacattatggagaccattcaatgcctgcacctttccgcgcatgcggatgacgtgtcacgctgcgtgtttggtcgggaattccattttgagcgggcgcggtcgtccatccattcgtttgccgacgcggaagacaattggtgcttggtcgacgtccgtggcattcaaaatttcgtccacaacggcacggtcctcccgggctctctccgccgctttgtccgatttgctttcgggcatatttgtcacaacgacagttctcagtcgtcgttcctcctcgaccgcgtcgacagccgcagcctgtgaatgaattaggacggaggcggtgcttaaaagggaatgaagctgcttaataagcaacttggcgtagtcgggaatggagttgtctgagtcgatttctttggggatttgtagttggtcaaggtcggacagaaatttttttggggcagtgttgtcagaaggaggagaaaaattcgccattctgtttgccatcgattaggagaggagatgacaattttgaaggaatgacaattttgaaggaatgacaattttgaa

SEQ ID NO: 29494 - DNA, 1177 bp, Heterodera glycines
ttctcactagagttgagcgggaccgggaattttgacaaaaactgggaccgggacttaccgggaccagaaaagtcgggaccgggaccaagtttttcgaccgggaccacgagaaaagccgggagcgggaccaaccgggacttttcccaagtgaaaatttttttgaaaaaaattgaaaatttaagtgcactttgttacgaaaattgcctatattaaaaaatgtgcccataaaattttctaattttcatttggggggaggaattcgaaaaatttttccattattcgctggaaaatttttaaaaattttcatttcgggggggggggatcttggaattttcggagtcccaaaattctggattttaaattttttaaatacctctttttgtggcactgttttttcaaaagattttggctacattgtgggcgagggtccggcggtgccgataggcgccggaaaattttcgaaatttgagtgaaatatgttaacagaatttgccaaaaaatgaccgatattttggtaaatttgcggttttaggctgtttaagaaagacaaaataataatttttaagttgaaatattttttattaattaaatttaaataaagtaaaaaaaatataaaaaatgttctatcacggtggggaattgaacccaagagacaagtaatgaaggacagaaggtatagccactacaccacataatgatatacgctgctttatccctctttttcgctgctttgtccctctttttcgctgctttatccctctttttcgctgctttgtccctctttttcgctgctttgtccctctttttcgctgctttgtccctctttttcgttgctttgtccctctttttcgctgctttgtccctctttttcgctgctttgtccctctttttcgctgctttgtccctcttttcgctgctttgtaccgctttttcgctgctttgtccctctttttcgctgctttgtccctctttttcgctgctttgtccctctttttcgctgctttgtccctctttttcgctgctttgtccctctttttcgctgctttgtccctctttttcgctgctttgtccctctttttcgctgctttgtccctctttttcgctgctttgtcactctttttcgctgctttgtcccgcttcttcttttaccggtggagacaatggcctaaattaagcg

SEQ ID NO: 29495 - DNA, 778 bp, Heterodera glycines
attattttttgaagtgagtcaacaccctattagtgctttgctgtgccgagaaccggcaggcaatggatagctttcaatctgcaagaaattagattggcaataagtggttgtaaaaaacttttgggtatggaattattttttgaagtgagtcaaacaccctattagtgctttgctgtgccgagaaccggcaggcaatggatagctttaaatctgcaagaaattatattggcaataagtggttgtaaaaaacttttgggtaatgaattattttttgaagtgagtcaaacaccgtattagtgctttgctgtgccgagaaccggcaggcaatggatggctttaatctgcaagaaattagattggcaataagtggttgtaaaaaacttttgggtaaggaattattttttgaagtgagtcaaacaccctattagtgctttgctgtgccgagaaccggcaggcaatggatggctttcaatctgcaagaaattagattggcaatatattgttgtaaaaaacttttgggtatggaattattttttgaagtgagtcaaacaccctattagtgctttgctgtgccgagaaccggcaggcaatggatggctttaaatctgcaagaaattagattggcaataagtggttgtaaaaaacttttgtgtaaggaattattttttgaagtgagtcaaacaccctattagtgctttgctgtgccgagaaccggcaggtaatggatggcttcaatctgcaagaaattagattggcaataaattgttgtaaaaacctt

SEQ ID NO: 29496 - DNA, 1404 bp, Heterodera glycines
  unsure (1)..(1404): unsure at all n locations
gtaaaaatcgtaattacgctcaaaaagcttctcaaacaattntagcgcttccaattccttctacaatcgcctttatacatcccattatgaacgctaaaattatcagagtgccgaaaatcgcgtgtgatctacgcctagaaaaaaatggtgtaagtaaaaatcgtaactacgctcaaaaagcttctcaaccaattttagcgcatccaattccttctacaatcgcctttatacatcccattatgaacgctaaaattatcagagtgccgaaaatcgcatttgatctaagcctagaaaaaatggtctaagtaaaaatcgtaattacgctcaaaaagcttctcaatcaattttagcgcttccaattccttctacaatcgcctttatacatcccattatgagcgctaaaattatcagagtgccgaaaatcgcatgtgatctaagcctagcaaaaaatggtgtaagtaaaaatcgtaattacgctcaaaaagcttctcaaacaattttagcgcatccaattccttctacaatcgcctttatacatcccattatgaacgctaaaattatcagagtgccgaaaatcgcatgtgatctaagcctagaaaaaaatggtcaagtaaaaatatgagcgctaaaattatcagagtgccgaaaatcgcatgtgatctaagcctagcaaaaaatggtgtaagtaaaaatcgtaattacgctcaaaaagctcctcaaacaattttagcgcttccaattccttctacaatcgcctttatacatcccattatgagcgctaaaattatcagagtgccgaaaatcgcatgtgatctaagcctagcaaaaaatggtgtaagtaaaaatcgtaattacgctcaaaaagctcctcaaacaattttagcgcttccaattccttctacaatcgcctttatacatcccattatgaacgctaaaattatcagagtgccgaaaatcgcatgtgatctaagcctagcaaaaaatggtgtaagtaaaaatcgtaattacgctcaaaaagcttctcaaacaattttagcgcatccaattcattctacaatcgcctttatacatcccattatgagcgctaaaattatcagagtgccgaaaatcgcatgtgatctaagcctagcaaaaaatggtgtaagtaaaaatcgtaattacgctcaaaaagctcctcaaacaattttagcgcttccaattccttctacaatcgcctttatacatcccattatgagcgctaaaattatcagagtgccgaaaatcgcatgtgatctaagcctagaaaaaaatggtgtaagtaaaaatcgtaactacgctcaaaaagcttctcaaccaattttagcgcatccaattccttctacaatagcctttatacatcccattatgagcgctaaaattatcaga

SEQ ID NO: 29497 - DNA, 1955 bp, Heterodera glycines
  unsure (1)..(1955): unsure at all n locations
aataaaggtttgtaaanttctttaaaatacaatgggaacttaaaaatggggatttttgagtttttaagaccaggcaaccaaataaagtaggagctagcaaatcctggtaaattctttgaacaagtctaataataaaaaataggtaatttactaattagaattttaaattccaaccataggagaatttgtcaatggaaaccagagaaaatacattaggtaattaaattttaaaaatcgacacccggtagatgactcactcagctgcaatttttgctcataagtcaaatcgccagccggcaagttgggatttgtgtaatctctgctcttgtcattgttccatctgttaaggatgaaaaatggctttttaagaaaaaatgggcataattaatgggttacttacttgacattcaaagtgttcagctttgaatattcaatgtgcaactaaaaattttgtaataaaaatgataaatatttttaaaataaaaaagagagtttaatttattataattatttgattccttccgagtcaaaaaataattaaataatttatttgctttcaatatatatgttaataaaaatttcagtttaatcgggattataaatttaatttattttaataaaaatataacaattatttattttcacgaaaaaatcatttatgtaagaaaaattgaaataattagaaataatgcttaccgtacaacacccgttgtatatattgagaccgtccaatgagtttcctgattttatggaaaacaattagtatattttttagattaaaaattaagcaacgcacttgcattctgtgctgagcttgcttcactgagctgaattaatgcttggaataaatctaaaaagaatagataatttaaaataatttatataaaaataaaaatttattttattttttactgtttttattgaatgtgataatgcgtagaacttttccgtagcgagaaaaaattaggaacaaagcatccaatgtgacacttaaaatgaagaaattttaaaaaattaaaataattttaataaaaaaataaaaatttacgggtaaagcatgtaatcgatgattatgcgctgaaatgggaacaaaatggcgtaatatgaatattatttaaaaggaccaaaattgagttgggctgtgcctgaacacccgccgacaaatcttgataactttgggagaggcttgacccatcgaaacattgcaatgccacggcaccattagagtcgaactaaaaataaagtcatttattttaatttaatatgtaaaaagatgtagctataagtttcaatgatattttttgagcccgcttcatacaataaaattggcacattacatttttgggggattgttcactgtgtttatgaggcccgccgtttaatagaaatgtataaaacgaaattatttaaatatttaattccgaaattcaacaaaaaaaaatcattgcccctgagcagtcccatattaactttgagctgaaacgttaaacacctgctgctgctgttgatgatgaagatgaggttcagcaaatctgagaaaatcagtgccgcacaattcttttggggccaaagcagtggtgccattgccgttgctgctgccatggccaacaccatttgtacttggcgtggtagtgccgttggtgctcagcagctcagttgccgttggggtcacctccaatgcggttgtgacatggttttgctgtgctgcacataacggcgcggacaatgccatttgctggtgaagcttttgcgtgcctgagttgttgcagttggtttcaggcgttgcagcagttgcagcggcaacgagtgcagcagcggaagaaggtgcgtaattgagctgaatttttctttaattaattaaatttcttgtaaaaaaaattattaaaattgtaccgatgtgttcaccgggatgagggtgggtgccagagcggaaaaagacgggcaaagcgtatcct

SEQ ID NO: 29498 - DNA, 1486 bp, Heterodera glycines
ttgattggctcttataggcaggtcttggttgaaatttgggcgttgctgtccttggtgaaactcaaatccttcgtcctggtaactgttgtgtctctgtgcataggcatgtggcggaggaatccgccaacgtgtggttgttggccttcaacaaccggttgctgtgtgagccttatctgctgttctctctgccgctcaaaattaaccggtgcgttttcgtacaattggccattgggtcgaggacaagcaattggattgaccgcttgtggatgatttaatgcagggaaattttgcccgacttgattcggcatttgattttgcatgaaattcataaccctaatttggttttcgatgacgctcaaattttccgggagttgcattcttaggtctcgctgcagggcgcttaggttttgttcgttaagcggtgttgaaaaggctcgcaatccatgcgcgtccaatgcatcgtttccaaaactccctctatccccagcttcaactccattttccaaattttgttggaccataccgttgacattttgttcgtcgccgttttccatttcgtcgtactccaattgttcctcaggtgcgctttgttccattcctccgtaaagcaggcgacgacgaatatcagtctctgctaaaacattttcatgattgtcgtccagtcgctgattttcgttgttcgctaagggcgagatcggcctgccccccgaaactccaaaattttcagccctaaatgcgtttccatcgcggtcaacaatgattccctggttgagtgccctcgtccgggttagtggtggcgttcggagaacaggcattttgtttgagctaccgcagaggtactactcaacaaaacaaaaacaaagttaaacggcgatcctcgaaaaacggcccgatttgtcggtgatttgtcgatgtccacacttatcgcaacaatgcgttatttgtgggacacaaattcaactcgaagaaaaagcgcaacaatgcgttatttattcagaatcgcagctatgcgtttttctgaaatgtcccttgctcctcgtcctcactttgttgctttattgcccctggcagacaggcaagcaataaacggcgagataacgaaccccggcaaacgggctattcgctttgatgaacaactaagtaaagctccgacagacggactacttcacttttgttgaattcccgtgaaccacaaatttctcccttccaattttgttcccgagcttgccctttttcgaaaaaccaaaaattcccggcaccgcttactcagttgaccaggagcgccacgtgcaaaatctggagtccaattggtcagaggggctcgtctcttttgctttgcttcgttcggcttttcctcttctcgggccaaataattaattagcacagaaaggacaaacggggccaatgcttattaattaaggacggcgaaatagtccggggacagttcaatttattttatttaaattcatggcgagacgacgaaaat

SEQ ID NO: 29499 - DNA, 985 bp, Heterodera glycines
agagaggcgaggaaaaataaaggttgcatccaaatgtaatttttttttacattgaagcatttggatggcttgctgtttacagttggctaagtcttctttgcaagaagcagcacaacttttgtttgggccaacgaccccaaaccattcgaatagcaatcgattgggctgactagactccatatttgcaggaatagcaatggcaggtctatcttaaaggcctgacgagttatgtttcgacaaacatcctgtacaccataaatcgatttgcaaatttagtcgaactatataaatttttcaaaaaatgattcatcttttttatggttagcgcatatgtctctagctttatagaaacggtccccgaatctgcgaggaactacttttttgagaatttctatagattattattttgcatgaatccttcgcttaaattcccatttatcttataaagtcagattaaattaattaccccgatttgttttagaattggtccaaacacgcttgctaatagcttttcttttcgaaaagagaggcgaggaaaaataaaggttgcatccaaatgtaatttttttttacattgaagcatttggatggcttgctgtttacagttggcttagtcttctttgcaagaagcagcacaacttttgtttgggccaacgaccccaaaccattcgaatagcaatcgattgggctgactagactccatatttgcaggaatagcaatggcaggtctatcttaaaggcctgacgagttatgtttcgacaaacatcctgtacaccataaatcgatttgcaaatttagtcgaactatataaatttttcaaaaaatgattcatcttttttatggttagcgcatatgtctctagttttatagaaacggtccccgaatctgcgaggaactacttttttgagaatttctatagattattattttgcatgaatccttcgcttaaattcccatttatcttataaagtcagattaaattaa

SEQ ID NO: 29500 - DNA, 1248 bp, Heterodera glycines
aaaatcccttaatgcaggctgtcattcgtccttttcacgttcgtttaggagttttttgttcacttgtcgtttaaccgaaacgaaggcgaaaaccgacgatccgaaatgtttacttttcgaaaattattttttgtaggaaaatatcaaaataaatttcttttgctattgatgagacttgtcgtgtggtgcagtgattagtgtttctcttttatcttttcaaaaagagctcaattttaattctaattttaaaagttattttatttatttttaaaaaaataatccgttaaagaaatttagtaaaattcaaaatttatgaaaattcgggacagaaaccccctaaaaatcagcattaaattgcttaataatagtgaaaaatttttaaatttgtgcttttttcttaagaaaatgtgcaaaaagtgtaagatttaaactgttgcaattgttaattaaatacattcggtaaatattgatcatatggccaagagccgaaaatggccaaaatatatacaaatcgttagctcaacggtctgtaatagaagaatttaaaagactttttttgtagcaaccaatccccgaagagttacagaccagggatgttgcaaaaatgaaaataaaatacgagacaccagatacgagaaaaaacgagacaaaaataaaatacgagacgagcccccccccccccctaaaaaacacgagaatatgagacacgagatgagacgagattttttttacaaaaaattaaccgaaaattttgattgtaattttacggaaatggtcgggccgaaatttttatttcaaatggccggcacaaaacggggattttttccaaaagaaataaaaaattatgattttttcaagtgaaaaattatagtaaaataaaagtgtttttctttaattttagaaaaccaaaaactaaaactaaatccaccttaaaatttaaccaatcaacaattaattaacacaccgtttcaaaaaacgagacatgaaccaataaatagagagtgcagagaaaaaaacatctctcattttggcatactatttttttatctctgttaatagagaaaaactgaattcacttcatcctgtttaactttttttctgcttgttaaatccacttcaaattttgcatattgaaagaaaaaaattttctgcacctgtcaatagtgaattcattattgtctataggctaatacaaaaattataagaaaatccaaatttccaacgctcatatcttttttctaaatcatc

SEQ ID NO: 29501 - DNA, 1153 bp, Heterodera glycines
acgaggaaaggatgtcgaacgctgaaaaattggaaacttttgacgaaatttattagggaaatagtcaattttcaagtccccacttttgcgttcgacaaatcgccctgagttagtcgaacgcaatgcgcgaccctttccttgaacttgccgctcccttttctcgttttttcccctttccttttctctctcttttttctttcccttttttctcgacccccccgcctcgtgcgttcgacacactccgaccccttgcgttcggcgtcatgaccccccccccctgcccccccttgcacagctatgcataagactttgcataacgatgttttgtcctatcaggaagttggatggaatgtcattgaaaaacaaaccgactcggtttgccatgacaaattaccgttaaaatatttaaagtggggaagtcaggcttaaatcaggaaaaaagtcgaaggatctgaaacaatgaaggccgacagcgagtgataatgagagaccgtgttaaccgaacgaagaggacaaattgagtaaaattcacttggtgaggagagaatgagaatagacgaaaagagtgaaaatacaaatgccaataaattggaaaatggatttacgcctcttttcaaaaagtttgtgatttagttttgaggcggaaaatcacttaaaacctccaatcccttgccttccgttgatctcaaaattcgaggaatttttattgagcaatttgatggaaatgcgaagagcaataaaaatgttttttaaagcattttaaattgtgtttgtcgaagtgaaacgatggatgggaaaaaatgaatggcttaaatatggaggatgagaccgccgtcaatttgcgagagatatgtgtcggagataacaagagagaaaatgaaaaatagaatttaacaatttaaatgattgaaaaagcatttaaaattaaagcataattaataataaaaataaatgagaatttgggcagaaagaattgaatgaccctgaacatcaaattgagtgatcgaaattttgtaagatttgccaggcctctccattcggaaattcctcctcatgccttcctccctttttttccctccactttcgacattcttccttcggtctcgtttgtacggctcaactcgccaaaccatgtcggcctcgttgacggcct

SEQ ID NO: 29502 - DNA, 2198 bp, Heterodera glycines
tatttgtatgaggtggtttatacacgaactttctatgacctgtcctgcgtttatcacccccagtctcggccgtccttcctcttttatccacccgcacattctttttgccgctgtcgtcgagcgcccaactcggcggggctcagttaggggcgaatgttcagcaggaatatccatttgtctagtgctgtttcaataatccccgcattttgtttccttctaccagtgcttgtcactggaatttgcccgatcgaaagatgattttaatcagacgcgtgcgcatgacctgaccgacctcgcttggtgggggaaccccattcgatcattcgtaatagggcgctcgatgccaaagctcatcgatcccatttattttttaaacttaaccaaatgggcatattttttgcatttttgttaagccactaaatggggattattttcgtcgtatcaaaggaattttgttaaacagtcatttagaagaatattaatttttttttaataaaaattataaattaatttaatagtgaattttagtttaaattggcccatttgtcacagaattattgccattgcgcaaaaaacgaaaaatggcatggccaaaattggcacaatcgtttcgaattcgtttgttcagcagcaagtacaccacgggaggacaaccttaaaagcatattttttaaacatataaaccatttgtaaaaaactaactaaattttttattaggtttgccatataaaaattattttattttaatttaatttaatttaaaaaagtatgcaaaccattcgtaaaaagccatgcataagtgccaacgatgatgtaaatttcaccgattctgacatattgcattaaggcgtaaattacggcggtaattgaatgtatcaaacttatgataatcacttggagaaacgtctgaatatttattttaaaaatatttggaattactcaaaattaatgttatttttctaaaaagggggcaagggtttttactgattaaaaatggagaattaataaagtatttataactaaattatttgtttttgttgccatttttttcgtcccttataataatcacctggagaaacgtctgaatattaattaaaaactgcttaaaattatttcaaattattgttttatattctaaaatagtgttgtggttttaatgatgaaaaatggagaaaataaaacaaagtattttttattaatagtttttttttgctattttttgtgtccacgatggttgaaacgtttgctgattttctgtcattttgtacattttccaacttagaaatgcagaaaacaacaaataaactgtggataggccaaaaatgacgatgcaattattcacattatccatggtgttgtaatactataattttaaaaattaactaaaattaattaaaatttgcacaatttgtccaaaatcgtccgtatagccaacgtatgggttgaaaaaccacgacaaataaacaccactgaacagaattggcttagtgaacatggcaactgcaaagccataacaacttttaaaaaattatacaataaaatatattgcatacctcctccgaaaattccgcttgaataaatcagcaatggatagtcacaataaacggcaatgttctggattttagggaatttatccctgaggaattggtcccacaaaaactttcggctggtcttcatcgttgtggcatattattattattattcctgttgacattgttcacggcataatttggtgccgtccatgccatggcaattggcccatttgacaccgaattgttgttgcaattgcgcaaaaaacggaaaatggcacggccaaagttggcacaatcgttccgaattcgtttgttcagcagcaaatacaccacgggaggacaaccttttgaaaaattatttttgtattttttaaatatagagaatataccatttaataaatatgaaattcattatttaattaatttacgcattttcaagcaccaaaaaattactaaagattcctcaaattttttcaattccaaacataacccacatattagaaattaaaataatttgatatctttgtttatacagtatgaaactaatgatttaatttaaagatagcaaaatttcaattaaaaatcctacaaaatttatttacaaagttgtcaaattcatggcttaaatgtttgacttaccatgcgaaaaaagccatgcataagtgc
